United States Patent Application Publication US 2024/0327476 A1 - sequence listing, part 85

SEQ ID NO: 162609 - DNA, 3123 bp, synthetic construct
  misc_feature 1..3123: note = Description of Artificial Sequence: Synthetic coding sequence
  source 1..3123: mol_type = other DNA
atgggagaggagggcggcagcgccagccatgatgaggaggagcgggcctctgtgctgctgggccacagccctggctgtgagatgtgcagccaggaggccttccaggcccagaggagccagctggtggagctgctggtgtctggcagcctggagggctttgaatctgtgctggactggctgctgtcctgggaggtgctgtcctgggaggactatgagggcttccacctgctgggccagcccctgagccacctggcccggcggctgctggacacagtgtggaacaagggcacctgggcctgccagaagctgattgctgctgcccaggaggcccaggccgacagccagagccccaagctgcacggctgctgggacccccacagcctgcacccagcccgggacctgcagagccacaggcctgccatcgtgcggcggctgcacagccacgtggagaacatgctggacctggcctgggagcggggctttgtgtcccagtatgaatgtgatgagatccggctgcccatcttcacccccagccagagggcccggcggctgctggacctggccaccgtgaaggccaacggcctggccgccttcctgctgcagcacgtgcaggagctgcctgtgcccctggccctgcccctggaggccgccacctgcaagaagtacatggccaagctgcggaccaccgtgtctgcccagagccgcttcctgagcacctatgatggagctgagaccctgtgcctggaggacatctacacagaaaatgtgctggaggtgtgggcagatgtgggcatggccggccccccccagaagagccctgccaccctgggcctggaggagctgttcagcaccccaggccacctgaatgatgatgctgacacagtgctggtggtgggggaggccggcagcggcaagagcaccctgctgcagaggctgcacctgctgtgggccgccggccaggacttccaggagttcctgtttgtgttccccttcagctgccggcagctgcagtgcatggccaagcccctgtctgtgaggaccctgctgtttgagcactgctgctggccagatgtgggccaggaggacatcttccagctgctgctggaccacccagacagagtgctgctgacctttgatggctttgatgagttcaagttccgcttcacagaccgggagcggcactgcagccccacagaccccacctctgtgcagaccctgctcttcaacctgctgcagggcaacctgctgaagaatgccaggaaggtggtgaccagcaggcctgctgctgtgtctgccttcctgaggaagtacatcagaacagagttcaacctgaagggcttcagcgagcagggcatcgagctgtacctgaggaagaggcaccacgagcccggggtggccgacaggctcatccggctgctgcaggagaccagcgccctgcacggcctgtgccacctgcccgtcttctcctggatggtgtccaagtgccaccaggagctgctgctgcaggagggcggcagccccaagaccaccacagacatgtacctgctgatcctgcagcacttcctgctgcacgccaccccaccagacagcgccagccagggcctgggccccagcctgctgcggggccgcctgcccaccctgctgcacctgggccgcctggccctgtggggcctgggcatgtgctgctacgtgttcagcgcccagcagctgcaggccgcccaggtgtccccagatgacatcagcctgggcttcctggtgcgggccaagggcgtggtgcccggcagcacagcccccctggagttcctgcacatcaccttccagtgcttctttgctgccttctacctggccctgtctgcagatgtgcccccagccctgctgcggcacctgttcaactgtggccggcccggcaacagccccatggcccggctgctgcccaccatgtgcatccaggccagcgagggcaaggacagctctgtggccgccctgctgcagaaggccgagccccacaacctgcagatcacagctgccttcctggccggcctgctgagccgggagcactggggcctgctggccgagtgccagaccagcgagaaggccctgctgcggcggcaggcctgtgcccgctggtgcctggcccggagcctgaggaagcacttccacagcatccccccagctgcccctggagaggccaagtctgtgcacgccatgcctggcttcatctggctgatccgcagcctgtatgagatgcaggaggagcggctggccaggaaggccgcccggggcctgaatgtgggccacctgaagctgaccttctgcagcgtgggccccacagaatgtgccgccctggcctttgtgctgcagcacctgcggcggcctgtggccctgcagctggactacaacagcgtgggggacattggagtggagcagctgctgccctgcctgggcgtgtgcaaggccctgtacctgcgggacaacaacatcagtgaccggggcatctgcaagctgattgaatgtgccctgcactgtgagcagctgcagaagctggccctcttcaacaacaagctgacagatggctgtgcccacagcatggccaagctgctggcctgccggcagaacttcctggccctgcggctgggcaacaactacatcacagctgctggggcccaggtgctggccgagggcctgcggggcaacaccagcctgcagttcctgggcttctggggcaacagagtgggagatgaaggagcccaggccctggccgaggccctgggggaccaccagagcctgcgctggctgagcctggtgggcaacaacatcggctctgtgggcgcccaggccctggccctgatgctggccaagaatgtgatgctggaggagctgtgcctggaggagaaccacctgcaggatgaaggagtgtgcagcctggccgagggcctgaagaagaacagcagcctgaagatcctgaagctgagcaacaactgcatcacctacctgggcgctgaggccctgctgcaggccctggagagaaatgacaccatcctggaggtgtggctgcggggcaacaccttcagcctggaggaggtggacaagctgggctgccgggacacccggctgctgctgtag

SEQ ID NO: 162610 - DNA, 543 bp, synthetic construct
  misc_feature 1..543: note = Description of Artificial Sequence: Synthetic coding sequence
  source 1..543: mol_type = other DNA
atgtggctgctgcccccaggccaggtgttcaatgccttcttccccagccggctgggcaacaactacatcacagctgctggggcccaggtgctggccgagggcctgcggggcaacaccagcctgcagttcctgggcttctggggcaacagagtgggagatgaaggagcccaggccctggccgaggccctgggggaccaccagagcctgcgctggctgagcctggtgggcaacaacatcggctctgtgggcgcccaggccctggccctgatgctggccaagaatgtgatgctggaggagctgtgcctggaggagaaccacctgcaggatgaaggagtgtgcagcctggccgagggcctgaagaagaacagcagcctgaagatcctgaagctgagcaacaactgcatcacctacctgggcgctgaggccctgctgcaggccctggagagaaatgacaccatcctggaggtgtggctgcggggcaacaccttcagcctggaggaggtggacaagctgggctgccgggacacccggctgctgctgtag

SEQ ID NO: 162611 - DNA, 1008 bp, synthetic construct
  misc_feature 1..1008: note = Description of Artificial Sequence: Synthetic coding sequence
  source 1..1008: mol_type = other DNA
atggaggacagcggcaagaccttcagcagcgaggaggaggaggccaactactggaaggacctggccatgacctacaagcagagagctgagaacacccaggaggagctgcgggagttccaggagggcagccgggagtatgaggccgagctggagacccagctgcagcagatcgagaccaggaacagagacctgctgtctgagaacaaccggctgaggatggagctggagaccatcaaggagaagtttgaggtgcagcacagcgagggctaccggcagatcagcgccctggaggatgacctggcccagaccaaggccatcaaggaccagctgcagaagtacatccgggagctggagcaggccaatgatgacctggagcgggccaagagggccaccatcatgagcctggaggactttgagcagaggctgaaccaggccatcgagagaaatgccttcctggagagcgagctggatgagaaggagaacctgctggagagcgtgcagaggctgaaggatgaggcccgggacctgcggcaggagctggccgtgcagcagaagcaggagaagcccaggacccccatgcccagctctgtggaggccgagaggacagacacagctgtgcaggccactggatctgtgcccagcacccccatcgcccaccggggccccagcagcagcctgaacaccccaggcagcttcagaagaggcctggatgacagcactggaggcacccccctgaccccagctgcccgcatcagcgccctgaacatcgtgggggacctgctgaggaaggtgggcgccctggagagcaagctggccagctgcaggaacctggtgtatgaccagagccccaacagaactggaggccctgccagcggccgcagcagcaagaacagagatggaggagagcggcggcccagcagcacctctgtgcccctgggggacaagggcctggacaccagctgccgctggctgagcaagagcaccaccaggagcagcagcagctgctag

SEQ ID NO: 162612 - DNA, 1041 bp, synthetic construct
  misc_feature 1..1041: note = Description of Artificial Sequence: Synthetic coding sequence
  source 1..1041: mol_type = other DNA
atggaggacagcggcaagaccttcagcagcgaggaggaggaggccaactactggaaggacctggccatgacctacaagcagagagctgagaacacccaggaggagctgcgggagttccaggagggcagccgggagtatgaggccgagctggagacccagctgcagcagatcgagaccaggaacagagacctgctgtctgagaacaaccggctgaggatggagctggagaccatcaaggagaagtttgaggtgcagcacagcgagggctaccggcagatcagcgccctggaggatgacctggcccagaccaaggccatcaaggaccagctgcagaagtacatccgggagctggagcaggccaatgatgacctggagcgggccaagagggccaccatcatgagcctggaggactttgagcagaggctgaaccaggccatcgagagaaatgccttcctggagagcgagctggatgagaaggagaacctgctggagagcgtgcagaggctgaaggatgaggcccgggacctgcggcaggagctggccgtgcagcagaagcaggagaagcccaggacccccatgcccagctctgtggaggccgagaggacagacacagctgtgcaggccactggatctgtgcccagcacccccatcgcccaccggggccccagcagcagcctgaacaccccaggcagcttcagaagaggcctggatgacagcactggaggcacccccctgaccccagctgcccgcatcagcgccctgaacatcgtgggggacctgctgaggaaggtgggcgccctggagagcaagctggccagctgcaggaacctggtgtatgaccagagccccaacagaactggaggccctgccagcggccgcagcagcaagaacagagatggaggagagcggcggcccagcagcacctctgtgcccctgggggacaagggcctgggcaagaggctggagtttgggaagccacccagccacatgagcagcagccccctgcccagcgcccagggcgtggtgaagatgctgctgtag

SEQ ID NO: 162613 - DNA, 1008 bp, synthetic construct; identical to SEQ ID NO: 162611
  misc_feature 1..1008: note = Description of Artificial Sequence: Synthetic coding sequence
  source 1..1008: mol_type = other DNA

SEQ ID NO: 162614 - DNA, 1008 bp, synthetic construct; identical to SEQ ID NO: 162611
  misc_feature 1..1008: note = Description of Artificial Sequence: Synthetic coding sequence
  source 1..1008: mol_type = other DNA

SEQ ID NO: 162615 - DNA, 471 bp, synthetic construct
  misc_feature 1..471: note = Description of Artificial Sequence: Synthetic coding sequence
  source 1..471: mol_type = other DNA
atgggcgccagccggctgtacaccctggtgctggtgctgcagccccagagggtgctgctgggcatgaagaagaggggctttggagctggccgctggaatggatttggaggcaaggtgcaggagggggagaccattgaagatggagcccggcgggagctgcaggaggagagcggcctgactgtggatgccctgcacaaggtgggccagatcgtgtttgaatttgtgggggagcctgagctgatggatgtgcacgtgttctgcacagacagcatccagggcacccctgtggagagtgatgagatgaggccctgctggttccagctggaccagatccccttcaaggacatgtggccagatgacagctactggttccccctgctgctgcagaagaagaagttccacggctacttcaagttccagggccaggacaccatcctggactacaccctgcgggaggtggacacagtgtag

SEQ ID NO: 162616 - DNA, 540 bp, synthetic construct
  misc_feature 1..540: note = Description of Artificial Sequence: Synthetic coding sequence
  source 1..540: mol_type = other DNA
atgagcggcatcagcccccagcagatgggagagcctgagggctcctggagcggcaagaaccctggcaccatgggcgccagccggctgtacaccctggtgctggtgctgcagccccagagggtgctgctgggcatgaagaagaggggctttggagctggccgctggaatggatttggaggcaaggtgcaggagggggagaccattgaagatggagcccggcgggagctgcaggaggagagcggcctgactgtggatgccctgcacaaggtgggccagatcgtgtttgaatttgtgggggagcctgagctgatggatgtgcacgtgttctgcacagacagcatccagggcacccctgtggagagtgatgagatgaggccctgctggttccagctggaccagatccccttcaaggacatgtggccagatgacagctactggttccccctgctgctgcagaagaagaagttccacggctacttcaagttccagggccaggacaccatcctggactacaccctgcgggaggtggacacagtgtag

SEQ ID NO: 162617 - DNA, 471 bp, synthetic construct; identical to SEQ ID NO: 162615
  misc_feature 1..471: note = Description of Artificial Sequence: Synthetic coding sequence
  source 1..471: mol_type = other DNA

SEQ ID NO: 162618 - DNA, 471 bp, synthetic construct; identical to SEQ ID NO: 162615
  misc_feature 1..471: note = Description of Artificial Sequence: Synthetic coding sequence
  source 1..471: mol_type = other DNA

SEQ ID NO: 162619 - DNA, 540 bp, synthetic construct; identical to SEQ ID NO: 162616
  misc_feature 1..540: note = Description of Artificial Sequence: Synthetic coding sequence
  source 1..540: mol_type = other DNA

SEQ ID NO: 162620 - DNA, 540 bp, synthetic construct; identical to SEQ ID NO: 162616
  misc_feature 1..540: note = Description of Artificial Sequence: Synthetic coding sequence
  source 1..540: mol_type = other DNA

SEQ ID NO: 162621 - DNA, 114 bp, synthetic construct
  misc_feature 1..114: note = Description of Artificial Sequence: Synthetic coding sequence
  source 1..114: mol_type = other DNA
atgggcgccagccggctgtacaccctggtgctggtgctgcagccccagagggtgctgctgggcatgaagaagaggggctttggagctggccgctggaatggatttggaggatag

SEQ ID NO: 162622 - DNA, 495 bp, synthetic construct
  misc_feature 1..495: note = Description of Artificial Sequence: Synthetic coding sequence
  source 1..495: mol_type = other DNA
atgaagtgcaagcccaaccagaccaggacctatgaccctgagggcttcaagaagagagctgcctgcctgtgcttccgctctgagcgggaggatgaggtgctgctggtgagcagcagccgctacccagaccgctggatcgtgcctgggggcggcatggagcctgaggaggagcccggcggcgctgctgtgcgggaggtgtatgaggaggccggcgtgaagggcaagctgggccgcctgctgggcgtgtttgagcagaaccaggaccccaagcacaggacctacgtgtatgtgctgactgtgacagagctgctggaggactgggaggacagcgtgtccattggaaggaagcgggagtggttcaaggtggaggatgccatcaaggtgctgcagtgccacaagcctgtgcatgctgagtacctggagaagctgaagctgggcggcagccccaccaatggaaacagcatggcccccagcagcccagacagcgacccctag

SEQ ID NO: 162623 - DNA, 495 bp, synthetic construct; identical to SEQ ID NO: 162622
  misc_feature 1..495: note = Description of Artificial Sequence: Synthetic coding sequence
  source 1..495: mol_type = other DNA

SEQ ID NO: 162624 - DNA, 444 bp, synthetic construct
  misc_feature 1..444: note = Description of Artificial Sequence: Synthetic coding sequence
  source 1..444: mol_type = other DNA
atggccctgcgggcctgtggcctcatcatcttccgccgctgcctgatccccaaggtggacaacaatgccatcgagttcctgctgctgcaggccagtgatggcatccaccactggaccccacccaagggccacgtggagcctggagaagatgacctggagacagccctgcgggagacccaggaggaggccggcattgaagctggccagctgaccatcatcgagggcttcaagcgggagctgaactacgtggccaggaacaagcccaagacagtcatctactggctggccgaggtgaaggactatgatgtggagatccggctgagccatgagcaccaggcctaccgctggctgggcctggaggaggcctgccagctggcccagttcaaggagatgaaggccgccctgcaggagggccaccagttcctgtgcagcattgaggcctag

SEQ ID NO: 162625 - DNA, 444 bp, synthetic construct; identical to SEQ ID NO: 162624
  misc_feature 1..444: note = Description of Artificial Sequence: Synthetic coding sequence
  source 1..444: mol_type = other DNA

SEQ ID NO: 162626 - DNA, 444 bp, synthetic construct; identical to SEQ ID NO: 162624
  misc_feature 1..444: note = Description of Artificial Sequence: Synthetic coding sequence
  source 1..444: mol_type = other DNA

SEQ ID NO: 162627 - DNA, 444 bp, synthetic construct; identical to SEQ ID NO: 162624
  misc_feature 1..444: note = Description of Artificial Sequence: Synthetic coding sequence
  source 1..444: mol_type = other DNA

SEQ ID NO: 162628 - DNA, 444 bp, synthetic construct; identical to SEQ ID NO: 162624
  misc_feature 1..444: note = Description of Artificial Sequence: Synthetic coding sequence
  source 1..444: mol_type = other DNA

SEQ ID NO: 162629 - DNA, 1395 bp, synthetic construct
  misc_feature 1..1395: note = Description of Artificial Sequence: Synthetic coding sequence
  source 1..1395: mol_type = other DNA
atggagaccctgtccttcccccgctacaacgtggccgagatcgtcatccacatccggaacaagatcctgaccggggctgatggcaagaacctgaccaagaatgacctgtaccccaaccccaagccagaggtgctgcacatgatctacatgagggccctgcagatcgtgtatggcatccggctggagcacttctacatgatgcctgtgaacagcgaggtgatgtacccccacctgatggagggcttcctgcccttcagcaacctggtgacccacctggacagcttcctgcccatctgccgggtgaatgactttgaaacagctgacatcctgtgccccaaggccaagaggaccagccgcttcctgagcggcatcatcaacttcatccacttccgggaggcctgccgggagacctacatggagttcctgtggcagtacaagagcagcgctgacaagatgcagcagctgaatgctgcccaccaggaggccctgatgaagctggagcggctggacagcgtgcctgtggaggagcaggaggagttcaagcagctgagtgatggcatccaggagctgcagcagagcctgaaccaggacttccaccagaagaccatcgtgctgcaggagggcaacagccagaagaagagcaacatcagcgagaagaccaagaggctgaatgagctgaagctgtctgtggtgtccctgaaggagatccaggagagcctgaagaccaagatcgtggacagccctgagaagctgaagaactacaaggagaagatgaaggacacagtgcagaagctgaagaatgcccggcaggaggtggtggagaagtatgagatctatggagacagcgtggactgcctgcccagctgccagctggaggtgcagctgtaccagaagaagatccaggacctgagtgacaaccgggagaagctggccagcatcctgaaggagagcctgaacctggaggaccagatcgagagtgatgaaagtgagctgaagaagctgaagacagaggagaacagcttcaagaggctgatgattgtgaagaaggagaagctggccacagcccagttcaagatcaacaagaagcatgaagatgtgaagcagtacaagaggacagtgattgaggactgcaacaaggtgcaggagaagagaggagctgtgtatgaaagagtgaccaccatcaaccaggagatccagaagatcaagctgggcatccagcagctgaaggatgctgctgagcgggagaagctgaagagccaggagatcttcctgaacctgaagacagccctggagaagtaccatgatggcatcgagaaggctgctgaggacagctatgccaagattgatgagaagacagctgagctgaagaggaagatgttcaagatgagcacctag

SEQ ID NO: 162630 - DNA, 1395 bp, synthetic construct; identical to SEQ ID NO: 162629
  misc_feature 1..1395: note = Description of Artificial Sequence: Synthetic coding sequence
  source 1..1395: mol_type = other DNA

SEQ ID NO: 162631 - DNA, 609 bp, synthetic construct
  misc_feature 1..609: note = Description of Artificial Sequence: Synthetic coding sequence
  source 1..609: mol_type = other DNA
atggagaccctgtccttcccccgctacaacgtggccgagatcgtcatccacatccggaacaagatcctgaccggggctgatggcaagaacctgaccaagaatgacctgtaccccaaccccaagccagaggtgctgcacatgatctacatgagggccctgcagatcgtgtatggcatccggctggagcacttctacatgatgcctgtgaacagcgaggtgatgtacccccacctgatggagggcttcctgcccttcagcaacctggtgacccacctggacagcttcctgcccatctgccgggtgaatgactttgaaacagctgacatcctgtgccccaaggccaagaggaccagccgcttcctgagcggcatcatcaacttcatccacttccgggaggcctgccgggagacctacatggagttcctgtggcagtacaagagcagcgctgacaagatgcagcagctgaatgctgcccaccaggaggccctgatgaagctggagcggctggacagcgtgcctgtggaggagcaggaggagttcaagcagctgagtgatggcatccaggagctgcagcagagcctgaaccaggacttccaccagaagacctag

SEQ ID NO: 162632 - DNA, 438 bp, synthetic construct
  misc_feature 1..438: note = Description of Artificial Sequence: Synthetic coding sequence
  source 1..438: mol_type = other DNA
atggagaccctgtccttcccccgctacaacgtggccgagatcgtcatccacatccggaacaagatcctgaccggggctgatggcaagaacctgaccaagaatgacctgtaccccaaccccaagccagaggtgctgcacatgatctacatgagggccctgcagatcgtgtatggcatccggctggagcacttctacatgatgcctgtgaacagcgaggtgatgtacccccacctgatggagggcttcctgcccttcagcaacctggtgacccacctggacagcttcctgcccatctgccgggtgaatgactttgaaacagctgacatcctgtgccccaaggccaagaggaccagccgcttcctgagcggcatcatcaacttcatccacttccgggaggcctgccgggagacctacatggagttcctgtggcagtactag

SEQ ID NO: 162633 - DNA, 666 bp, synthetic construct
  misc_feature 1..666: note = Description of Artificial Sequence: Synthetic coding sequence
  source 1..666: mol_type = other DNA
atggagaccctgtccttcccccgctacaacgtggccgagatcgtcatccacatccggaacaagatcctgaccggggctgatggcaagaacctgaccaagaatgacctgtaccccaaccccaagccagaggtgctgcacatgatctacatgagggccctgcagatcgtgtatggcatccggctggagcacttctacatgatgcctgtgaacagcgaggtgatgtacccccacctgatggagggcttcctgcccttcagcaacctggtgacccacctggacagcttcctgcccatctgccgggtgaatgactttgaaacagctgacatcctgtgccccaaggccaagaggaccagccgcttcctgagcggcatcatcaacttcatccacttccgggaggcctgccgggagacctacatggagttcctgtggcagtacaagagcagcgctgacaagatgcagcagctgaatgctgcccaccaggaggccctgatgaagctggagcggctggacagcgtgcctgtggaggagcaggaggagttcaagcagctgagtgatggcatccaggagctgcagcagagcctgaaccaggacttccaccagaagacctgctgcaagcgggagatccccaagaggagccagatcttccagaggaagcccagcgtgtag

SEQ ID NO: 162634 - DNA, 1254 bp, synthetic construct
  misc_feature 1..1254: note = Description of Artificial Sequence: Synthetic coding sequence
  source 1..1254: mol_type = other DNA
atggagaccctgtccttcccccgctacaacgtggccgagatcgtcatccacatccggaacaagatcctgaccggggctgatggcaagaacctgaccaagaatgacctgtaccccaaccccaagccagaggtgctgcacatgatctacatgagggccctgcagatcgtgtatggcatccggctggagcacttctacatgatgcctgtgaacagcgaggtgatgtacccccacctgatggagggcttcctgcccttcagcaacctggtgacccacctggacagcttcctgcccatctgccgggtgaatgactttgaaacagctgacatcctgtgccccaaggccaagaggaccagccgcttcctgagcggcatcatcaacttcatccacttccgggaggcctgccgggagacctacatggagttcctgtggcagtacaagagcagcgctgacaagatgcagcagctgaatgctgcccaccaggaggccctgatgaagctggagcggctggacagcgtgcctgtggaggagcaggaggagttcaagcagctgagtgatggcatccaggagctgcagcagagcctgaaccaggacttccaccagaagaccatcgtgctgcaggagggcaacagccagaagaagagcaacatcagcgagaagaccaagaggctgaatgagctgaagctgtctgtggtgtccctgaaggagatccaggagagcctgaagaccaagatcgtggacagccctgagaagctgaagaactacaaggagaagatgaaggacacagtgcagaagctgaagaatgcccggagcctgaacctggaggaccagattgaaagtgatgagagcgagctgaagaagctgaagacagaagaaaattccttcaagaggctgatgattgtgaagaaggagaagctggccacagcccagttcaagatcaacaagaagcatgaagatgtgaagcagtacaagaggacagtgattgaggactgcaacaaggtgcaggagaagagaggagctgtgtatgagcgggtgaccaccatcaaccaggagatccagaagatcaagctgggcatccagcagctgaaggatgctgctgagcgggagaagctgaagagccaggagatcttcctgaacctgaagacagccctggagaagtaccatgatggcatcgagaaggccgcagaagattcctatgccaagattgatgagaagacagctgagctgaagaggaagatgttcaagatgagcacctag

SEQ ID NO: 162635 - DNA, 375 bp, synthetic construct
  misc_feature 1..375: note = Description of Artificial Sequence: Synthetic coding sequence
  source 1..375: mol_type = other DNA
atggagaccctgtccttcccccgctacaacgtggccgagatcgtcatccacatccggaacaagatcctgaccggggctgatggcaagaacctgaccaagaatgacctgtaccccaaccccaagccagaggtgctgcacatgatctacatgagggccctgcagatcgtgtatggcatccggctggagcacttctacatgatgcctgtgaacagcgaggtgatgtacccccacctgatggagggcttcctgcccttcagcaacctggtgacccacctggacagcttcctgcccatctgccgggtgaatgactttgaaacagctgacatcctgtgccccaaggccaagaggaccagccgcttcctgagcggcatctag

SEQ ID NO: 162636 - DNA, 702 bp, synthetic construct
  misc_feature 1..702: note = Description of Artificial Sequence: Synthetic coding sequence
  source 1..702: mol_type = other DNA
atgaacaagctgcggcagagcttccggaggaagaaggatgtgtatgtgcctgaggccagccggccccaccagtggcagacagatgaggagggcgtgaggacaggcaagtgcagcttccctgtgaagacaggcaagaaggctgtgaaggctgtgctgtgggtgtctgcagatggcctgcgggtggtggatgagaagaccaaggacctgattgtggaccagaccatcgagaaggtgtccttctgtgccccagacaggaactttgaccgggccttctcctacatctgcagagatggcaccacccggcgctggatctgccactgcttcatggctgtgaaggacaccggggagcggctgagccatgctgtgggctgtgcctttgctgcctgcctggagaggaagcagaagcgggagaaggaatgtggggtgacagccacctttgatgccagcaggaccaccttcacccgggagggcagcttccgggtgaccacagccacagagcaggccgagcgggaggagatcatgaagcagatgcaggatgccaagaaggccgagacagacaagatcgtggtgggcagctctgtggcccctggcaacacagcccccagccccagcagccccaccagccccaccagtgatgccaccaccagcctggagatgaacaacccccacgccatccccaggagacatgcccccatcgagtag

SEQ ID NO: 162637 - DNA, 1956 bp, synthetic construct
  misc_feature 1..1956: note = Description of Artificial Sequence: Synthetic coding sequence
  source 1..1956: mol_type = other DNA
atgaacaagctgcggcagagcttccggaggaagaaggatgtgtatgtgcctgaggccagccggccccaccagtggcagacagatgaggagggcgtgaggacaggcaagtgcagcttccctgtgaagtacctgggccacgtggaggtggatgagagccggggcatgcacatctgtgaagatgctgtgaagaggctgaaggccgagaggaagttcttcaagggcttcttcggcaagacaggcaagaaggctgtgaaggctgtgctgtgggtgtctgcagatggcctgcgggtggtggatgagaagaccaaggacctgattgtggaccagaccatcgagaaggtgtccttctgtgccccagacaggaactttgaccgggccttctcctacatctgcagagatggcaccacccggcgctggatctgccactgcttcatggctgtgaaggacaccggggagcggctgagccatgctgtgggctgtgcctttgctgcctgcctggagaggaagcagaagcgggagaaggaatgtggggtgacagccacctttgatgccagcaggaccaccttcacccgggagggcagcttccgggtgaccacagccacagagcaggccgagcgggaggagatcatgaagcagatgcaggatgccaagaaggccgagacagacaagatcgtggtgggcagctctgtggcccctggcaacacagcccccagccccagcagccccaccagccccaccagtgatgccaccaccagcctggagatgaacaacccccacgccatccccaggagacatgcccccatcgagcagctggcccggcagggcagcttccggggcttccctgccctgagccagaagatgagccccttcaagaggcagctgagcctgcgcatcaatgagctgcccagcaccatgcagaggaagacagacttccccatcaagaatgctgtgcctgaggtggagggggaggccgagagcatcagcagcctgtgcagccagatcaccaatgccttcagcaccccagaggaccccttcagcagcgcccccatgaccaagcctgtgacagtggtggccccccagagccccaccttccaggccaatggaacagattctgccttccacgtgctggccaagccagcccacacagccctggcccctgtggccatgcctgtgcgggagaccaacccctgggcccacgccccagatgctgccaacaaggagattgctgccacctgcagcggcacagagtggggccagagcagtggagctgccagccctggcctcttccaggccggccacaggaggacccccagcgaggccgaccgctggctggaggaggtgtccaagtctgtgcgggcccagcagccccaggccagcgctgcccccctgcagcctgtgctgcagcccccaccacccacagccatcagccagcctgccagccccttccagggcaatgccttcctgaccagccagcctgtgcctgtgggcgtggtgcctgccctgcagcctgcctttgtgcctgcccagagctaccctgtggccaacggcatgccctacccagccccaaatgtgcctgtggtgggcatcacccccagccagatggtggccaacgtgtttggaacagctggccacccccaggccgcccacccccaccagagccccagcctggtgcggcagcagaccttcccccactatgaggccagcagcgccaccaccagccccttcttcaagcccccagcccagcacctgaatggcagcgctgccttcaacggggtggatgatggccgcctggccagcgctgacagacacacagaggtgcccaccggcacctgccctgtggacccctttgaggcccagtgggccgccctggagaacaagagcaagcagaggaccaaccccagccccaccaaccccttcagcagtgacctgcagaagacctttgaaattgagctgtag

SEQ ID NO: 162638 - DNA, 1812 bp, synthetic construct
  misc_feature 1..1812: note = Description of Artificial Sequence: Synthetic coding sequence
  source 1..1812: mol_type = other DNA
atgaacaagctgcggcagagcttccggaggaagaaggatgtgtatgtgcctgaggccagccggccccaccagtggcagacagatgaggagggcgtgaggacaggcaagtgcagcttccctgtgaagtacctgggccacgtggaggtggatgagagccggggcatgcacatctgtgaagatgctgtgaagaggctgaaggccgagaggaagttcttcaagggcttcttcggcaagacaggcaagaaggctgtgaaggctgtgctgtgggtgtctgcagatggcctgcgggtggtggatgagaagaccaaggacctgattgtggaccagaccatcgagaaggtgtccttctgtgccccagacaggaactttgaccgggccttctcctacatctgcagagatggcaccacccggcgctggatctgccactgcttcatggctgtgaaggacaccggggagcggctgagccatgctgtgggctgtgcctttgctgcctgcctggagaggaagcagaagcgggagaaggaatgtggggtgacagccacctttgatgccagcaggaccaccttcacccgggagggcagcttccgggtgaccacagccacagagcaggccgagcgggaggagatcatgaagcagatgcaggatgccaagaaggccgagacagacaagatcgtggtgggcagctctgtggcccctggcaacacagcccccagccccagcagccccaccagccccaccagtgatgccaccaccagcctggagatgaacaacccccacgccatccccaggagacatgcccccatcgagcagctggcccggcagggcagcttccggggcttccctgccctgagccagaagatgagccccttcaagaggcagctgagcctgcgcatcaatgagctgcccagcaccatgcagaggaagacagacttccccatcaagaatgctgtgcctgaggtggagggggaggccgagagcatcagcagcctgtgcagccagatcaccaatgccttcagcaccccagaggaccccttcagcagcgcccccatgaccaagcctgtgacagtggtggccccccagagccccaccttccagggcacagagtggggccagagcagtggagctgccagccctggcctcttccaggccggccacaggaggacccccagcgaggccgaccgctggctggaggaggtgtccaagtctgtgcgggcccagcagccccaggccagcgctgcccccctgcagcctgtgctgcagcccccaccacccacagccatcagccagcctgccagccccttccagggcaatgccttcctgaccagccagcctgtgcctgtgggcgtggtgcctgccctgcagcctgcctttgtgcctgcccagagctaccctgtggccaacggcatgccctacccagccccaaatgtgcctgtggtgggcatcacccccagccagatggtggccaacgtgtttggaacagctggccacccccaggccgcccacccccaccagagccccagcctggtgcggcagcagaccttcccccactatgaggccagcagcgccaccaccagccccttcttcaagcccccagcccagcacctgaatggcagcgctgccttcaacggggtggatgatggccgcctggccagcgctgacagacacacagaggtgcccaccggcacctgccctgtggacccctttgaggcccagtgggccgccctggagaacaagagcaagcagaggaccaaccccagccccaccaaccccttcagcagtgacctgcagaagacctttgaaattgagctgtag

SEQ ID NO: 162639 - DNA, 1923 bp, synthetic construct
  misc_feature 1..1923: note = Description of Artificial Sequence: Synthetic coding sequence
  source 1..1923: mol_type = other DNA
atgaacaagctgcggcagagcttccggaggaagaaggatgtgtatgtgcctgaggccagccggccccaccagtggcagacagatgaggagggcgtgaggacaggcaagtgcagcttccctgtgaagtacctgggccacgtggaggtggatgagagccggggcatgcacatctgtgaagatgctgtgaagaggctgaaggccaccgggaagaaggctgtgaaggctgtgctgtgggtgtctgcagatggcctgcgggtggtggatgagaagaccaaggacctgattgtggaccagaccatcgagaaggtgtccttctgtgccccagacaggaactttgaccgggccttctcctacatctgcagagatggcaccacccggcgctggatctgccactgcttcatggctgtgaaggacacaggagagcggctgagccatgctgtgggctgtgcctttgctgcctgcctggagaggaagcagaagcgggagaaggaatgtggggtgacagccacctttgatgccagcaggaccaccttcacccgggagggcagcttccgggtgaccacagccacagagcaggccgagcgggaggagatcatgaagcagatgcaggatgccaagaaggccgagacagacaagatcgtggtgggcagctctgtggcccctggcaacacagcccccagccccagcagccccaccagccccaccagtgatgccaccaccagcctggagatgaacaacccccacgccatccccaggagacatgcccccatcgagcagctggcccggcagggcagcttccggggcttccctgccctgagccagaagatgagccccttcaagaggcagctgagcctgcgcatcaatgagctgcccagcaccatgcagaggaagacagacttccccatcaagaatgctgtgcctgaggtggagggggaggccgagagcatcagcagcctgtgcagccagatcaccaatgccttcagcaccccagaggaccccttcagcagcgcccccatgaccaagcctgtgacagtggtggccccccagagccccaccttccaggccaacggcacagacagcgccttccacgtgctggccaagccagcccacacagccctggcccctgtggccatgcctgtgcgggagaccaacccctgggcccacgccccagatgctgccaacaaggagattgctgccacctgcagcggcacagagtggggccagagcagcggggccgccagccctggcctcttccaggccggccacaggaggaccccatctgaggccgaccgctggctggaggaggtgtccaagtctgtgcgggcccagcagccccaggccagcgctgcccccctgcagcctgtgctgcagcccccaccacccacagccatcagccagcctgccagccccttccagggcaatgccttcctgaccagccagcctgtgcctgtgggcgtggtgcctgccctgcagcctgcctttgtgcctgcccagagctaccctgtggccaacggcatgccctacccagcccccaacgtgcctgtggtgggcatcacccccagccagatggtggccaacgtgtttggaacagctggccacccccaggccgcccacccccaccagagccccagcctggtgcggcagcagaccttcccccactatgaggccagcagcgccaccaccagccccttcttcaagcccccagcccagcacctgaatggatctgctgccttcaatggagtggatgatggccgcctggccagcgctgacagacacacagaggtgcccaccggcacctgccctgtggacccctttgaggcccagtgggccgccctggagaacaagagcaagcagaggaccaaccccagccccaccaaccccttcagcagtgacctgcagaagacctttgaaattgagctgtag

SEQ ID NO: 162640 - DNA, 1518 bp, synthetic construct
  misc_feature 1..1518: note = Description of Artificial Sequence: Synthetic coding sequence
  source 1..1518: mol_type = other DNA
atgaacaagctgcggcagagcttccggaggaagaaggatgtgtatgtgcctgaggccagccggccccaccagtggcagacagatgaggagggcgtgaggacaggcaagtgcagcttccctgtgaagtacctgggccacgtggaggtggatgagagccggggcatgcacatctgtgaagatgctgtgaagaggctgaaggccgagaggaagttcttcaagggcttcttcggcaagacaggcaagaaggctgtgaaggctgtgctgtgggtgtctgcagatggcctgcgggtggtggatgagaagaccaaggacctgattgtggaccagaccatcgagaaggtgtccttctgtgccccagacaggaactttgaccgggccttctcctacatctgcagagatggcaccacccggcgctggatctgccactgcttcatggctgtgaaggacaccggggagcggctgagccatgctgtgggctgtgcctttgctgcctgcctggagaggaagcagaagcgggagaaggaatgtggggtgacagccacctttgatgccagcaggaccaccttcacccgggagggcagcttccgggtgaccacagccacagagcaggccgagcgggaggagatcatgaagcagatgcaggatgccaagaaggtgcctgaggtggagggggaggccgagagcatcagcagcctgtgcagccagatcaccaatgccttcagcaccccagaggaccccttcagcagcgcccccatgaccaagcctgtgacagtggtggccccccagagccccaccttccagggcacagagtggggccagagcagtggagctgccagccctggcctcttccaggccggccacaggaggacccccagcgaggccgaccgctggctggaggaggtgtccaagtctgtgcgggcccagcagccccaggccagcgctgcccccctgcagcctgtgctgcagcccccaccacccacagccatcagccagcctgccagccccttccagggcaatgccttcctgaccagccagcctgtgcctgtgggcgtggtgcctgccctgcagcctgcctttgtgcctgcccagagctaccctgtggccaacggcatgccctacccagccccaaatgtgcctgtggtgggcatcacccccagccagatggtggccaacgtgtttggaacagctggccacccccaggccgcccacccccaccagagccccagcctggtgcggcagcagaccttcccccactatgaggccagcagcgccaccaccagccccttcttcaagcccccagcccagcacctgaatggcagcgctgccttcaacggggtggatgatggccgcctggccagcgctgacagacacacagaggtgcccaccggcacctgccctgtggacccctttgaggcccagtgggccgccctggagaacaagagcaagcagaggaccaaccccagccccaccaaccccttcagcagtgacctgcagaagacctttgaaattgagctgtag

SEQ ID NO: 162641 - DNA, 1923 bp, synthetic construct; identical to SEQ ID NO: 162639
  misc_feature 1..1923: note = Description of Artificial Sequence: Synthetic coding sequence
  source 1..1923: mol_type = other DNA

SEQ ID NO: 162642 - DNA, 1371 bp, synthetic construct
  misc_feature 1..1371: note = Description of Artificial Sequence: Synthetic coding sequence
  source 1..1371: mol_type = other DNA
atgaacaagctgcggcagagcttccggaggaagaaggatgtgtatgtgcctgaggccagccggccccaccagtggcagacagatgaggagggcgtgaggacaggcaagtgcagcttccctgtgaagtacctgggccacgtggaggtggatgagagccggggcatgcacatctgtgaagatgctgtgaagaggctgaaggccgagaggaagttcttcaagggcttcttcggcaagacaggcaagaaggctgtgaaggctgtgctgtgggtgtctgcagatggcctgcgggtggtggatgagaagaccaaggacctgattgtggaccagaccatcgagaaggtgtccttctgtgccccagacaggaactttgaccgggccttctcctacatctgcagagatggcaccacccggcgctggatctgccactgcttcatggctgtgaaggacaccggggagcggctgagccatgctgtgggctgtgcctttgctgcctgcctggagaggaagcagaagcgggagaaggaatgtggggtgacagccacctttgatgccagcaggaccaccttcacccgggagggcagcttccgggtgaccacagccacagagcaggccgagcgggaggagatcatgaagcagatgcaggatgccaagaagggcacagagtggggccagagcagcggggccgccagccctggcctcttccaggccggccacaggaggaccccatctgaggccgaccgctggctggaggaggtgtccaagtctgtgcgggcccagcagccccaggccagcgctgcccccctgcagcctgtgctgcagcccccaccacccacagccatcagccagcctgccagccccttccagggcaatgccttcctgaccagccagcctgtgcctgtgggcgtggtgcctgccctgcagcctgcctttgtgcctgcccagagctaccctgtggccaacggcatgccctacccagcccccaacgtgcctgtggtgggcatcacccccagccagatggtggccaacgtgtttggaacagctggccacccccaggccgcccacccccaccagagccccagcctggtgcggcagcagaccttcccccactatgaggccagcagcgccaccaccagccccttcttcaagcccccagcccagcacctgaatggatctgctgccttcaatggagtggatgatggccgcctggccagcgctgacagacacacagaggtgcccaccggcacctgccctgtggacccctttgaggcccagtgggccgccctggagaacaagagcaagcagaggaccaaccccagccccaccaaccccttcagcagtgacctgcagaagacctttgaaattgagctgtag

SEQ ID NO: 162643 - DNA, 777 bp, synthetic construct
  misc_feature 1..777: note = Description of Artificial Sequence: Synthetic coding sequence
  source 1..777: mol_type = other DNA
atgaacaagctgcggcagagcttccggaggaagaaggatgtgtatgtgcctgaggccagccggccccaccagtggcagacagatgaggagggcgtgaggacaggcaagtgcagcttccctgtgaagtacctgggccacgtggaggtggatgagagccggggcatgcacatctgtgaagatgctgtgaagaggctgaaggccgagaggaagttcttcaagggcttcttcggcaagacaggcaagaaggctgtgaaggctgtgctgtgggtgtctgcagatggcctgcgggtggtggatgagaagaccaaggacctgattgtggaccagaccatcgagaaggtgtccttctgtgccccagacaggaactttgaccgggccttctcctacatctgcagagatggcaccacccggcgctggatctgccactgcttcatggctgtgaaggacaccggggagcggctgagccatgctgtgggctgtgcctttgctgcctgcctggagaggaagcagaagcgggagaaggaatgtggggtgacagccacctttgatgccagcaggaccaccttcacccgggagggcagcttccgggtgaccacagccacagagcaggccgagcgggaggagatcatgaagcagatgcaggatgccaagaaggccgagacagacaagatcgtggtgggcagctctgtggcccctggcaacacagcccccagccccagcagccccaccagccccaccagtgatgccaccaccagcctggagatgaacaacccctag

SEQ ID NO: 162644 - DNA, 1779 bp, synthetic construct
  misc_feature 1..1779: note = Description of Artificial Sequence: Synthetic coding sequence
  source 1..1779: mol_type = other DNA
atgaacaagctgcggcagagcttccggaggaagaaggatgtgtatgtgcctgaggccagccggccccaccagtggcagacagatgaggagggcgtgaggacaggcaagtgcagcttccctgtgaagtacctgggccacgtggaggtggatgagagccggggcatgcacatctgtgaagatgctgtgaagaggctgaaggccaccgggaagaaggctgtgaaggctgtgctgtgggtgtctgcagatggcctgcgggtggtggatgagaagaccaaggacctgattgtggaccagaccatcgagaaggtgtccttctgtgccccagacaggaactttgaccgggccttctcctacatctgcagagatggcaccacccggcgctggatctgccactgcttcatggctgtgaaggacacaggagagcggctgagccatgctgtgggctgtgcctttgctgcctgcctggagaggaagcagaagcgggagaaggaatgtggggtgacagccacctttgatgccagcaggaccaccttcacccgggagggcagcttccgggtgaccacagccacagagcaggccgagcgggaggagatcatgaagcagatgcaggatgccaagaaggccgagacagacaagatcgtggtgggcagctctgtggcccctggcaacacagcccccagccccagcagccccaccagccccaccagtgatgccaccaccagcctggagatgaacaacccccacgccatccccaggagacatgcccccatcgagcagctggcccggcagggcagcttccggggcttccctgccctgagccagaagatgagccccttcaagaggcagctgagcctgcgcatcaatgagctgcccagcaccatgcagaggaagacagacttccccatcaagaatgctgtgcctgaggtggagggggaggccgagagcatcagcagcctgtgcagccagatcaccaatgccttcagcaccccagaggaccccttcagcagcgcccccatgaccaagcctgtgacagtggtggccccccagagccccaccttccagggcacagagtggggccagagcagcggggccgccagccctggcctcttccaggccggccacaggaggaccccatctgaggccgaccgctggctggaggaggtgtccaagtctgtgcgggcccagcagccccaggccagcgctgcccccctgcagcctgtgctgcagcccccaccacccacagccatcagccagcctgccagccccttccagggcaatgccttcctgaccagccagcctgtgcctgtgggcgtggtgcctgccctgcagcctgcctttgtgcctgcccagagctaccctgtggccaacggcatgccctacccagcccccaacgtgcctgtggtgggcatcacccccagccagatggtggccaacgtgtttggaacagctggccacccccaggccgcccacccccaccagagccccagcctggtgcggcagcagaccttcccccactatgaggccagcagcgccaccaccagccccttcttcaagcccccagcccagcacctgaatggatctgctgccttcaatggagtggatgatggccgcctggccagcgctgacagacacacagaggtgcccaccggcacctgccctgtggacccctttgaggcccagtgggccgccctggagaacaagagcaagcagaggaccaaccccagccccaccaaccccttcagcagtgacctgcagaagacctttgaaattgagctgtag

SEQ ID NO: 162645 - DNA, 204 bp, synthetic construct
  misc_feature 1..204: note = Description of Artificial Sequence: Synthetic coding sequence
  source 1..204: mol_type = other DNA
atgaacaagctgcggcagagcttccggaggaagaaggatgtgtatgtgcctgaggccagccggccccaccagtggcagacagatgaggagggcgtgaggacaggcaagtgcagcttccctgtgaagtacctgggccacgtggaggtggatgagagccggggcatgcacatctgtgaagatgctgtgaagaggctgaaggcctag

SEQ ID NO: 162646 - DNA, 1956 bp, synthetic construct; identical to SEQ ID NO: 162637
  misc_feature 1..1956: note = Description of Artificial Sequence: Synthetic coding sequence
  source 1..1956: mol_type = other DNA

SEQ ID NO: 162647 - DNA, 777 bp, synthetic construct; identical to SEQ ID NO: 162643
  misc_feature 1..777: note = Description of Artificial Sequence: Synthetic coding sequence
  source 1..777: mol_type = other DNA

SEQ ID NO: 162648 - DNA, 1812 bp, synthetic construct; identical to SEQ ID NO: 162638
  misc_feature 1..1812: note = Description of Artificial Sequence: Synthetic coding sequence
  source 1..1812: mol_type = other DNA

SEQ ID NO: 162649 - DNA, 1923 bp, synthetic construct; identical to SEQ ID NO: 162639
  misc_feature 1..1923: note = Description of Artificial Sequence: Synthetic coding sequence
  source 1..1923: mol_type = other DNA

SEQ ID NO: 162650 - DNA, 1830 bp, synthetic construct
  misc_feature 1..1830: note = Description of Artificial Sequence: Synthetic coding sequence
  source 1..1830: mol_type = other DNA
atgagccgctctgctgctgccagcggcggcccccggcggcctgagcggcacctgcccccagccccctgtggggcccctggccccccagagacctgcaggacagagccagatggagctggcaccatgaacaagctgcggcagagcctgcggcggaggaagccagcctacgtgcctgaggccagccggccccaccagtggcaggctgatgaagatgctgtgaggaagggcacctgcagcttccctgtgcgctacctgggccacgtggaggtggaggagagccggggcatgcacgtgtgtgaagatgctgtgaagaagctgaaggccatgggcaggaagtctgtgaagtctgtgctgtgggtgtctgcagatggcctgcgggtggtggatgacaagaccaaggacctgctggtggaccagaccatcgagaaggtgtccttctgtgccccagacaggaacctggacaaggccttctcctacatctgcagagatggcaccacccggcgctggatctgccactgcttcctggccctgaaggacagcggggagcggctgagccatgctgtgggctgtgcctttgctgcctgcctggagaggaagcagaggcgggagaaggaatgtggggtgacagctgcctttgatgccagcaggaccagctttgcccgggagggcagcttccggctgagcggcggcggccggcctgctgagcgggaggccccagacaagaagaaggccgaggccgccgccgcccccaccgtggcccctggccctgcccagcccggccacgtgagccccaccccagccaccaccagccctggagagaagggggaggccggcacccctgtggccgccggcaccacagctgctgccatccccaggagacatgcccccctggagcagctggtgcggcagggcagcttccggggcttccctgccctgagccagaagaacagccccttcaagaggcagctgagcctgcggctgaatgagctgcccagcaccctgcagaggagaacagacttccaggtgaagggcaccgtgcctgagatggagcccccaggggccggggacagcgacagcatcaatgccctgtgcacccagatcagcagcagctttgccagcgctggggccccagcccctggccccccaccagccaccaccggcaccagcgcctggggcgagcccagcgtgcccccagctgctgccttccagcccggccacaagaggaccccatctgaggccgagcgctggctggaggaggtgtcccaggtggccaaggcccagcagcagcagcagcagcagcagcagcagcagcagcagcagcagcagcagcagcagcaggccgcctctgtggcccctgtgcccaccatgcccccagccctgcagcccttccctgcccctgtgggcccctttgatgctgccccagcccaggtggccgtgttcctgcccccaccccacatgcagcccccatttgtgcctgcctacccaggcctgggctacccacccatgccccgggtgcctgtggtgggcatcacccccagccagatggtggccaatgccttctgcagcgctgcccagctgcagccccagcctgccaccctgctgggcaaggccggggccttccccccaccagccatccccagcgcccctggcagccaggcccggccccggcccaacggggccccctggcccccagagcccgccccagccccagcccctgagctggacccctttgaggcccagtgggccgccctggagggcaaggccaccgtggagaagcccagcaaccccttcagcggggacctgcagaagacctttgaaattgagctgtag

SEQ ID NO: 162651 - DNA, 1707 bp, synthetic construct
  misc_feature 1..1707: note = Description of Artificial Sequence: Synthetic coding sequence
  source 1..1707: mol_type = other DNA
atgaacaagctgcggcagagcctgcggcggaggaagccagcctacgtgcctgaggccagccggccccaccagtggcaggctgatgaagatgctgtgaggaagggcacctgcagcttccctgtgcgctacctgggccacgtggaggtggaggagagccggggcatgcacgtgtgtgaagatgctgtgaagaagctgaaggccatgggcaggaagtctgtgaagtctgtgctgtgggtgtctgcagatggcctgcgggtggtggatgacaagaccaaggacctgctggtggaccagaccatcgagaaggtgtccttctgtgccccagacaggaacctggacaaggccttctcctacatctgcagagatggcaccacccggcgctggatctgccactgcttcctggccctgaaggacagcggggagcggctgagccatgctgtgggctgtgcctttgctgcctgcctggagaggaagcagaggcgggagaaggaatgtggggtgacagctgcctttgatgccagcaggaccagctttgcccgggagggcagcttccggctgagcggcggcggccggcctgctgagcgggaggccccagacaagaagaaggccgaggccgctgctgcccccaccgtggcccctggccctgcccagcccggccacgtgagccccaccccagccaccaccagccctggagagaagggggaggccggcacccctgtggccgccggcaccacagctgctgccatccccaggagacatgcccccctggagcagctggtgcggcagggcagcttccggggcttccctgccctgagccagaagaacagccccttcaagaggcagctgagcctgcggctgaatgagctgcccagcaccctgcagaggagaacagacttccaggtgaagggcaccgtgcctgagatggagcccccaggagctggggacagcgacagcatcaatgccctgtgcacccagatcagcagcagctttgccagcgctggggccccagcccctggccccccaccagccaccaccggcaccagcgcctggggcgagcccagcgtgcccccagctgctgccttccagcccggccacaagaggacccccagcgaggccgagcgctggctggaggaggtgtcccaggtggccaaggcccagcagcagcagcagcagcagcagcagcagcagcagcagcagcagcagcagcagcagcaggccgcctctgtggcccctgtgcccaccatgcccccagccctgcagcccttccctgcccctgtgggcccctttgatgctgccccagcccaggtggccgtgttcctgcccccaccccacatgcagcccccatttgtgcctgcctacccaggcctgggctacccacccatgccccgggtgcctgtggtgggcatcacccccagccagatggtggccaatgccttctgcagcgctgcccagctgcagccccagcctgccaccctgctgggcaaggccggggccttccccccaccagccatccccagcgcccctggcagccaggcccggccccggcccaatggagccccctggcccccagagcccgccccagccccagcccctgagctggacccctttgaggcccagtgggccgccctggagggcaaggccaccgtggagaagcccagcaaccccttcagcggggacctgcagaagacctttgaaattgagctgtag

SEQ ID NO: 162652 - DNA, 1446 bp, synthetic construct
  misc_feature 1..1446: note = Description of Artificial Sequence: Synthetic coding sequence
  source 1..1446: mol_type = other DNA
atgaagggccggggcatgctggtgctgctgctgcatgctgtggtgctgggcctgcccagcgcctgggccgtgggcgcctgtgcccgggcctgcccagctgcctgtgcctgcagcacagtggagcggggctgcagcgtgcgctgtgacagagctggcctgctgcgggtgcctgctgagctgccctgtgaggccgtgtccattgacctggacagaaatggcctgcgcttcctgggggagcgggccttcggcaccctgcccagcctgcggcggctgagcctgcggcacaacaacctgtccttcatcacccctggggccttcaagggcctgccccggctggccgagctgcggctggcccacaacggggacctgcgctacctgcacgcccggacctttgctgccctgagccggctgcggcggctggacctggccgcctgccgcctcttctctgtgcctgagcggctgctggccgagctgcctgccctgcgggagctggccgcctttgacaacctcttccggcgggtgcctggggccctgcggggcctggccaacctgacccacgcccacctggagcggggccgcatcgaggccgtggccagcagcagcctgcagggcctgcggcggctgcggagcctgagcctgcaggccaacagagtgcgggctgtgcatgctggggccttcggggactgtggggtgctggagcacctgctgctgaatgacaacctgctggccgagctgcctgcagatgccttccggggcctgcggcggctgcggaccctgaacctgggcggcaatgccctggacagagtggcccgggcctggtttgctgacctggccgagctggagctgctgtacctggacagaaattccatcgcctttgtggaggagggcgccttccagaacctgagcggcctgctggccctgcacctgaatggaaaccggctgactgtgctggcctgggtggccttccagcccggcttcttcctgggccgcctcttcctgttcaggaacccctggtgctgtgactgccgcctggagtggctgcgggactggatggagggcagcggccgggtgacagatgtgccctgtgccagccctggctctgtggccggcctggacctgagccaggtgaccttcggccgcagcagtgatggcctgtgtgtggaccctgaggagctgaacctgaccaccagcagccctggccccagccctgagcctgctgccaccaccgtgagccgcttcagcagcctgctgagcaagctgctggccccccgggtgcctgtggaggaggccgccaacaccaccggcggcctggccaatgccagcctgagtgacagcctgagcagccggggcgtgggcggggccggccggcagccctggttcctgctggccagctgcctgctgcccagcgtggcccagcacgtggtgtttggcctgcagatggactag

SEQ ID NO: 162653 - DNA, 1446 bp, synthetic construct; identical to SEQ ID NO: 162652
  misc_feature 1..1446: note = Description of Artificial Sequence: Synthetic coding sequence
  source 1..1446: mol_type = other DNA

SEQ ID NO: 162654 - DNA, 1191 bp, synthetic construct
  misc_feature 1..1191: note = Description of Artificial Sequence: Synthetic coding sequence
  source 1..1191: mol_type = other DNA
atgccacccaagaagggaggagatggcatcaagcccccacccatcatcggccgcttcggcaccagcctgaagattggaattgtgggcctgcccaacgtgggcaagagcaccttcttcaacgtgctgaccaacagccaggccagcgctgagaacttccccttctgcaccatcgaccccaatgaaagccgggtgcctgtgcctgatgaaagatttgacttcctgtgccagtaccacaagccagccagcaagatcccagccttcctgaatgtggtggacattgctggcctggtgaagggggcccacaacggccagggcctgggcaatgccttcctgagccacatcagcgcctgtgatggcatcttccacctgacccgggcctttgaagatgatgacatcacccacgtggagggctctgtggaccccatccgggacatcgagatcatccacgaggagctgcagctgaaggatgaggagatgattggccccatcatcgacaagctggagaaggtggccgtgcggggcggggacaagaagctgaagccagaatatgacatcatgtgcaaggtgaagtcctgggtgattgaccagaagaagcctgtgcgcttctaccatgactggaatgacaaggagattgaggtgctgaacaagcacctgttcctgaccagcaagcccatggtgtacctggtgaacctgtctgagaaggactacatcaggaagaagaacaagtggctgatcaagatcaaggagtgggtggacaagtatgaccccggggccctggtgatccccttcagcggggccctggagctgaagctgcaggagctgtctgctgaggagcggcagaagtacctggaggccaacatgacccagagcgccctgcccaagatcatcaaggccggctttgctgccctgcagctggagtacttcttcaccgctggcccagatgaggtgcgggcctggaccatcaggaagggcaccaaggccccccaggccgccggcaagatccacacagactttgagaagggcttcatcatggccgaggtgatgaagtatgaggacttcaaggaggagggctctgaaaatgctgtgaaggctgctgggaagtaccggcagcagggcaggaactacatcgtggaggatggagacatcatcttcttcaagttcaacaccccccagcagcccaagaagaagtag

SEQ ID NO: 162655 - DNA, 717 bp, synthetic construct
  misc_feature 1..717: note = Description of Artificial Sequence: Synthetic coding sequence
  source 1..717: mol_type = other DNA
atgattggccccatcatcgacaagctggagaaggtggccgtgcggggcggggacaagaagctgaagccagaatatgacatcatgtgcaaggtgaagtcctgggtgattgaccagaagaagcctgtgcgcttctaccatgactggaatgacaaggagattgaggtgctgaacaagcacctgttcctgaccagcaagcccatggtgtacctggtgaacctgtctgagaaggactacatcaggaagaagaacaagtggctgatcaagatcaaggagtgggtggacaagtatgaccccggggccctggtgatccccttcagcggggccctggagctgaagctgcaggagctgtctgctgaggagcggcagaagtacctggaggccaacatgacccagagcgccctgcccaagatcatcaaggccggctttgctgccctgcagctggagtacttcttcaccgctggcccagatgaggtgcgggcctggaccatcaggaagggcaccaaggccccccaggccgccggcaagatccacacagactttgagaagggcttcatcatggccgaggtgatgaagtatgaggacttcaaggaggagggctctgaaaatgctgtgaaggctgctgggaagtaccggcagcagggcaggaactacatcgtggaggatggagacatcatcttcttcaagttcaacaccccccagcagcccaagaagaagtag

SEQ ID NO: 162656 - DNA, 1251 bp, synthetic construct
  misc_feature 1..1251: note = Description of Artificial Sequence: Synthetic coding sequence
  source 1..1251: mol_type = other DNA
atgagcaggaccttcagcgccaagggcggccgggacctggtggagggcccccagtacctgatgccacccaagaagggaggagatggcatcaagcccccacccatcatcggccgcttcggcaccagcctgaagattggaattgtgggcctgcccaacgtgggcaagagcaccttcttcaacgtgctgaccaacagccaggccagcgctgagaacttccccttctgcaccatcgaccccaatgaaagccgggtgcctgtgcctgatgaaagatttgacttcctgtgccagtaccacaagccagccagcaagatcccagccttcctgaatgtggtggacattgctggcctggtgaagggggcccacaacggccagggcctgggcaatgccttcctgagccacatcagcgcctgtgatggcatcttccacctgacccgggcctttgaagatgatgacatcacccacgtggagggctctgtggaccccatccgggacatcgagatcatccacgaggagctgcagctgaaggatgaggagatgattggccccatcatcgacaagctggagaaggtggccgtgcggggcggggacaagaagctgaagccagaatatgacatcatgtgcaaggtgaagtcctgggtgattgaccagaagaagcctgtgcgcttctaccatgactggaatgacaaggagattgaggtgctgaacaagcacctgttcctgaccagcaagcccatggtgtacctggtgaacctgtctgagaaggactacatcaggaagaagaacaagtggctgatcaagatcaaggagtgggtggacaagtatgaccccggggccctggtgatccccttcagcggggccctggagctgaagctgcaggagctgtctgctgaggagcggcagaagtacctggaggccaacatgacccagagcgccctgcccaagatcatcaaggccggctttgctgccctgcagctggagtacttcttcaccgctggcccagatgaggtgcgggcctggaccatcaggaagggcaccaaggccccccaggccgccggcaagatccacacagactttgagaagggcttcatcatggccgaggtgatgaagtatgaggacttcaaggaggagggctctgaaaatgctgtgaaggctgctgggaagtaccggcagcagggcaggaactacatcgtggaggatggagacatcatcttcttcaagttcaacaccccccagcagcccaagaagaagtag

SEQ ID NO: 162657 - DNA, 351 bp, synthetic construct
  misc_feature 1..351: note = Description of Artificial Sequence: Synthetic coding sequence
  source 1..351: mol_type = other DNA
atgccacccaagaagggaggagatggcatcaagcccccacccatcatcggccgcttcggcaccagcctgaagattggaattgtgggcctgcccaacgtgggcaagagcaccttcttcaacgtgctgaccaacagccaggccagcgctgagaacttccccttctgcaccatcgaccccaatgaaagccgggtgcctgtgcctgatgaaagatttgacttcctgtgccagtaccacaagccagccagcaagatcccagccttcctgaatgtggtggacattgctggcctggtgaagggggcccacaacggccagggcctgggcaatgccttcctgagccacatcagcgcctag

SEQ ID NO: 162658 - DNA, 837 bp, synthetic construct
  misc_feature 1..837: note = Description of Artificial Sequence: Synthetic coding sequence
  source 1..837: mol_type = other DNA
atgccacccaagaagggaggagatggcatcaagcccccacccatcatcggccgcttcggcaccagcctgaagattggaattgtgggcctgcccaacgtgggcaagagcaccttcttcaacgtgctgaccaacagccaggccagcgctgagaacttccccttctgcaccatcgaccccaatgaaagccgggtgcctgtgcctgatgaaagatttgacttcctgtgccagtaccacaagccagccagcaagatcccagccttcctgaatgtggtggacattgctggcctggtgaagggggcccacaacggccagggcctgggcaatgccttcctgagccacatcagcgcctgtgatggcatcttccacctgacccgggcctttgaagatgatgacatcacccacgtggagggctctgtggaccccatccgggacatcgagatcatccacgaggagctgcagctgaaggatgaggagatgattggccccatcatcgacaagctggagaaggtggccgtgcggggcggggacaagaagctgaagccagaatatgacatcatgtgcaaggtgaagtcctgggtgattgaccagaagaagcctgtgcgcttctaccatgactggaatgacaaggagattgaggtgctgaacaagcacctgttcctgaccagcaagcccatggtgtacctggtgaacctgtctgagaaggactacatcaggaagaagaacaagtggctgctggagagcacagacaacaaggccgagatcatcctgctgaagatggagatcctgagcagcagcaacctgacccacctgaacaacagaagaagaaacaagatctag

SEQ ID NO: 162659 - DNA, 312 bp, synthetic construct
  misc_feature 1..312: note = Description of Artificial Sequence: Synthetic coding sequence
  source 1..312: mol_type = other DNA
atgattggccccatcatcgacaagctggagaaggtggccgtgcggggcggggacaagaagctgaagccagaatatgacatcatgtgcaaggtgaagtcctgggtgattgaccagaagaagcctgtgcgcttctaccatgactggaatgacaaggagattgaggtgctgaacaagcacctgttcctgaccagcaagcccatggtgtacctggtgaacctgtctgagaaggactacatcaggaagaagaacaagtggctgatcaagatcaaggagtgggtggacaagtatgaccccggggccctggtgatctag

SEQ ID NO: 162660 - DNA, 1329 bp, synthetic construct
  misc_feature 1..1329: note = Description of Artificial Sequence: Synthetic coding sequence
  source 1..1329: mol_type = other DNA
atgtgtgagctgagcagagaagatgcccctgtgcgctggtacaaggatggcctggaggtggaggagagcgaggccctggtgctggagagagatggcccccgctgccgcctggtgctgcctgctgcccagccagaagatggaggagaatttgtgtgtgatgctggagatgacagcgccttcttcaccgtgacagtgacagcccctcctgagcgcatcgtgcaccctgctgcccggagcctggacctgcactttggagcccctggccgggtggagctgcgctgtgaggtggccccagctggcagccaggtgcgctggtacaaggatggcctggaggtggaggccagtgatgccctgcagctgggcgctgagggccccaccaggaccctgaccctgccccacgcccagccagaagatgctggggagtatgtgtgtgagaccaggcatgaggccatcaccttcaacgtcatcctggccgagccccctgtgcagttcctggccctggagaccacccccagccccctgtgtgtggcccctggagagcctgtggtgctgagctgtgagctgagcagagctggggcccctgtggtgtggagccacaacggccggcctgtgcaggagggggagggcctggagctgcacgccgagggcccccggcgggtgctgtgcatccaggccgccggccctgcccatgctggcctgtacacctgccagagcggggccgcccctggggcccccagcctgtccttcaccgtgcaggtggccgagcccctgctggtgaagctggtgtctgagctgacccccctgactgtgcatgaaggagatgatgccaccttccgctgtgaggtgagccccccagatgctgatgtgacctggctgagaaatggagctgtggtgaccccaggcccccaggtggagatggcccagaatggcagcagccgcatcctgaccctgcggggctgccagctgggagatgctggcaccgtgaccctgcgggccggcagcacagccaccagcgcccggctgcacgtgcgggagacagagctgctcttcctgcggcggctgcaggatgtgcgggcagaggagggccaggatgtgtgcctggaggtggagaccggccgggtgggcgctgctggagctgtgcgctgggtgcggggcggccagcccctgccccatgacagccggctgtccatggcccaggacggccacatccacaggctcttcatccatggagtcatcctggccgaccagggcacctacggctgtgagagccaccacgacaggaccctggcccggctgtctgtgagaagagaatgtcctgtgctgtcctag

SEQ ID NO: 162661 - DNA, 4206 bp, synthetic construct
  misc_feature 1..4206: note = Description of Artificial Sequence: Synthetic coding sequence
  source 1..4206: mol_type = other DNA
atgaaggccagcagcggggaccagggcagccccccctgcttcctgcgcttccccaggcctgtgcgggtggtgtctggagctgaggccgagctgaagtgtgtggtgctgggggagcccccacctgtggtggtgtgggagaagggcggccagcagctggccgccagcgagcggctgtccttcccagcagatggagctgagcacggcctgctgctgacagctgccctgcccacagatgctggggtgtatgtgtgccgggccagaaatgctgctggggaggcctatgctgctgctgctgtgacagtgctggagcccccagccagtgaccctgagctgcagcctgctgagcggcccctgcccagccctggcagcggggagggcgcccctgtgttcctgaccggccccaggagccagtgggtgctgcggggagctgaggtggtgctgacctgcagagctgggggcctgcctgagcccaccctgtactgggagaaggatggcatggccctggatgaggtgtgggacagcagccactttgccctgcagcccggccgggcagaagatggccctggggccagcctggccctgcgcatcctggccgcccggctgcctgacagcggcgtgtatgtgtgccacgccagaaatgcccacggccacgcccaggccggggccctgctgcaggtgcaccagcccccagagagccccccagctgaccctgatgaggccccagcccctgtggtggagcccctgaagtgtgcccccaagaccttctgggtgaatgaaggcaagcacgccaagttccgctgctacgtgatgggcaagccagagcctgagattgagtggcactgggagggccggcccctgctgcctgacagaagaaggctgatgtacagagacagagatggcggctttgtgctgaaggtgctgtactgccaggccaaggaccggggcctgtatgtgtgtgccgccaggaacagcgctggccagaccctgtctgctgtgcagctgcacgtgaaggagccccggctgcgcttcacccggcccctgcaggatgtggagggccgggagcacggcattgctgtgctggagtgcaaggtgcccaacagccgcatccccacagcctggttccgggaggaccagaggctgctgccctgcaggaaatatgagcagatcgaggagggcaccgtgagaagactcatcatccaccggctgaaggcagatgatgatggcatctacctgtgtgagatgaggggccgggtgaggacagtggccaacgtgacagtgaagggccccatcctgaagaggctgcccaggaagctggatgtgctggagggggagaatgctgtgctgctggtggagaccctggaggccggcgtggagggccgctggagcagagatggagaggagctgcctgtgatctgccagagcagcagcggccacatgcacgccctggtgctgcccggggtgacccgggaggatgctggggaggtgaccttcagcctgggcaacagcaggaccaccaccctgctgcgggtgaagtgtgtgaagcacagccccccaggcccccccatcctggccgagatgttcaagggccacaagaacacagtgctgctgacctggaagcccccagagcccgcccctgagacccccttcatctaccgcctggagcggcaggaggtgggcagcgaggactggatccagtgcttcagcattgagaaggccggggctgtggaggtgcctggggactgtgtgcccagcgagggggactaccgcttccgcatctgcaccgtgtctggccacggccgcagcccccacgtggtgttccacggcagcgcccacctggtgcccacagcccggctggtggccggcctggaggatgtgcaggtgtatgatggagaagatgctgtgttcagcctggacctgagcaccatcatccagggcacctggttcctgaatggagaggagctgaagagcaatgaacctgagggccaggtggagcccggggccctgcgctaccgcatcgagcagaagggcctgcagcacaggctcatcctgcatgctgtgaagcaccaggacagcggggccctggtgggcttcagctgccctggggtgcaggacagcgctgccctgaccatccaggagagccctgtgcacatcctgagcccccaggacagagtgtccctgaccttcaccaccagcgagcgggtggtgctgacctgtgagctgagccgggtggacttccctgccacctggtacaaggatggccagaaggtggaggagagcgagctgctggtggtgaagatggatggcaggaagcacaggctcatcctgcctgaggccaaggtgcaggacagcggggagtttgaatgtagaacagagggcgtgtctgccttctttggagtgacagtgcaggacccccctgtgcacatcgtggacccccgggagcacgtgtttgtgcacgccatcaccagtgaatgtgtgatgctggcctgtgaggtggaccgggaggatgcccctgtgcgctggtacaaggatggccaggaggtggaggagagtgactttgtggtgctggagaatgaaggcccccaccggcggctggtgctgcctgccacccagcccagtgatggaggagagttccagtgtgtggccggagatgaatgtgcctacttcaccgtgaccatcacagatgtgtcctcctggatcgtgtaccccagcggcaaggtgtatgtggccgctgtgcggctggagcgggtggtgctgacctgtgagctgtgccggccctgggccgaggtgcgctggaccaaggatggagaggaggtggtggagagccctgccctgctgctgcagaaggaggacacagtgcggcggctggtgctgcctgctgtgcagctggaggacagcggggagtacctgtgtgaaattgatgatgagagcgccagcttcaccgtgacagtgacagagccccctgtgcgcatcatctaccccagagatgaggtgaccctgattgctgtgaccctggagtgtgtggtgctgatgtgtgagctgagccgggaggatgcccctgtgcgctggtacaaggatggcctggaggtggaggagagcgaggccctggtgctggagagagatggcccccgctgccgcctggtgctgcctgctgcccagccagaagatggaggagaatttgtgtgtgatgctggagatgattctgccttcttcaccgtgacagtgacagagccccctgtgcagttcctggccctggagaccacccccagccccctgtgtgtggcccctggagagcctgtggtgctgagctgtgagctgagccgggccggggcccctgtggtgtggagccacaacggccggcctgtgcaggagggggagggcctggagctgcatgctgagggccccaggagagtgctgtgcatccaggccgccggccctgcccacgccggcctgtacacctgccagagcggggccgcccctggggcccccagcctgtccttcaccgtgcaggtggccgagccccctgtgcgggtggtggcccctgaggccgcccagaccagggtgcgcagcaccccaggaggagacctggagctggtggtgcacctgagcggccctgggggccctgtgcgctggtacaaggatggagagcggctggccagccagggccgggtgcagctggagcaggccggggcccggcaggtgctgcgggtgcagggcgcccggtctggagatgctggggagtacctgtgtgatgccccccaggacagccgcatcttcctggtgtctgtggaggagcccctgctggtgaagctggtgtctgagctgacccccctgactgtgcatgaaggagatgatgccaccttccgctgtgaggtgtccccaccagatgctgatgtgacctggctgagaaatggagctgtggtgaccccaggcccccagaggcagagctgctgcagctatggaggctgcaggatgtgtggccagaggaaggccaggatgtgtgtgtccaagtggaggcaggccgagtgggtgcagaggggcccctgtgccggctgtgaggtgggcagcccctgccccaccaccctggcctgcccctggcccaggatgggcaccagcacagccagcagctccatggtgtcctactggcccacccgggcccccacagctgcccgggccaccaccatcgccccctggccaggcagcgcctag

SEQ ID NO: 162662 - DNA, 3078 bp, synthetic construct
  misc_feature 1..3078: note = Description of Artificial Sequence: Synthetic coding sequence
  source 1..3078: mol_type = other DNA
atgaaggccagcagcggggaccagggcagccccccctgcttcctgcgcttccccaggcctgtgcgggtggtgtctggagctgaggccgagctgaagtgtgtggtgctgggggagcccccacctgtggtggtgtgggagaagggcggccagcagctggccgccagcgagcggctgtccttcccagcagatggagctgagcacggcctgctgctgacagctgccctgcccacagatgctggggtgtatgtgtgccgggccagaaatgctgctggggaggcctatgctgctgctgctgtgacagtgctggagcccccagccagtgaccctgagctgcagcctgctgagcggcccctgcccagccctggcagcggggagggcgcccctgtgttcctgaccggccccaggagccagtgggtgctgcggggagctgaggtggtgctgacctgcagagctgggggcctgcctgagcccaccctgtactgggagaaggatggcatggccctggatgaggtgtgggacagcagccactttgccctgcagcccggccgggcagaagatggccctggggccagcctggccctgcgcatcctggccgcccggctgcctgacagcggcgtgtatgtgtgccacgccagaaatgcccacggccacgcccaggccggggccctgctgcaggtgcaccagcccccagagagccccccagctgaccctgatgaggccccagcccctgtggtggagcccctgaagtgtgcccccaagaccttctgggtgaatgaaggcaagcacgccaagttccgctgctacgtgatgggcaagccagagcctgagattgagtggcactgggagggccggcccctgctgcctgacagaagaaggctgatgtacagagacagagatggcggctttgtgctgaaggtgctgtactgccaggccaaggaccggggcctgtatgtgtgtgccgccaggaacagcgctggccagaccctgtctgctgtgcagctgcacgtgaaggagccccggctgcgcttcacccggcccctgcaggatgtggagggccgggagcacggcattgctgtgctggagtgcaaggtgcccaacagccgcatccccacagcctggttccgggaggaccagaggctgctgccctgcaggaaatatgagcagatcgaggagggcaccgtgagaagactcatcatccaccggctgaaggcagatgatgatggcatctacctgtgtgagatgaggggccgggtgaggacagtggccaacgtgacagtgaagggccccatcctgaagaggctgcccaggaagctggatgtgctggagggggagaatgctgtgctgctggtggagaccctggaggccggcgtggagggccgctggagcagagatggagaggagctgcctgtgatctgccagagcagcagcggccacatgcacgccctggtgctgcccggggtgacccgggaggatgctggggaggtgaccttcagcctgggcaacagcaggaccaccaccctgctgcgggtgaagtgtgtgaagcacagccccccaggcccccccatcctggccgagatgttcaagggccacaagaacacagtgctgctgacctggaagcccccagagcccgcccctgagacccccttcatctaccgcctggagcggcaggaggtgggcagcgaggactggatccagtgcttcagcattgagaaggccggggctgtggaggtgcctggggactgtgtgcccagcgagggggactaccgcttccgcatctgcaccgtgtctggccacggccgcagcccccacgtggtgttccacggcagcgcccacctggtgcccacagcccggctggtggccggcctggaggatgtgcaggtgtatgatggagaagatgctgtgttcagcctggacctgagcaccatcatccagggcacctggttcctgaatggagaggagctgaagagcaatgaacctgagggccaggtggagcccggggccctgcgctaccgcatcgagcagaagggcctgcagcacaggctcatcctgcatgctgtgaagcaccaggacagcggggccctggtgggcttcagctgccctggggtgcaggacagcgctgccctgaccatccaggagagccctgtgcacatcctgagcccccaggacagagtgtccctgaccttcaccaccagcgagcgggtggtgctgacctgtgagctgagccgggtggacttccctgccacctggtacaaggatggccagaaggtggaggagagcgagctgctggtggtgaagatggatggcaggaagcacaggctcatcctgcctgaggccaaggtgcaggacagcggggagtttgaatgtagaacagagggcgtgtctgccttctttggagtgacagtgcaggacccccctgtgcacatcgtggacccccgggagcacgtgtttgtgcacgccatcaccagtgaatgtgtgatgctggcctgtgaggtggaccgggaggatgcccctgtgcgctggtacaaggatggccaggaggtggaggagagtgactttgtggtgctggagaatgaaggcccccaccggcggctggtgctgcctgccacccagcccagtgatggaggagagttccagtgtgtggccggagatgaatgtgcctacttcaccgtgaccatcacagatgtgtcctcctggatcgtgtaccccagcggcaaggtgtatgtggccgctgtgcggctggagcgggtggtgctgacctgtgagctgtgccggccctgggccgaggtgcgctggaccaaggatggagaggaggtggtggagagccctgccctgctgctgcagaaggaggacacagtgcggcggctggtgctgcctgctgtgcagctggaggacagcggggagtacctgtgtgaaattgatgatgagagcgccagcttcaccgtgacagtgacagagagctaccagagccaggacagcagcaacaacaaccctgagctgtgtgtgctgctgaagaagcccaagacccggcggctgtggagccgcttccccccctggaggagaacagctggaacagaatag

SEQ ID NO: 162663 - DNA, 5691 bp, synthetic construct
  misc_feature 1..5691: note = Description of Artificial Sequence: Synthetic coding sequence
  source 1..5691: mol_type = other DNA
atgaaggccagcagcggggaccagggcagccccccctgcttcctgcgcttccccaggcctgtgcgggtggtgtctggagctgaggccgagctgaagtgtgtggtgctgggggagcccccacctgtggtggtgtgggagaagggcggccagcagctggccgccagcgagcggctgtccttcccagcagatggagctgagcacggcctgctgctgacagctgccctgcccacagatgctggggtgtatgtgtgccgggccagaaatgctgctggggaggcctatgctgctgctgctgtgacagtgctggagcccccagccagtgaccctgagctgcagcctgctgagcggcccctgcccagccctggcagcggggagggcgcccctgtgttcctgaccggccccaggagccagtgggtgctgcggggagctgaggtggtgctgacctgcagagctgggggcctgcctgagcccaccctgtactgggagaaggatggcatggccctggatgaggtgtgggacagcagccactttgccctgcagcccggccgggcagaagatggccctggggccagcctggccctgcgcatcctggccgcccggctgcctgacagcggcgtgtatgtgtgccacgccagaaatgcccacggccacgcccaggccggggccctgctgcaggtgcaccagcccccagagagccccccagctgaccctgatgaggccccagcccctgtggtggagcccctgaagtgtgcccccaagaccttctgggtgaatgaaggcaagcacgccaagttccgctgctacgtgatgggcaagccagagcctgagattgagtggcactgggagggccggcccctgctgcctgacagaagaaggctgatgtacagagacagagatggcggctttgtgctgaaggtgctgtactgccaggccaaggaccggggcctgtatgtgtgtgccgccaggaacagcgctggccagaccctgtctgctgtgcagctgcacgtgaaggagccccggctgcgcttcacccggcccctgcaggatgtggagggccgggagcacggcattgctgtgctggagtgcaaggtgcccaacagccgcatccccacagcctggttccgggaggaccagaggctgctgccctgcaggaaatatgagcagatcgaggagggcaccgtgagaagactcatcatccaccggctgaaggcagatgatgatggcatctacctgtgtgagatgaggggccgggtgaggacagtggccaacgtgacagtgaagggccccatcctgaagaggctgcccaggaagctggatgtgctggagggggagaatgctgtgctgctggtggagaccctggaggccggcgtggagggccgctggagcagagatggagaggagctgcctgtgatctgccagagcagcagcggccacatgcacgccctggtgctgcccggggtgacccgggaggatgctggggaggtgaccttcagcctgggcaacagcaggaccaccaccctgctgcgggtgaagtgtgtgaagcacagccccccaggcccccccatcctggccgagatgttcaagggccacaagaacacagtgctgctgacctggaagcccccagagcccgcccctgagacccccttcatctaccgcctggagcggcaggaggtgggcagcgaggactggatccagtgcttcagcattgagaaggccggggctgtggaggtgcctggggactgtgtgcccagcgagggggactaccgcttccgcatctgcaccgtgtctggccacggccgcagcccccacgtggtgttccacggcagcgcccacctggtgcccacagcccggctggtggccggcctggaggatgtgcaggtgtatgatggagaagatgctgtgttcagcctggacctgagcaccatcatccagggcacctggttcctgaatggagaggagctgaagagcaatgaacctgagggccaggtggagcccggggccctgcgctaccgcatcgagcagaagggcctgcagcacaggctcatcctgcatgctgtgaagcaccaggacagcggggccctggtgggcttcagctgccctggggtgcaggacagcgctgccctgaccatccaggagagccctgtgcacatcctgagcccccaggacagagtgtccctgaccttcaccaccagcgagcgggtggtgctgacctgtgagctgagccgggtggacttccctgccacctggtacaaggatggccagaaggtggaggagagcgagctgctggtggtgaagatggatggcaggaagcacaggctcatcctgcctgaggccaaggtgcaggacagcggggagtttgaatgtagaacagagggcgtgtctgccttctttggagtgacagtgcaggacccccctgtgcacatcgtggacccccgggagcacgtgtttgtgcacgccatcaccagtgaatgtgtgatgctggcctgtgaggtggaccgggaggatgcccctgtgcgctggtacaaggatggccaggaggtggaggagagtgactttgtggtgctggagaatgaaggcccccaccggcggctggtgctgcctgccacccagcccagtgatggaggagagttccagtgtgtggccggagatgaatgtgcctacttcaccgtgaccatcacagatgtgtcctcctggatcgtgtaccccagcggcaaggtgtatgtggccgctgtgcggctggagcgggtggtgctgacctgtgagctgtgccggccctgggccgaggtgcgctggaccaaggatggagaggaggtggtggagagccctgccctgctgctgcagaaggaggacacagtgcggcggctggtgctgcctgctgtgcagctggaggacagcggggagtacctgtgtgaaattgatgatgagagcgccagcttcaccgtgacagtgacagagccccctgtgcgcatcatctaccccagagatgaggtgaccctgattgctgtgaccctggagtgtgtggtgctgatgtgtgagctgagccgggaggatgcccctgtgcgctggtacaaggatggcctggaggtggaggagagcgaggccctggtgctggagagagatggcccccgctgccgcctggtgctgcctgctgcccagccagaagatggaggagaatttgtgtgtgatgctggagatgattctgccttcttcaccgtgacagtgacagcccctcctgagagaattgtgcaccctgctgcccggagcctggacctgcactttggagcccctggccgggtggagctgcgctgtgaggtggccccagctggcagccaggtgcgctggtacaaggatggcctggaggtggaggccagtgatgccctgcagctgggcgctgagggccccaccaggaccctgaccctgccccacgcccagccagaagatgctggggagtatgtgtgtgagaccaggcatgaggccatcaccttcaacgtcatcctggccgagccccctgtgcagttcctggccctggagaccacccccagccccctgtgtgtggcccctggagagcctgtggtgctgagctgtgagctgagccgggccggggcccctgtggtgtggagccacaacggccggcctgtgcaggagggggagggcctggagctgcatgctgagggccccaggagagtgctgtgcatccaggccgccggccctgcccacgccggcctgtacacctgccagagcggggccgcccctggggcccccagcctgtccttcaccgtgcaggtggccgagccccctgtgcgggtggtggcccctgaggccgcccagaccagggtgcgcagcaccccaggaggagacctggagctggtggtgcacctgagcggccctgggggccctgtgcgctggtacaaggatggagagcggctggccagccagggccgggtgcagctggagcaggccggggcccggcaggtgctgcgggtgcagggcgcccggtctggagatgctggggagtacctgtgtgatgccccccaggacagccgcatcttcctggtgtctgtggaggagcccctgctggtgaagctggtgtctgagctgacccccctgactgtgcatgaaggagatgatgccaccttccgctgtgaggtgtccccaccagatgctgatgtgacctggctgagaaatggagctgtggtgaccccaggcccccaggtggagatggcccagaatggcagcagccgcatcctgaccctgcggggctgccagctgggagatgctggcaccgtgaccctgcgggccggcagcacagccaccagcgcccggctgcacgtgcgggagacagagctgctcttcctgcggcggctgcaggatgtgcgggcagaggagggccaggatgtgtgcctggaggtggagaccggccgggtgggcgccgccggggctgtgcgctgggtgcggggcggccagcccctgccccatgacagccggctgtccatggcccaggacggccacatccacaggctcttcatccacggcgtcatcctggccgaccagggcacctacggctgtgagagccaccacgacaggaccctggcccggctgtctgtgcggccccggcagctgcgggtgctgcggcccctggaggatgtgaccatcagcgagggcggcagcgccaccttccagctggagctgagccaggagggcgtgactggagagtgggcccggggcggcgtgcagctgtacccaggccccaagtgccacatccacagtgatggccaccgccaccggctggtgctgaatggcctgggcctggccgacagcggctgtgtgtccttcaccgctgacagcctgcgctgtgccgcccggctgattgtgcgggaggtgcctgtgaccatcgtgcggggcccccatgacctggaggtgacagaaggagacacagccacctttgaatgtgagctgagccaggccctggctgatgtgacctgggagaaggatggaaatgccctgacccccagcccccggctgcggctgcaggccctgggcacccggcggctgctgcagctgcggcgctgtggccccagtgatgctggcacctacagctgtgctgtgggcacagcccgggccggccctgtgcggctgactgtgcgggagaggacagtggccgtgctgtctgagctgcggtctgtgtctgcccgggagggagatggagccacctttgaatgtactgtgtctgaggtggagaccaccggccgctgggagctgggcggccggcccctgcggcctggggcccgggtgcgcatccggcaggagggcaagaagcacatcctggtgctgtctgagctgcgggcagaagatgctggggaggtgcgcttccaggccggccctgcccagagcctggccctgctggaggtggaggccctgcccctgcagatgtgccgccaccccccccgggagaagacagtgctggtgggccggcgggctgtgctggaggtgacagtgagccgcagcggcggccacgtgtgctggctgcgggagggcgctgagctgtgccctggggacaagtatgagatgaggagccacggccccacccacagcctggtgattcatgatgtgcggcctgaggaccagggcacctactgctgccaggccggccaggacagcacccacacccggctgctggtggagggcaactag

SEQ ID NO: 162664 - DNA, 2682 bp, synthetic construct
  misc_feature 1..2682: note = Description of Artificial Sequence: Synthetic coding sequence
  source 1..2682: mol_type = other DNA
atggagccccccctgcctgtgggcgcccagcccctggccaccgtggagggcatggagatgaagggccccctgcgggagccctgtgccctgaccctggcccagagaaatggccagtatgagctgatcatccagctgcacgagaaggagcagcacgtgcaggacatcatccccatcaacagccacttccgctgtgtgcaggaggccgaggagaccctgctgattgacatcgccagcaacagcggctgcaagatccgggtgcagggcgactggatccgggagaggagatttgagatcccagatgaggagcactgcctgaagttcctgtctgctgtgctggccgcccagaaggcccagagccagctgctggtgcctgagcagaaggacagcagctcctggtaccagaagctggacaccaaggacaagcccagcgtcttcagcggcctgctgggctttgaggacaacttcagctccatgaacctggacaagaagatcaacagccagaaccagcccaccggcatccaccgggagcccccacctccacccttctctgtgaacaagatgctgccccgggagaaggaggccagcaacaaggagcagcccaaggtgaccaacaccatgaggaagctgtttgtgcccaacacccagagcggccagcgggagggcctcatcaagcacatcctggccaagcgggagaaggagtatgtgaacatccagaccttccgcttctttgtgggcacctggaatgtgaatggccagagcccagacagcggcctggagccctggctgaactgtgaccccaaccccccagacatctactgcatcggcttccaggagctggacctgagcacagaggccttcttctactttgaatctgtgaaggagcaggagtggagcatggctgtggagcggggcctgcacagcaaggccaagtacaagaaggtgcagctggtgcggctggtgggcatgatgctgctgatctttgccaggaaggaccagtgccgctacatccgggacatcgccacagaaacagtgggcaccggcatcatgggcaagatgggcaacaagggcggcgtggccgtgcgctttgtgttccacaacaccaccttctgcatcgtgaacagccacctggccgcccacgtggaggactttgaaagaagaaaccaggactacaaggacatctgtgccaggatgagctttgtggtgcccaaccagaccctgccccagctgaacatcatgaagcatgaggtggtgatctggctgggggacctgaactaccgcctgtgcatgccagatgccaatgaggtgaagagcctcatcaacaagaaggacctgcagaggctgctgaagtttgaccagctgaacatccagaggacccagaagaaggcctttgtggacttcaatgaaggagagatcaagttcatccccacctacaagtatgacagcaagacagaccgctgggacagcagtggaaaatgtcgggtgcctgcctggtgtgaccgcatcctgtggaggggcaccaacgtgaaccagctgaactaccgcagccacatggagctgaagaccagtgaccacaagcctgtgtctgccctcttccacatcggcgtgaaggtggtggatgaaagacgctacaggaaggtgtttgaggacagcgtgcgcatcatggacaggatggagaatgacttcctgcccagcctggagctgagcagaagagaatttgtgtttgaaaatgtgaagttccggcagctgcagaaggagaagttccagatcagcaacaacggccaggtgccctgccacttctccttcatccccaagctgaatgacagccagtactgcaagccctggctgcgggcagagccctttgagggctacctggagcccaatgaaacagtggacatcagcctggatgtgtatgtgtccaaggacagcgtgaccatcctgaacagcggggaggacaagattgaggacatcctggtgctgcacctggaccggggcaaggactacttcctgaccatcagcggcaactacctgcccagctgcttcggcaccagcctggaggccctgtgcaggatgaagaggcccatccgggaggtgcctgtgaccaagctgattgacctggagaagagcctgctgcagatggtgcccctggatgagggcgccagcgagcggcccctgcaggtgcccaaggagatctggctgctggtggaccacctgttcaagtatgcctgccaccaggaggacctcttccagaccccaggcatgcaggaggagctgcagcagatcatcgactgcctggacaccagcatccctgagaccatccctggcagcaaccacagcgtggccgaggccctgctgatcttcctggaggccctgcctgagcctgtgatctgctatgagctgtaccagcgctgcctggacagcgcctatgacccccgcatctgccggcaggtgatcagccagctgccccgctgccacagaaatgtgttccgctacctgatggccttcctgcgggagctgctgaagttcagcgagtacaacagcgtgaatgccaacatgattgccaccctcttcaccagcctgctgctgcggcccccacccaacctgatggcccggcagacccccagcgaccggcagagggccatccagttcctgctgggcttcctgctgggcagcgaggaggactag

SEQ ID NO: 162665 - DNA, 2706 bp, synthetic construct
  misc_feature 1..2706: note = Description of Artificial Sequence: Synthetic coding sequence
  source 1..2706: mol_type = other DNA
atggagccccccctgcctgtgggcgcccagcccctggccaccgtggagggcatggagatgaagggccccctgcgggagccctgtgccctgaccctggcccagagaaatggccagtatgagctgatcatccagctgcacgagaaggagcagcacgtgcaggacatcatccccatcaacagccacttccgctgtgtgcaggaggccgaggagaccctgctgattgacatcgccagcaacagcggctgcaagatccgggtgcagggcgactggatccgggagaggagatttgagatcccagatgaggagcactgcctgaagttcctgtctgctgtgctggccgcccagaaggcccagagccagctgctggtgcctgagcagaaggacagcagctcctggtaccagaagctggacaccaaggacaagcccagcgtcttcagcggcctgctgggctttgaggacaacttcagctccatgaacctggacaagaagatcaacagccagaaccagcccaccggcatccaccgggagcccccacctccacccttctctgtgaacaagatgctgccccgggagaaggaggccagcaacaaggagcagcccaaggtgaccaacaccatgaggaagctgtttgtgcccaacacccagagcggccagcgggagggcctcatcaagcacatcctggccaagcgggagaaggagtatgtgaacatccagaccttccgcttctttgtgggcacctggaatgtgaatggccagagcccagacagcggcctggagccctggctgaactgtgaccccaaccccccagacatctactgcatcggcttccaggagctggacctgagcacagaggccttcttctactttgaatctgtgaaggagcaggagtggagcatggctgtggagcggggcctgcacagcaaggccaagtacaagaaggtgcagctggtgcggctggtgggcatgatgctgctgatctttgccaggaaggaccagtgccgctacatccgggacatcgccacagaaacagtgggcaccggcatcatgggcaagatgggcaacaagggcggcgtggccgtgcgctttgtgttccacaacaccaccttctgcatcgtgaacagccacctggccgcccacgtggaggactttgaaagaagaaaccaggactacaaggacatctgtgccaggatgagctttgtggtgcccaaccagaccctgccccagctgaacatcatgaagcatgaggtggtgatctggctgggggacctgaactaccgcctgtgcatgccagatgccaatgaggtgaagagcctcatcaacaagaaggacctgcagaggctgctgaagtttgaccagctgaacatccagaggacccagaagaaggcctttgtggacttcaatgaaggagagatcaagttcatccccacctacaagtatgacagcaagacagaccgctgggacagcagtggaaaatgtcgggtgcctgcctggtgtgaccgcatcctgtggaggggcaccaacgtgaaccagctgaactaccgcagccacatggagctgaagaccagtgaccacaagcctgtgtctgccctcttccacatcggcgtgaaggtggtggatgaaagacgctacaggaaggtgtttgaggacagcgtgcgcatcatggacaggatggagaatgacttcctgcccagcctggagctgagcagaagagaatttgtgtttgaaaatgtgaagttccggcagctgcagaaggagaagttccagatcagcaacaacggccaggtgccctgccacttctccttcatccccaagctgaatgacagccagtactgcaagccctggctgcgggcagagccctttgagggctacctggagcccaatgaaacagtggacatcagcctggatgtgtatgtgtccaaggacagcgtgaccatcctgaacagcggggaggacaagattgaggacatcctggtgctgcacctggaccggggcaaggactacttcctgaccatcagcggcaactacctgcccagctgcttcggcaccagcctggaggccctgtgcaggatgaagaggcccatccgggaggtgcctgtgaccaagctgattgacctggaggaggacagcttcctggagaaggagaagagcctgctgcagatggtgcccctggatgagggcgccagcgagcggcccctgcaggtgcccaaggagatctggctgctggtggaccacctgttcaagtatgcctgccaccaggaggacctcttccagaccccaggcatgcaggaggagctgcagcagatcatcgactgcctggacaccagcatccctgagaccatccctggcagcaaccacagcgtggccgaggccctgctgatcttcctggaggccctgcctgagcctgtgatctgctatgagctgtaccagcgctgcctggacagcgcctatgacccccgcatctgccggcaggtgatcagccagctgccccgctgccacagaaatgtgttccgctacctgatggccttcctgcgggagctgctgaagttcagcgagtacaacagcgtgaatgccaacatgattgccaccctcttcaccagcctgctgctgcggcccccacccaacctgatggcccggcagacccccagcgaccggcagagggccatccagttcctgctgggcttcctgctgggcagcgaggaggactag

SEQ ID NO: 162666 - DNA, 2445 bp, synthetic construct
  misc_feature 1..2445: note = Description of Artificial Sequence: Synthetic coding sequence
  source 1..2445: mol_type = other DNA
atgcacctggagggcagagatggaagacgctacccaggggccccagctgtggagctgctgcagacctctgtgcccagcggcctggccgagctggtggccggcaagaggcggctgcccaggggggccggcggcgctgaccccagccacagctgccccagaggagctgctggccagagctcctgggccccagctggccaggagtttgccagcttcctgaccaagggccgcagccacagcagcctgccccagatgagcagcagccgcagcaaggacagctgcttcacagagaacacccccctgctgaggaacagcctgcaggagaagggcagccgctgcatccctgtgtaccaccctgagttcatcacagctgaggagagctgggaggacagcagcgctgactgggagcggcgctacctgctgagccgggaggtgtctggcctgagcgccagcgccagcagcgagaagggggacctgctggacagcccccacatccggctgcggctgagcaagctgcggcgctgtgtgcagtggctgaaggtgatgggcctgtttgcctttgtggtgctgtgcagcatcctcttcagcctgtacccagaccagggcaagctgtggcagctgctggccctgagccccctggagaactacagcgtgaacctgagcagccacgtggacagcaccctgctgcaggtggacctggccggggccctggtggccagcggccccagccggcccggccgggaggagcacatcgtggtggagctgacccaggctgatgccctgggcagccgctggaggcggccccagcaggtgacccacaactggacagtgtacctgaaccccaggagaagtgagcacagcgtgatgagcaggacctttgaggtgctgacccgggagaccgtgtccatcagcatccgggccagcctgcagcagacccaggccgtgcccctgctgatggcccaccagtacctgcggggctctgtggagacccaggtgaccatcgccacagccatcctggccggcgtgtatgccctgatcatctttgagcggcccagcctgacccacgtggtggagtggattgactttgagaccctggccctgctgtttggcatgatgatcctggtggccatcttcagcgagaccggcttctttgactactgtgctgtgaaggcctaccgcctgagccggggccgggtgtgggccatgatcatcatgctgtgcctgattgctgctgtgctgagcgccttcctggacaacgtgaccaccatgctgctcttcacccctgtgaccatccggctgtgtgaggtgctgaacctggacccccggcaggtgctgattgctgaggtgatcttcaccaacattggaggagctgccacagccatcggggaccccccaaatgtcatcatcgtgagcaaccaggagctgaggaagatgggcctggactttgctggcttcaccgcccacatgttcatcggcatctgcctggtgctgctggtgtgcttccccctgctgcggctgctgtactggaacaggaagctgtacaacaaggagcccagcgagatcgtggagctgaagcatgagatccacgtgtggaggctgacagcccagaggatcagccctgccagccgggaggagacagctgtgcggcggctgctgctgggcaaggtgctggccctggagcacctgctggcccggcggctgcacaccttccaccggcagatcagccaggaggacaagaactgggagaccaacatccaggagctgcagaagaagcaccgcatcagtgatggcatcctgctggccaagtgcctgactgtgctgggcttcgtcatcttcatgttcttcctgaacagctttgtgcccggcatccacctggacctgggctggatcgccatcctgggcgccatctggctgctgatcctggccgacatccatgactttgagatcatcctgcaccgggtggagtgggccaccctgctcttctttgctgccctgtttgtgctgatggaggccctggcccacctgcacctgattgaatatgtgggggagcagacagccctgctgatcaagatggtgcctgaggagcagaggctgattgctgccatcgtgctggtggtgtgggtgtctgccctggccagcagcctgattgacaacatccccttcaccgccaccatgatccctgtgctgctgaacctgagccatgaccctgaggtgggcctgcctgccccacccctgatgtatgccctggccttcggggcctgcctgggcggcaatggcaccctgattggagccagcgccaacgtggtgtgtgccggcattgctgagcagcacggctacggcttctccttcatggagttcttccggctgggcttccccatgatggtggtgtcctgcaccgtgggcatgtgctacctgctggtggcccacgtggtggtgggctggaactag

SEQ ID NO: 162667 - DNA, 2517 bp, synthetic construct
  misc_feature 1..2517: note = Description of Artificial Sequence: Synthetic coding sequence
  source 1..2517: mol_type = other DNA
atgcacctggagggcagagatggaagacgctacccaggggccccagctgtggagctgctgcagacctctgtgcccagcggcctggccgagctggtggccggcaagaggcggctgcccaggggggccggcggcgctgaccccagccacagctgccccagaggagctgctggccagagctcctgggccccagctggccaggagtttgccagcttcctgaccaagggccgcagccacagcagcctgccccagatgagcagcagccgcagcaaggacagctgcttcacagagaacacccccctgctgaggaacagcctgcaggagaagggcagccgctgcatccctgtgtaccaccctgagttcatcacagctgaggagagctgggaggacagcagcgctgactgggagcggcgctacctgctgagccgggaggtgtctggcctgagcgccagcgccagcagcgagaagggggacctgctggacagcccccacatccggctgcggctgagcaagctgcggcgctgtgtgcagtggctgaaggtgatgggcctgtttgcctttgtggtgctgtgcagcatcctcttcagcctgtacccagaccagggcaagctgtggcagctgctggccctgagccccctggagaactacagcgtgaacctgagcagccacgtggacagcaccctgctgcaggtggacctggccggggccctggtggccagcggccccagccggcccggccgggaggagcacatcgtggtggagctgacccaggctgatgccctgggcagccgctggaggcggccccagcaggtgacccacaactggacagtgtacctgaaccccaggagaagtgagcacagcgtgatgagcaggacctttgaggtgctgacccgggagaccgtgtccatcagcatccgggccagcctgcagcagacccaggccgtgcccctgctgatggcccaccagtacctgcggggctctgtggagacccaggtgaccatcgccacagccatcctggccggcgtgtatgccctgatcatctttgaaattgtgcacaggaccctggccgccatgctgggcagcctggccgccctggccgccctggccgtcatcggggaccggcccagcctgacccacgtggtggagtggattgactttgagaccctggccctgctgtttggcatgatgatcctggtggccatcttcagcgagaccggcttctttgactactgtgctgtgaaggcctaccgcctgagccggggccgggtgtgggccatgatcatcatgctgtgcctgattgctgctgtgctgagcgccttcctggacaacgtgaccaccatgctgctcttcacccctgtgaccatccggctgtgtgaggtgctgaacctggacccccggcaggtgctgattgctgaggtgatcttcaccaacattggaggagctgccacagccatcggggaccccccaaatgtcatcatcgtgagcaaccaggagctgaggaagatgggcctggactttgctggcttcaccgcccacatgttcatcggcatctgcctggtgctgctggtgtgcttccccctgctgcggctgctgtactggaacaggaagctgtacaacaaggagcccagcgagatcgtggagctgaagcatgagatccacgtgtggaggctgacagcccagaggatcagccctgccagccgggaggagacagctgtgcggcggctgctgctgggcaaggtgctggccctggagcacctgctggcccggcggctgcacaccttccaccggcagatcagccaggaggacaagaactgggagaccaacatccaggagctgcagaagaagcaccgcatcagtgatggcatcctgctggccaagtgcctgactgtgctgggcttcgtcatcttcatgttcttcctgaacagctttgtgcccggcatccacctggacctgggctggatcgccatcctgggcgccatctggctgctgatcctggccgacatccatgactttgagatcatcctgcaccgggtggagtgggccaccctgctcttctttgctgccctgtttgtgctgatggaggccctggcccacctgcacctgattgaatatgtgggggagcagacagccctgctgatcaagatggtgcctgaggagcagaggctgattgctgccatcgtgctggtggtgtgggtgtctgccctggccagcagcctgattgacaacatccccttcaccgccaccatgatccctgtgctgctgaacctgagccatgaccctgaggtgggcctgcctgccccacccctgatgtatgccctggccttcggggcctgcctgggcggcaatggcaccctgattggagccagcgccaacgtggtgtgtgccggcattgctgagcagcacggctacggcttctccttcatggagttcttccggctgggcttccccatgatggtggtgtcctgcaccgtgggcatgtgctacctgctggtggcccacgtggtggtgggctggaactag

SEQ ID NO: 162668 - DNA, 2007 bp, synthetic construct
  misc_feature 1..2007: note = Description of Artificial Sequence: Synthetic coding sequence
  source 1..2007: mol_type = other DNA
atgcacctggagggcagagatggaagacgctacccaggggccccagctgtggagctgctgcagacctctgtgcccagcggcctggccgagctggtggccggcaagaggcggctgcccaggggggccggcggcgctgaccccagccacagctgccccagaggagctgctggccagagctcctgggccccagctggccaggagtttgccagcttcctgaccaagggccgcagccacagcagcctgccccagatgagcagcagccgcagcaaggacagctgcttcacagagaacacccccctgctgaggaacagcctgcaggagaagggcagccgctgcatccctgtgtaccaccctgagttcatcacagctgaggagagctgggaggacagcagcgctgactgggagcggcgctacctgctgagccgggaggtgtctggcctgagcgccagcgccagcagcgagaagggggacctgctggacagcccccacatccggctgcggctgagcaagctgcggcgctgtgtgcagtggctgaaggtgatgggcctgtttgcctttgtggtgctgtgcagcatcctcttcagcctgtacccagaccagggcaagctgtggcagctgctggccctgagccccctggagaactacagcgtgaacctgagcagccacgtggacagcaccctgctgcaggtggacctggccggggccctggtggccagcggccccagccggcccggccgggaggagcacatcgtggtggagctgacccaggctgatgccctgggcagccgctggaggcggccccagcaggtgacccacaactggacagtgtacctgaaccccaggagaagtgagcacagcgtgatgagcaggacctttgaggtgctgacccgggagaccgtgtccatcagcatccgggccagcctgcagcagacccaggccgtgcccctgctgatggcccaccagtacctgcggggctctgtggagacccaggtgaccatcgccacagccatcctggccggcgtgtatgccctgatcatctttgaaattgtgcacaggaccctggccgccatgctgggcagcctggccgccctggccgccctggccgtcatcggggaccggcccagcctgacccacgtggtggagtggattgactttgagaccctggccctgctgtttggcatgatgatcctggtggccatcttcagcgagaccggcttctttgactactgtgctgtgaaggcctaccgcctgagccggggccgggtgtgggccatgatcatcatgctgtgcctgattgctgctgtgctgagcgccttcctggacaacgtgaccaccatgctgctcttcacccctgtgaccatccggctgtgtgaggtgctgaacctggacccccggcaggtgctgattgctgaggtgatcttcaccaacattggaggagctgccacagccatcggggaccccccaaatgtcatcatcgtgagcaaccaggagctgaggaagatgggcctggactttgctggcttcaccgcccacatgttcatcggcatctgcctggtgctgctggtgtgcttccccctgctgcggctgctgtactggaacaggaagctgtacaacaaggagcccagcgagatcgtggagctgaagcatgagatccacgtgtggaggctgacagcccagaggatcagccctgccagccgggaggagacagctgtgcggcggctgctgctgggcaaggtgctggccctggagcacctgctggcccggcggctgcacaccttccaccggcagatcagccaggaggacaagaactgggagaccaacatccaggagctgcagaagaagcaccgcatcagtgatggcatcctgctggccaagtgcctgactgtgctgggcttcgtcatcttcatgttcttcctgaacagctttgtgcccggcatccacctggacctgggcggcctgggcctggtgcaggccggccgctactacctgagcaccccagagagctag

SEQ ID NO: 162669 - DNA, 795 bp, synthetic construct
  misc_feature 1..795: note = Description of Artificial Sequence: Synthetic coding sequence
  source 1..795: mol_type = other DNA
atgcacctggagggcagagatggaagacgctacccaggggccccagctgtggagctgctgcagacctctgtgcccagcggcctggccgagctggtggccggcaagaggcggctgcccaggggggccggcggcgctgaccccagccacagctgccccagaggagctgctggccagagctcctgggccccagctggccaggagtttgccagcttcctgaccaagggccgcagccacagcagcctgccccagatgagcagcagccgcagcaaggacagctgcttcacagagaacacccccctgctgaggaacagcctgcaggagaagggcagccgctgcatccctgtgtaccaccctgagttcatcacagctgaggagagctgggaggacagcagcgctgactgggagcggcgctacctgctgagccgggaggtgtctggcctgagcgccagcgccagcagcgagaagggggacctgctggacagcccccacatccggctgcggctgagcaagctgcggcgctgtgtgcagtggctgaaggtgatgggcctgtttgcctttgtggtgctgtgcagcatcctcttcagcctgtacccagaccagggcaagctgtggcagctgctggccctgagccccctggagaactacagcgtgaacctgagcagccacgtggacagcaccctgctgcaggtggacctggccggggccctggtggccagcggccccagccggcccggccgggaggagcacatcgtggtggagctgacccaggctgatgccctgggcagccgctggtag

SEQ ID NO: 162670 - DNA, 657 bp, synthetic construct
  misc_feature 1..657: note = Description of Artificial Sequence: Synthetic coding sequence
  source 1..657: mol_type = other DNA
atgcacctggagggcagagatggaagacgctacccaggggccccagctgtggagctgctgcagacctctgtgcccagcggcctggccgagctggtggccggcaagaggcggctgcccaggggggccggcggcgctgaccccagccacagctgccccagaggagctgctggccagagctcctgggccccagctggccaggagtttgccagcttcctgaccaagggccgcagccacagcagcctgccccagatgagcagcagccgcagcaaggacagctgcttcacagagaacacccccctgctgaggaacagcctgcaggagaagggcagccgctgcatccctgtgtaccaccctgagttcatcacagctgaggagagctgggaggacagcagcgctgactgggagcggcgctacctgctgagccgggaggtgtctggcctgagcgccagcgccagcagcgagaagggggacctgctggacagcccccacatccggctgcggctgagcaagctgcggcgctgtgtgcagtggctgaaggtgatgggcctgtttgcctttgtggtgctgtgcagcgtgacccacaactggacagtgtacctgaaccccaggagaagtgagcacagcgtgatgagcaggacctttgaggtgctgacctag

SEQ ID NO: 162671 - DNA, 801 bp, synthetic construct
  misc_feature 1..801: note = Description of Artificial Sequence: Synthetic coding sequence
  source 1..801: mol_type = other DNA
atgggcagcaagaccctgcctgcccctgtgcccatccaccccagcctgcagctgaccaactacagcttcctgcaggccgtgaatggcctgcccaccgtgcccagcgaccacctgcccaacctgtatggcttcagcgccctgcatgctgtgcacctgcaccagtggaccctgggctacccagccatgcacctgcccaggagcagcttcagcaaggtgcccggcaccgtgagcagcctggtggatgcccgcttccagctgcctgccttcccctggttcccccacgtgatccagcccaagccagagatcacagctgggggctctgtgcctgccctgaagaccaagcccaggtttgattttgccaacctggccctggccgccacccaggaggaccctgccaagctgggccgcggggagggccctggcagccctgctgggggcctgggcgccctgctggatgtgaccaagctgagccctgagaagaagcccacccggggccgcctgcccagcaagaccaagaaggagtttgtgtgcaagttctgtggccgccacttcaccaagagctacaacctgctgattcatgagaggacccacacagatgagcggccctacacctgtgacatctgccacaaggccttccggcggcaggaccacctgcgggaccaccgctacatccacagcaaggagaagcccttcaagtgccaggagtgtgggaagggcttctgccagagcaggaccctggccgtgcacaagaccctgcacagccaggtgaaggagctgaagaccagcaagatcaagtgctag

SEQ ID NO: 162672 - DNA, 801 bp, synthetic construct; identical to SEQ ID NO: 162671
  misc_feature 1..801: note = Description of Artificial Sequence: Synthetic coding sequence
  source 1..801: mol_type = other DNA

SEQ ID NO: 162673 - DNA, 939 bp, synthetic construct
  misc_feature 1..939: note = Description of Artificial Sequence: Synthetic coding sequence
  source 1..939: mol_type = other DNA
atgggcagcaaggccctgcctgcccccatccccctgcaccccagcctgcagctgaccaactacagcttcctgcaggccgtgaacaccttccctgccaccgtggaccacctgcagggcctgtatggcctgtctgctgtgcagaccatgcacatgaaccactggaccctgggctaccccaacgtgcatgagatcaccaggagcaccatcacagagatggccgccgcccagggcctggtggatgcccgcttccccttccctgccctgcccttcaccacccacctgttccaccccaagcagggcgccatcgcccacgtgctgcctgccctgcacaaggaccggcccaggtttgattttgccaacctggccgtggccgccacccaggaggacccccccaagatgggagacctgagcaagctgagccctggcctgggcagccccatcagcggcctgagcaagctgaccccagacaggaagcccagccggggccgcctgcccagcaagaccaagaaggagttcatctgcaagttctgtggccgccacttcaccaagagctacaacctgctgatccacgagaggacccacacagatgagcggccctacacctgtgacatctgccacaaggccttccggcggcaggaccacctgcgggaccaccgctacatccacagcaaggagaagcccttcaagtgccaggagtgtgggaagggcttctgccagagcaggaccctggccgtgcacaagaccctgcacatgcaggagagcccccacaagtgccccacctgtggccgcaccttcaaccagaggagcaacctgaagacccacctgctgacccacacagacatcaagccctacagctgtgagcagtgtgggaaggtgttcagaagaaactgtgacctgcggcggcacagcctgacccacaccccccggcaggacttctag

SEQ ID NO: 162674 - DNA, 831 bp, synthetic construct
  misc_feature 1..831: note = Description of Artificial Sequence: Synthetic coding sequence
  source 1..831: mol_type = other DNA
atgggcagcaaggccctgcctgcccccatccccctgcaccccagcctgcagctgaccaactacagcttcctgcaggccgtgaacaccttccctgccaccgtggaccacctgcagggcctgtatggcctgtctgctgtgcagaccatgcacatgaaccactggaccctgggctaccccaacgtgcatgagatcaccaggagcaccatcacagagatggccgccgcccagggcctggtggatgcccgcttccccttccctgccctgcccttcaccacccacctgttccaccccaagcagggcgccatcgcccacgtgctgcctgccctgcacaaggaccggcccaggtttgattttgccaacctggccgtggccgccacccaggaggacccccccaagatgggagacctgagcaagctgagccctggcctgggcagccccatcagcggcctgagcaagctgaccccagacaggaagcccagccggggccgcctgcccagcaagaccaagaaggagttcatctgcaagttctgtggccgccacttcaccaagagctacaacctgctgatccacgagaggacccacacagatgagcggccctacacctgtgacatctgccacaaggccttccggcggcaggaccacctgcgggaccaccgctacatccacagcaaggagaagcccttcaagtgccaggagtgtgggaagggcttctgccagagcaggaccctggccgtgcacaagaccctgcacatgcagaccagcagccccacagctgccagcagcgctgccaagtgcagcggggagaccgtcatctgtggcggcacagcctag

SEQ ID NO: 162675 - DNA, 1302 bp, synthetic construct
  misc_feature 1..1302: note = Description of Artificial Sequence: Synthetic coding sequence
  source 1..1302: mol_type = other DNA
atgggcctgcgggcagaggagggcaagaggaagccacccaggtctgtgcggggggaggtgagccccagccagggccccctggcccaggaggatgaggcccggcggctgcggagctgcaccccagcctgccaccctgggaagaggggcaagggcggccaccgggcccggcggcagaggtctgcctgggacctgaccacccaccccctgacccacaggagccaggagctgcggggagctgctgccacagagggcttcctgtatgtgctgctgagccactgggtgtttgtgggcgccccccggcccccagccagtgacagctggaagaagggcctggtgcccagcgcccccccagccagcaggaagatgggcagcaaggccctgcctgcccccatccccctgcaccccagcctgcagctgaccaactacagcttcctgcaggccgtgaacaccttccctgccaccgtggaccacctgcagggcctgtatggcctgtctgctgtgcagaccatgcacatgaaccactggaccctgggctacccaaatgtgcatgagatcaccaggagcaccatcacagagatggctgctgcccagggcctggtggatgcccgcttccccttccctgccctgcccttcaccacccacctgttccaccccaagcagggcgccatcgcccacgtgctgcctgccctgcacaaggaccggcccaggtttgattttgccaacctggccgtggccgccacccaggaggacccccccaagatgggagacctgagcaagctgagccctggcctgggcagccccatcagcggcctgagcaagctgaccccagacaggaagcccagccggggccgcctgcccagcaagaccaagaaggagttcatctgcaagttctgtggccgccacttcaccaagagctacaacctgctgattcatgagaggacccacacagatgagcggccctacacctgtgacatctgccacaaggccttccggcggcaggaccacctgcgggaccaccgctacatccacagcaaggagaagcccttcaagtgccaggagtgtgggaagggcttctgccagagcaggaccctggccgtgcacaagaccctgcacatgcaggagagcccccacaagtgccccacctgtggccgcaccttcaaccagaggagcaacctgaagacccacctgctgacccacacagacatcaagccctacagctgtgagcagtgtgggaaggtgttcagaagaaactgtgacctgcggcggcacagcctgacccacaccccccggcaggacttctag

SEQ ID NO: 162676 - DNA, 642 bp, synthetic construct
  misc_feature 1..642: note = Description of Artificial Sequence: Synthetic coding sequence
  source 1..642: mol_type = other DNA
atgggcagcaaggccctgcctgcccccatccccctgcaccccagcctgcagctgaccaactacagcttcctgcaggccgtgaacaccttccctgccaccgtggaccacctgcagggcctgtatggcctgtctgctgtgcagaccatgcacatgaaccactggaccctgggctaccccaacgtgcatgagatcaccaggagcaccatcacagagatggccgccgcccagggcctggtggatgcccgcttccccttccctgccctgcccttcaccacccacctgttccaccccaagcagggcgccatcgcccacgtgctgcctgccctgcacaaggaccggcccaggtttgattttgccaacctggccgtggccgccacccaggaggacccccccaagatgggagacctgagcaagctgagccctggcctgggcagccccatcagcggcctgagcaagctgaccccagacaggaagcccagccggggccgcctgcccagcaagaccaagaaggagttcatctgcaagttctgtggccgccacttcaccaagagctacaacctgctgatccacgagaggacccacacagatgagcggccctacacctgtgacatctgccacaaggccttccggcggcaggactag

SEQ ID NO: 162677 - DNA, 939 bp, synthetic construct; identical to SEQ ID NO: 162673
  misc_feature 1..939: note = Description of Artificial Sequence: Synthetic coding sequence
  source 1..939: mol_type = other DNA

SEQ ID NO: 162678 - DNA, 687 bp, synthetic construct
  misc_feature 1..687: note = Description of Artificial Sequence: Synthetic coding sequence
  source 1..687: mol_type = other DNA
atgaagaccctcttcctgggcgtgaccctgggcctggccgccgccctgtccttcaccctggaggaggaggacatcaccggcacctggtacgtgaaggccatggtggtggacaaggacttccctgaggaccggcggcccaggaaggtgtcccctgtgaaggtgacagccctgggcggcggcaacctggaggccaccttcaccttcatgagagaagatcgctgcatccagaagaagatcctgatgaggaagacagaggagcccgggaagttcagcgcctatggaggcaggaagctgatctacctgcaggagctgcctggaacagatgattatgtgttctactgcaaggaccagaggcggggcggcctgcgctacatgggcaagctggtggccagcgccccctgcagagctgtgcccctgagccccccctggctgacctggccaccccacctgcaggtgggcatcctgatccccacctggaggccctggaagaacctgaggaactggtgcagcacccgggacagcagaagaaggaccttcagctgcccctgccggcgggaggccgccttcagcaacacccggcagcccccaggcctgcacctgcagagccccccctaccaccagacccagagcccagaccacctggacctgcccagcagccatgaccccagcctgctgccccccacctag

SEQ ID NO: 162679 - DNA, 444 bp, synthetic construct
  misc_feature 1..444: note = Description of Artificial Sequence: Synthetic coding sequence
  source 1..444: mol_type = other DNA
atgaagaccctcttcctgggcgtgaccctgggcctggccgccgccctgtccttcaccctggaggaggaggatgagggcggctctgtgcacccagaagaaaatccagatgctgaagatggaggagcctggcagatccagaggctgtggggccaggaggcccacatcccagctggagctgccagagatggccgcctgcggctgctgctgcagaggcctgccccctggggccctgccctgcacggcaaggcctgtggcatctgcagcctgcagggccgggctgctgtgcccaccctggcccacctggccaccagccctgctggcaggaaccccaacaccaacctggaggccctggaggagttcaagaagctggtgcagcacaagggcctgtctgaggaggacatcttcatgcccctgcagacaggcagctgtgtgctggagcactag

SEQ ID NO: 162680 - DNA, 513 bp, synthetic construct
  misc_feature 1..513: note = Description of Artificial Sequence: Synthetic coding sequence
  source 1..513: mol_type = other DNA
atgaagaccctcttcctgggcgtgaccctgggcctggccgccgccctgtccttcaccctggaggaggaggacatcaccggcacctggtacgtgaaggccatggtggtggacaaggacttccctgaggaccggcggcccaggaaggtgtcccctgtgaaggtgacagccctgggcggcggcaacctggaggccaccttcaccttcatgagagaagatcgctgcatccagaagaagatcctgatgaggaagacagaggagcccgggaagttcagcgcctatggaggcaggaagctgatctacctgcaggagctgcctggaacagatgattatgtgttctactgcaaggaccagaggcggggcggcctgcgctacatgggcaagctggtgggcaggaaccccaacaccaacctggaggccctggaggagttcaagaagctggtgcagcacaagggcctgtctgaggaggacatcttcatgcccctgcagacaggcagctgtgtgctggagcactag

SEQ ID NO: 162681 - DNA, 513 bp, synthetic construct; identical to SEQ ID NO: 162680
  misc_feature 1..513: note = Description of Artificial Sequence: Synthetic coding sequence
  source 1..513: mol_type = other DNA

SEQ ID NO: 162682 - DNA, 258 bp, synthetic construct
  misc_feature 1..258: note = Description of Artificial Sequence: Synthetic coding sequence
  source 1..258: mol_type = other DNA
atgaagaccctcttcctgggcgtgaccctgggcctggccgccgccctgtccttcaccctggaggaggaggatgatggcccctgggtgcacccagaagaaaatccagatgctgaagatggaggagcctggcagatccagaggctgtggggccaggaggcccacgtgcctgctggagctgcccaggagggccccctgcacctgctgctgcagaggcctgccccctggggccctgccccccacggcaaggcctgtggctag

SEQ ID NO: 162683 - DNA, 513 bp, synthetic construct
  misc_feature 1..513: note = Description of Artificial Sequence: Synthetic coding sequence
  source 1..513: mol_type = other DNA
atgaagaccctcttcctgggcgtgaccctgggcctggccgccgccctgtccttcaccctggaggaggaggacatcaccggcacctggtacgtgaaggccatggtggtggacaaggacttccctgaggaccggcggcccaggaaggtgtcccctgtgaaggtgacagccctgggcggcggcaagctggaggccaccttcaccttcatgagagaagatcgctgcatccagaagaagatcctgatgaggaagacagaggagcccgggaagtacagcgcctatggaggcaggaagctgatgtacctgcaggagctgccccggcgggaccactacatcttctactgcaaggaccagcaccacggcggcctgctgcacatgggcaagctggtgggcaggaacagcgacaccaaccgggaggccctggaggagttcaagaagctggtgcagaggaagggcctgtctgaggaggacatcttcacccccctgcagacaggcagctgtgtgcctgagcactag

SEQ ID NO: 162684 - DNA, 8310 bp, synthetic construct
  misc_feature 1..8310: note = Description of Artificial Sequence: Synthetic coding sequence
  source 1..8310: mol_type = other DNA
atggatgtgaaggagaggaagccctaccgcagcctgaccaggagaagagatgctgagcggcgctacaccagcagcagcgctgacagcgaggagggcaaggccccccagaagagctacagcagcagcgagaccctgaaggcctatgaccaggatgcccggctggcctacggcagccgggtgaaggacatcgtgccccaggaggccgaggagttctgcaggactggagccaacttcaccctgcgggagctgggcctggaggaggtgaccccaccccacggcaccctgtacagaacagacatcggcctgccccactgcggctacagcatgggcgccggcagtgatgctgacatggaggccgacacagtgctgagccctgagcaccctgtgcggctgtggggccgcagcaccaggagcggccgcagcagctgcctgagcagccgggccaacagcaacctgaccctgacagacacagaacatgagaacacagaaacagaccaccctgggggcctgcagaaccacgcccggctgcggaccccacctccacccctgagccacgcccacacccccaaccagcaccacgccgccagcatcaacagcctgaacagaggcaacttcacccccaggagcaaccccagccctgcccccacagaccacagcctgtctggagagcccccagctgggggcgcccaggagcccgcccacgcccaggagaactggctgctgaacagcaacatccccctggagaccaggaacctgggcaagcagcccttcctgggcaccctgcaggacaacctgattgagatggacatcctgggcgccagcagacatgatggagcctacagtgatggccacttcctgttcaagccaggcggcaccagccccctcttctgcaccaccagccctggctaccccctgaccagcagcacagtgtacagccccccaccccggcccctgcccaggagcacctttgcccggcctgccttcaacctgaagaagcccagcaagtactgcaactggaagtgtgccgccctgagcgccatcgtcatcagcgccaccctggtgatcctgctggcctactttgtggccatgcacctgtttggcctgaactggcacctgcagcccatggagggccagatgtatgagatcacagaggacacagccagctcctggcctgtgcccacagatgtgtccctgtaccccagcggcggcaccggcctggagaccccagacaggaagggcaagggcaccacagagggcaagcccagcagcttcttcccagaagattccttcattgattctggagaaattgatgtgggccggcgggccagccagaagatccccccaggcaccttctggaggagccaggtgttcatcgaccaccctgtgcacctgaagttcaacgtgtccctgggcaaggccgccctggtgggcatctacggcaggaagggcctgccccccagccacacccagtttgattttgtggagctgctggatggccggcggctgctgacccaggaggcccggagcctggagggcaccccccggcagagccggggcaccgtgccccccagcagccatgagaccggcttcatccagtacctggacagcggcatctggcacctggccttctacaatgatggcaaggagagcgaggtggtgtccttcctgaccacagccatcgagagcgtggacaactgccccagcaactgctatggaaatggagactgcatcagcggcacctgccactgcttcctgggcttcctgggccctgactgtggccgggccagctgccctgtgctgtgcagcggaaatggccagtacatgaagggccgctgcctgtgccacagcggctggaagggagcagaatgtgatgtgcccaccaaccagtgcattgatgtggcctgcagcaaccacggcacctgcatcaccggcacctgcatctgcaaccctggctacaagggggagagctgtgaggaggtggactgcatggaccccacctgcagcggccggggcgtgtgtgtgagaggagagtgccactgcagcgtgggctggggcggcaccaactgtgagaccccccgggccacctgcctggaccagtgcagcggccacggcaccttcctgcctgacaccggcctgtgcagctgtgaccccagctggacaggccatgactgcagcattgagatctgtgccgctgactgtggcggccacggcgtgtgtgtgggcggcacctgccgctgtgaagatggctggatgggcgccgcctgtgaccagagggcctgccacccccgctgtgccgagcacggcacctgcagagatggaaaatgtgagtgcagccctggctggaatggagagcactgcaccatcgcccactacctggacagagtggtgaaggagggctgccccggcctgtgcaatggaaatggccgctgcaccctggacctgaatggctggcactgtgtgtgccagctgggctggaggggggccggctgtgacacctccatggagacagcctgtggggacagcaaggacaatgatggagatggcctggtggactgcatggaccctgactgctgcctgcagcccctgtgccacatcaaccccctgtgcctgggcagccccaaccccctggacatcatccaggagacccaggtgcctgtgtcccagcagaacctgcacagcttctatgaccgcatcaagttcctggtgggccgggacagcacccacatcatccctggagagaacccctttgatggcggccacgcctgcgtcatccggggccaggtgatgaccagtgatggcacccccctggtgggcgtgaacatcagctttgtgaacaaccccctgtttggctacaccatcagccggcaggacggcagctttgacctggtgaccaatggaggcatcagcatcatcctgcgctttgagcgggcccccttcatcacccaggagcacaccctgtggctgccctgggaccgcttctttgtgatggagaccatcatcatgagacatgaagaaaatgagatccccagctgtgacctgagcaactttgcccggcccaaccctgtggtgagccccagccccctgaccagctttgccagcagctgtgccgagaagggccccatcgtgcctgagatccaggccctgcaggaggagatcagcatcagcggctgcaagatgaggctgagctacctgagcagcaggaccccaggctacaagtctgtgctgcgcatcagcctgacccaccccaccatccccttcaacctgatgaaggtgcacctgatggtggccgtggagggccgcctcttcaggaagtggtttgctgctgccccagacctgagctactacttcatctgggacaagacagatgtgtacaaccagaaggtgtttggcctgtctgaggcctttgtgtctgtgggctatgaatatgagagctgcccagacctgatcctgtgggagaagaggaccaccgtgctgcagggctatgaaattgatgccagcaagctgggcggctggagcctggacaagcaccacgccctgaacatccagagcggcatcctgcacaagggaaatggagagaaccagtttgtgtcccagcagccccctgtgattggcagcatcatgggaaatggaagaagaagaagcatcagctgccccagctgcaatggcctggctgatggcaacaagctgctggcccctgtggccctgacctgtggcagtgatggcagcctgtatgtgggggacttcaactacatccgccgcatcttccccagcggaaatgtgaccaacatcctggagctgaggaacaaggacttccgccacagccacagccctgcccacaagtactacctggccacagaccccatgtctggagctgtgttcctgagtgacagcaacagccggcgggtcttcaagatcaagagcacagtggtggtgaaggacctggtgaagaacagcgaggtggtggccggcaccggggaccagtgcctgccctttgatgacacccgctgtggagatggcggcaaggccacagaggccaccctgaccaacccccggggcatcaccgtggacaagtttggcctcatctactttgtggatggcaccatgatcagaagaattgaccagaatggcatcatcagcaccctgctgggcagcaatgacctgaccagcgcccggcccctgagctgtgacagcgtgatggacatcagccaggtgcacctggagtggcccacagacctggccatcaaccccatggacaacagcctgtatgtgctggacaacaacgtggtgctgcagatcagcgagaaccaccaggtgcgcatcgtggccggccggcccatgcactgccaggtgcccggcatcgaccacttcctgctgagcaaggtggccatccacgccaccctggagagcgccacagccctggccgtgagccacaacggggtgctgtacatcgccgagacagatgagaagaagatcaaccgcatccggcaggtgaccaccagcggggagatcagcctggtggccggggcccccagcggctgtgactgcaagaatgatgccaactgtgactgcttctctggagatgatggctacgccaaggatgccaagctgaacacccccagcagcctggccgtgtgtgctgatggagagctgtatgtggccgacctgggcaacatccgcatccgcttcatcaggaagaacaagcccttcctgaacacccagaacatgtatgagctgagcagccccatcgaccaggagctgtacctgtttgacaccaccgggaagcacctgtacacccagagcctgcccactggagactacctgtacaacttcacctacacaggagatggagacatcaccctcatcacagacaacaatggaaacatggtgaatgtgcggcgggacagcacaggcatgcccctgtggctggtggtgcctgatggccaggtgtactgggtgaccatgggcaccaacagcgccctgaagtctgtgaccacccagggccacgagctggccatgatgacctaccacggcaacagcggcctgctggccaccaagagcaatgaaaatggctggaccaccttctatgaatatgacagctttggccgcctgaccaacgtgaccttccccaccggccaggtgtcctccttcagaagtgacacagacagctctgtgcacgtgcaggtggagaccagcagcaaggatgatgtgaccatcaccaccaacctgagcgccagcggggccttctacaccctgctgcaggaccaggtgagaaattcctactacatcggggctgatggcagcctgcggctgctgctggccaacggcatggaggtggccctgcagacagagccccacctgctggccggcaccgtgaaccccaccgtgggcaagagaaatgtgaccctgcccatcgacaatggcctgaacctggtggagtggaggcagaggaaggagcaggcccggggccaggtgacagtgtttggaagaaggctgcgggtgcacaacagaaacctgctgagcctggactttgacagagtgaccaggacagagaagatctatgatgaccacaggaagttcaccctgcgcatcctgtatgaccaggccggccggcccagcctgtggagccccagcagccggctgaatggagtgaatgtgacctacagccctgggggctacatcgccggcatccagaggggcatcatgtctgagaggatggagtatgaccaggccggccgcatcaccagccgcatctttgctgatggcaagacctggagctacacctacctggagaagtccatggtgctgctgctgcacagccagaggcagtacatctttgaatttgacaagaatgaccggctgagctctgtgaccatgcccaacgtggcccggcagaccctggagaccatccgctctgtgggctactacagaaacatctaccagcccccagagggcaatgccagcgtcatccaggacttcacagaagatggccacctgctgcacaccttctacctgggcaccggccggcgggtcatctacaagtatggcaagctgagcaagctggccgagaccctgtatgacaccaccaaggtgtccttcacctatgatgaaacagctggcatgctgaagaccatcaacctgcagaatgaaggcttcacctgcaccatccgctaccggcagatcggccccctgattgaccggcagatcttccgcttcacagaggagggcatggtgaatgccaggtttgactacaactatgacaacagcttccgggtgacctccatgcaggccgtcatcaatgagacccccctgcccatcgacctgtaccgctatgatgatgtgtctgggaagacagagcagtttgggaagtttggagtcatctactatgacatcaaccagatcatcaccacagctgtgatgacccacaccaagcactttgatgcctacggccgcatgaaggaggtgcagtatgagatcttccgcagcctgatgtactggatgacagtgcagtatgacaacatgggccgggtggtgaagaaggagctgaaggtgggcccctatgccaacaccacccgctacagctatgaatatgatgctgatggccagctgcagacagtgtccatcaatgacaagcccctgtggagatacagctatgacctgaatggaaacctgcacctgctgagccctggcaacagcgcccggctgacccccctgcgctatgacatccgggaccgcatcacccggctgggagatgtgcagtacaagatggatgaagatggcttcctgcggcagagaggaggagacatctttgagtacaacagcgctggcctgctgatcaaggcctacaacagagctggctcctggagcgtgcgctaccgctatgatggcctgggccggcgggtgagcagcaagagcagccacagccaccacctgcagttcttctatgctgacctgaccaaccccaccaaggtgacccacctgtacaaccacagcagcagcgagatcaccagcctgtactatgacctgcagggccacctgtttgccatggagctgagcagtggagatgagttctacatcgcctgtgacaacatcggcacccccctggccgtgttttctggaacaggcctgatgatcaagcagatcctgtacacagcctatggagagatctacatggacaccaaccccaacttccagatcatcatcggctaccatggaggcctgtatgaccccctgaccaagctggtgcacatgggccggcgggactatgatgtgctggccggccgctggaccagcccagaccacgagctgtggaagcacctgagcagcagcaatgtgatgcccttcaacctgtacatgttcaagaacaacaaccccatcagcaacagccaggacatcaagtgcttcatgacagatgtgaacagctggctgctgaccttcggcttccagctgcacaacgtcatccctggctaccccaagccagacatggatgccatggagcccagctatgagctgatccacacccagatgaagacccaggagtgggacaacagcaagagcatcctgggcgtgcagtgtgaggtgcagaagcagctgaaggcctttgtgaccctggagagatttgaccagctgtatggcagcaccatcaccagctgccagcaggcccccaagaccaagaagtttgccagcagcggctctgtgtttgggaagggcgtgaagtttgccctgaaggatggccgggtgaccacagacatcatctctgtggccaatgaagatggccggcgggtggccgccatcctgaaccacgcccactacctggagaacctgcacttcaccattgatggagtggacacccactactttgtgaagccaggccccagcgagggggacctggccatcctgggcctgagcggcggccgccgcaccctggagaatggagtgaatgtgacagtgtcccagatcaacacagtgctgaatggaagaacaagacgctacacagacatccagctgcagtacggggccctgtgcctgaacaccaggtatggcaccaccctggatgaggagaaggcccgggtgctggagctggcccggcagagagctgtgcggcaggcctgggcccgggagcagcagaggctgcgggagggggaggagggcctgcgggcctggacagaaggagagaagcagcaggtgctgagcacaggccgggtgcagggctatgatggcttctttgtgatctctgtggagcagtacccagagctgagtgacagcgccaacaacatccacttcatgaggcagagcgagatgggcagaagatag

SEQ ID NO: 162685 - skipped

SEQ ID NO: 162686 - DNA, 1404 bp, synthetic construct
  misc_feature 1..1404: note = Description of Artificial Sequence: Synthetic coding sequence
  source 1..1404: mol_type = other DNA
atgcctggccgctggcgctggcagagggacatgcacccagccaggaagctgctgagcctgctcttcctgatcctgatgggcacagagctgacccaggtgctgcccaccaaccctgaggagagctggcaggtgtacagcagcgcccaggacagcgagggccgctgcatctgcaccgtggtggccccccagcagaccatgtgcagcagagatgcccggaccaagcagctgcggcagctgctggagaaggtgcagaacatgagccagagcattgaggtgctggacaggaggacccagagggacctgcagtatgtggagaagatggagaaccagatgaagggcctggagagcaagttcaagcaggtggaggagagccacaagcagcacctggcccggcagttcaaggccatcaaggccaagatggatgagctgcggcccctcatccctgtgctggaggagtacaaggcagatgccaagctggtgctgcagttcaaggaggaggtgcagaacctgacctctgtgctgaatgagctgcaggaggagattggagcctatgactatgatgagctgcagagccgggtgagcaacctggaggagcggctgcgggcctgcatgcagaagctggcctgtgggaagctgaccggcatcagtgaccctgtgacagtgaagaccagcggcagccgcttcggctcctggatgacagaccccctggcccctgagggggacaacagagtgtggtacatggatggctaccacaacaacagatttgtgcgggagtacaagtccatggtggacttcatgaacacagacaacttcaccagccaccggctgccccacccctggagcggcaccggccaggtggtgtacaacggcagcatctacttcaacaagttccagagccacatcatcatccgctttgacctgaagacagagaccatcctgaagaccaggagcctggactatgccggctacaacaacatgtaccactacgcctggggcggccacagcgacatcgacctgatggtggatgagagcggcctgtgggccgtgtatgccaccaaccagaatgccggcaacatcgtggtgtcccggctggaccctgtgtccctgcagaccctgcagacctggaacaccagctaccccaagaggtctgctggggaggccttcatcatctgtggcaccctgtatgtgaccaacggctacagcggcggcaccaaggtgcactacgcctaccagaccaatgccagcacctatgagtacatcgacatccccttccagaacaagtacagccacatctccatgctggactacaaccccaaggaccgggccctgtatgcctggaacaacggccaccagatcctgtacaacgtgaccctcttccacgtgatccgcagtgatgagctgtag

SEQ ID NO: 162687 - DNA, 408 bp, synthetic construct
  misc_feature 1..408: note = Description of Artificial Sequence: Synthetic coding sequence
  source 1..408: mol_type = other DNA
atgcctggccgctggcgctggcagagggacatgcacccagccaggaagctgctgagcctgctcttcctgatcctgatgggcacagagctgacccaggtgctgcccaccaaccctgaggagagctggcaggtgtacagcagcgcccaggacagcgagggccgctgcatctgcaccgtggtggccccccagcagaccatgtgcagcagagatgcccggaccaagcagctgcggcagctgctggagaaggtgcagaacatgagccagagcattgaggtgctggacaggaggacccagagggacctgcagtatgtggagaagatggagaaccagatgaagggcctggagagcaagttcaagcaggtggaggagagccacaagcagcacctggcccggcagttcaagggctag

SEQ ID NO: 162688 - DNA, 1458 bp, synthetic construct
  misc_feature 1..1458: note = Description of Artificial Sequence: Synthetic coding sequence
  source 1..1458: mol_type = other DNA
atgtctgtgcccctgctgaagattggagtggtgctgagcaccatggccatgatcaccaactggatgagccagaccctgcccagcctggtgggcctgaacaccaccaagctgtctgctgctgggggcggcaccctggacaggagcactggagtgctgcccaccaaccctgaggagagctggcaggtgtacagcagcgcccaggacagcgagggccgctgcatctgcaccgtggtggccccccagcagaccatgtgcagcagagatgcccggaccaagcagctgcggcagctgctggagaaggtgcagaacatgagccagagcattgaggtgctggacaggaggacccagagggacctgcagtatgtggagaagatggagaaccagatgaagggcctggagagcaagttcaagcaggtggaggagagccacaagcagcacctggcccggcagttcaaggccatcaaggccaagatggatgagctgcggcccctcatccctgtgctggaggagtacaaggcagatgccaagctggtgctgcagttcaaggaggaggtgcagaacctgacctctgtgctgaatgagctgcaggaggagattggagcctatgactatgatgagctgcagagccgggtgagcaacctggaggagcggctgcgggcctgcatgcagaagctggcctgtgggaagctgaccggcatcagtgaccctgtgacagtgaagaccagcggcagccgcttcggctcctggatgacagaccccctggcccctgagggggacaacagagtgtggtacatggatggctaccacaacaacagatttgtgcgggagtacaagtccatggtggacttcatgaacacagacaacttcaccagccaccggctgccccacccctggagcggcaccggccaggtggtgtacaacggcagcatctacttcaacaagttccagagccacatcatcatccgctttgacctgaagacagagaccatcctgaagaccaggagcctggactatgccggctacaacaacatgtaccactacgcctggggcggccacagcgacatcgacctgatggtggatgagagcggcctgtgggccgtgtatgccaccaaccagaatgccggcaacatcgtggtgtcccggctggaccctgtgtccctgcagaccctgcagacctggaacaccagctaccccaagaggtctgctggggaggccttcatcatctgtggcaccctgtatgtgaccaacggctacagcggcggcaccaaggtgcactacgcctaccagaccaatgccagcacctatgagtacatcgacatccccttccagaacaagtacagccacatctccatgctggactacaaccccaaggaccgggccctgtatgcctggaacaacggccaccagatcctgtacaacgtgaccctcttccacgtgatccgcagtgatgagctgtag

SEQ ID NO: 162689 - DNA, 1377 bp, synthetic construct
  misc_feature 1..1377: note = Description of Artificial Sequence: Synthetic coding sequence
  source 1..1377: mol_type = other DNA
atgggagaggcccctggccgggagggccggggcccctgcccccagctggagagccccaggagaagaagagtgctgcccaccaaccctgaggagagctggcaggtgtacagcagcgcccaggacagcgagggccgctgcatctgcaccgtggtggccccccagcagaccatgtgcagcagagatgcccggaccaagcagctgcggcagctgctggagaaggtgcagaacatgagccagagcattgaggtgctggacaggaggacccagagggacctgcagtatgtggagaagatggagaaccagatgaagggcctggagagcaagttcaagcaggtggaggagagccacaagcagcacctggcccggcagttcaaggccatcaaggccaagatggatgagctgcggcccctcatccctgtgctggaggagtacaaggcagatgccaagctggtgctgcagttcaaggaggaggtgcagaacctgacctctgtgctgaatgagctgcaggaggagatcggggcctatgactatgatgagctgcagagccgggtgagcaacctggaggagcggctgcgggcctgcatgcagaagctggcctgtgggaagctgaccggcatcagtgaccctgtgacagtgaagaccagcggcagcagatttggctcctggatgacagaccccctggcccctgagggggacaacagagtgtggtacatggatggctaccacaacaacagatttgtgcgggagtacaagtccatggtggacttcatgaacacagacaacttcaccagccaccggctgccccacccctggagcggcaccggccaggtggtgtacaacggcagcatctacttcaacaagttccagagccacatcatcatccgctttgacctgaagacagagaccatcctgaagaccaggagcctggactatgccggctacaacaacatgtaccactacgcctggggcggccacagcgacatcgacctgatggtggatgaaagtggcctgtgggccgtgtatgccaccaaccagaatgccggcaacatcgtggtgtcccggctggaccctgtgtccctgcagaccctgcagacctggaacaccagctaccccaagaggtctgctggggaggccttcatcatctgtggcaccctgtatgtgaccaacggctacagcggcggcaccaaggtgcactacgcctaccagaccaatgccagcacctatgagtacatcgacatccccttccagaacaagtacagccacatctccatgctggactacaaccccaaggaccgggccctgtatgcctggaacaacggccaccagatcctgtacaacgtgaccctcttccacgtgatccgcagtgatgagctgtag

SEQ ID NO: 162690 - DNA, 462 bp, synthetic construct
  misc_feature 1..462: note = Description of Artificial Sequence: Synthetic coding sequence
  source 1..462: mol_type = other DNA
atgtctgtgcccctgctgaagattggagtggtgctgagcaccatggccatgatcaccaactggatgagccagaccctgcccagcctggtgggcctgaacaccaccaagctgtctgctgctgggggcggcaccctggacaggagcactggagtgctgcccaccaaccctgaggagagctggcaggtgtacagcagcgcccaggacagcgagggccgctgcatctgcaccgtggtggccccccagcagaccatgtgcagcagagatgcccggaccaagcagctgcggcagctgctggagaaggtgcagaacatgagccagagcattgaggtgctggacaggaggacccagagggacctgcagtatgtggagaagatggagaaccagatgaagggcctggagagcaagttcaagcaggtggaggagagccacaagcagcacctggcccggcagttcaagggctag

SEQ ID NO: 162691 - DNA, 729 bp, synthetic construct
  misc_feature 1..729: note = Description of Artificial Sequence: Synthetic coding sequence
  source 1..729: mol_type = other DNA
atgaacctgcacgtgaagaccctgagcctgatgacctggaggagccgcttcctggaggagagcttctggagcctggaggagacagctgccctggccaagcagctgcccctgaagagccccagcgagaacatcttcctgcacatcgtggacctgagtgaccccaagcagatctggaagtttgtggagaacttcaagcaggagcacaagctgcacgtgctgatcaacaatgccggctgcatggtgaacaagcgggagctgacagaagatggcctggagaagaactttgctgccaacaccctgggcgtgtacatcctgaccaccggcctcatccctgtgctggagaaggagcatgaccccagggtcatcaccgtgagcagcggcggcatgctggtgcagaagctgaacaccaatgacctgcagagcgagaggaccccatttgatggcaccatggtgtatgcccagaacaagaggcagcaggtggtgctgacagagcgctgggcccagggccacccagccatccacttcagctccatgcaccctggctgggccgacaccccaggagtgcggcaggccatgcctggcttccacgccaggtttggagaccggctgcggtctgaggcccagggcgctgacaccatgctgtggctggccctgagcagcgctgctgctgcccagcccagcggccgcttcttccagggcgacttcctgcccggctgtgagggcagctag

SEQ ID NO: 162692 - DNA, 492 bp, synthetic construct
  misc_feature 1..492: note = Description of Artificial Sequence: Synthetic coding sequence
  source 1..492: mol_type = other DNA
atggctgaagatcggccccagcagccccagctggacatgcccctggtgctggaccagggcctgacccggcagatgaggctgcgggtggagagcctgaagcagagaggagagaagaggcaggatggagagaagctgctgcagcctgctgagagcgtgtaccgcctgaacttcacccagcagcagaggctgcagtttgagcgctggaatgtggtgctggacaagccaggcaaggtgaccatcaccggcaccagccagaactggaccccagacctgaccaacctgatgacccggcagctgctggaccccacagccatcttctggaggaaggaggacagtgatgccatcgactggaatgaagcagatgccctggagtttggagagcggctgagtgacctggccaagatcaggaaggtgatgtacttcctggtgacctttggagagggcgtggagcccgccaacctgaaggcctctgtggtgttcaaccagctgtag

SEQ ID NO: 162693 - DNA, 939 bp, synthetic construct
  misc_feature 1..939: note = Description of Artificial Sequence: Synthetic coding sequence
  source 1..939: mol_type = other DNA
atggatggcggcaaccagagcgagggcagcgagttcctgctgctgggcatgtctgagagccctgagcagcagaggatcctcttctggatgttcctgtccatgtacctggtgacagtggtgggcaatgtgctgatcatcctggccatcagcagtgacagccggctgcacacccctgtgtacttcttcctggccaacctgtccttcacagacctcttctttgtgaccaacaccatccccaagatgctggtgaacctgcagagccacaacaaggccatctcctatgccggctgcctgacccagctgtacttcctggtgtccctggtggccctggacaacctgatcctggccgtgatggcctatgacagatatgtggccatctgctgccccctgcactacaccacagccatgagccccaagctgtgcatcctgctgctgagcctgtgctgggtgctgtctgtgctgtatggcctcatccacaccctgctgatgaccagggtgaccttctgtggcagcaggaagatccactacatcttctgtgagatgtatgtgctgctgaggatggcctgcagcaacatccagatcaaccacacagtgctgattgccaccggctgcttcatcttcctgatcccctttggatttgtgatcatctcctatgtgctgatcatccgggccatcctgcgcatccccagcgtgtccaagaagtacaaggccttcagcacctgtgccagccacctgggcgctgtgtccctcttctacggcaccctgtgcatggtgtacctgaagcccctgcacacctacagcgtgaaggacagcgtggccaccgtgatgtatgctgtggtgacccccatgatgaaccccttcatctacagcctgaggaacaaggacatgcatggagccctgggccgcctgctggacaagcacttcaagaggctgacctag

SEQ ID NO: 162694 - DNA, 939 bp, synthetic construct
  misc_feature 1..939: note = Description of Artificial Sequence: Synthetic coding sequence
  source 1..939: mol_type = other DNA
atgagcggcaccaaccagagctctgtgtctgagttcctgctgctgggcctgagccggcagccccagcagcagcacctgctgtttgtgttcttcctgtccatgtacctggccaccgtgctgggcaacctgctgatcatcctgtctgtgtccattgacagctgcctgcacacccccatgtacttcttcctgagcaacctgagctttgtggacatctgcttctccttcaccaccgtgcccaagatgctggccaaccacatcctggagacccagaccatctccttctgtggctgcctgacccagatgtactttgtgttcatgtttgtggacatggacaacttcctgctggccgtgatggcctatgaccactttgtggccgtgtgccaccccctgcactacacagccaagatgacccaccagctgtgtgccctgctggtggccggcctgtgggtggtggccaacctgaatgtgctgctgcacaccctgctgatggcccccctgtccttctgtgccgacaatgccatcacccacttcttctgtgatgtgacccccctgctgaagctgagctgcagcgacacccacctgaatgaagtcatcatcctgtctgagggcgccctggtgatgatcacccccttcctgtgcatcctggccagctacatgcacatcacctgcaccgtgctgaaggtgcccagcaccaagggccgctggaaggccttcagcacctgtggcagccacctggccgtggtgctgctcttctacagcaccatcatcgctgtgtacttcaaccccctgagcagccacagcgctgagaaggacaccatggccaccgtgctgtacacagtggtgacccccatgctgaaccccttcatctacagcctgaggaaccgctacctgaagggggccctgaagaaggtggtgggccgggtggtgttttctgtgtag

SEQ ID NO: 162695 - DNA, 924 bp, synthetic construct
  misc_feature 1..924: note = Description of Artificial Sequence: Synthetic coding sequence
  source 1..924: mol_type = other DNA
atgaaccacagcgtggtgacagagttcatcatcctgggcctgaccaagaagccagagctgcagggcatcatcttcctgttcttcctgattgtgtacctggtggccttcctgggcaacatgctgatcatcatcgccaagatctacaacaacaccctgcacacccccatgtatgtgttcctgctgaccctggccgtggtggacatcatctgcaccaccagcatcatccccaagatgctgggcaccatgctgaccagcgagaacaccatctcctatgccggctgcatgagccagctgttcctgttcacctggagcctgggcgctgagatggtgctcttcaccaccatggcctatgaccgctacgtggccatctgcttccccctgcactacagcaccatcatgaaccaccacatgtgtgtggccctgctgtccatggtgatggccatcgctgtgaccaacagctgggtgcacacagccctgatcatgaggctgaccttctgtggccccaacaccatcgaccacttcttctgtgagatcccccccctgctggccctgagctgcagccctgtgcgcatcaatgaggtgatggtgtatgtggccgacatcaccctggccatcggggacttcatcctgacctgcatctcctatggcttcatcatcgtggccatcctgcgcatcagaacagtggagggcaagaggaaggccttcagcacctgcagcagccacctgactgtggtgaccctgtactacagccctgtgatctacacctacatccggcctgccagcagctacacctttgagcgggacaaggtggtggccgccctgtacaccctggtgacccccaccctgaaccccatggtgtacagcttccagaaccgggagatgcaggccggcatcaggaaggtgtttgccttcctgaagcactag

SEQ ID NO: 162696 - DNA, 930 bp, synthetic construct
  misc_feature 1..930: note = Description of Artificial Sequence: Synthetic coding sequence
  source 1..930: mol_type = other DNA
atggagaacagaaacaacatgacagaatttgtgctgctgggcctgacagagaaccccaagatgcagaagatcatctttgtggtgttcttcgtcatctacatcatcaccgtggtgggctacgtgctgattgtggtgaccatcacagccagccccagcctgggcagccccatgtacctgagcctggcctacctgtccttcattgatgcctgctacagctctgtgaacacccccaacctgatcacccacagcctgtatggcaagaaggccatcctcttcaacggctgcatgacccaggtgtttggagagcacttctttggaggagctgagggcatcctgctgactgtgatggcctatgaccactacgtggccatctgcaagcccctgcactacatgaccatcatgaaccagtgtgtgtgtgccctgctgatgggcgtggtgtggatgggcggcttcctgcacgccaccatccagatcctcttcatcttccagctgcccttctgtggccccaacgtcatcgaccacttcatgtgtgacctgaaccccctgctgaacctggcctgcacagacacccacatgctggagctgttcatcgccgccaacagcggcttcatctgcctgctgaactttgccctgctgctggtgtcctatgtggtgatcctgtgcagcctgcggacccacagcctggaggcccggcacaaggccctgagcacctgtgtgagccacatcaccgtggtgatcctcttctttgtgccctgcatctttgtgtacatgaggcctgctgccaccctgcccatcgacaaggctgtggccatcttctacaccatgatcacccccatgctgaaccccctcatctacaccctgaagaatgcccagatgaagaatgccatcaggaagctgtgcagcaggaaggacatcagcggggacaagtag

SEQ ID NO: 162697 - DNA, 978 bp, synthetic construct
  misc_feature 1..978: note = Description of Artificial Sequence: Synthetic coding sequence
  source 1..978: mol_type = other DNA
atgttcctgtacctgtgcttcatcttccagaggacctgcagcgaggagatggaggaggagaatgccaccctgctgacagaatttgtgctgaccggcttcctgcaccagcctgactgcaagatccccctcttcctggccttcctggtgatctacctgatcaccatcatgggcaacctgggcctcatcgtgctgatctggaaggacccccacctgcacatccccatgtacctgttcctgggcagcctggcctttgtggatgccagcctgagcagcacagtgacccccaagatgctgatcaacttcctggccaagagcaagatgatcagcctgtctgagtgcatggtgcagttcttcagcctggtgaccaccgtgaccacagagtgcttcctgctggccaccatggcctatgacagatatgtggccatctgcaaggccctgctgtaccctgtgatcatgaccaatgagctgtgcatccagctgctggtgctgtccttcatcggcggcctgctgcacgccctgattcatgaggccttctccttccggctgaccttctgcaacagcaacatcatccagcacttctactgtgacatcatccccctgctgaagatcagctgcacagacagcagcatcaacttcctgatggtgttcatctttgctggctctgtgcaggtgttcaccatcggcaccatcctgatctcctacaccatcatcctcttcaccatcctggagaagaagagcatcaagggcatcaggaaggctgtgtccacctgtggggcccacctgctgtctgtgtccctgtactacggccccctgaccttcaagtacctgggcagcgccagcccccaggctgatgaccaggacatgatggagagcctcttctacacagtgattgtgcccctgctgaaccccatgatctacagcctgaggaacaagcaggtgattgccagcttcaccaagatgttcaagagcaatgtgtag

SEQ ID NO: 162698 - DNA, 963 bp, synthetic construct
  misc_feature 1..963: note = Description of Artificial Sequence: Synthetic coding sequence
  source 1..963: mol_type = other DNA
atggagactggaaaccagacccacgcccaggagttcctgctgctgggcttcagcgccaccagcgagatccagttcatcctgtttggcctcttcctgtccatgtacctggtgaccttcaccggcaacctgctgatcatcctggccatctgcagcgacagccacctgcacacccccatgtacttcttcctgagcaacctgagctttgctgacctgtgcttcaccagcaccaccgtgcccaagatgctgctgaacatcctgacccagaacaagttcatcacctacgccggctgcctgagccagatcttcttcttcaccagctttggctgcctggacaacctgctgctgactgtgatggcctatgacagatttgtggccgtgtgccaccccctgcactacaccgtcatcatgaacccccagctgtgtggcctgctggtgctgggctcctggtgcatctctgtgatgggcagcctgctggagaccctgactgtgctgcggctgtccttctgcacagagatggagatcccccacttcttctgtgacctgctggaggtgctgaagctggcctgcagcgacaccttcatcaacaacgtggtgatctactttgccactggagtgctgggcgtcatctccttcaccggcatcttcttctcctactacaagatcgtgttcagcatcctgcgcatcagcagcgctggcaggaagcacaaggccttcagcacctgtggcagccacctgtctgtggtgaccctcttctacggcaccggcttcggcgtgtacctgagcagcgctgccacccccagcagcaggaccagcctggtggcctctgtgatgtacaccatggtgacccccatgctgaaccccttcatctacagcctgaggaacacagacatgaagagggccctgggccgcctgctgagccgggccaccttcttcaacggggacatcacagctggcctgtcctag

SEQ ID NO: 162699 - DNA, 960 bp, synthetic construct
  misc_feature 1..960: note = Description of Artificial Sequence: Synthetic coding sequence
  source 1..960: mol_type = other DNA
atggagcggggcaaccagacagaggtgggcaacttcctgctgctgggctttgctgaagattctgacatgcagctgctgctgcacggcctcttcctgtccatgtacctggtgaccatcatcggcaacctgctgatcatcctgaccatcagcagtgacagccacctgcacacccccatgtacttcttcctgagcaacctgagctttgctgacatctgcttcaccagcaccaccgtgcccaagatgctggtgaacatccagacccagagcaagatgatcacctttgctggctgcctgacccagatcttcttcttcatcgccttcggctgcctggacaacctgctgctgaccatgacagcctatgacagatttgtggccatctgctaccccctgcactacaccgtcatcatgaacccccggctgtgtggcctgctggtgctgggctcctggtgcatctctgtgatgggcagcctgctggagaccctgaccatcctgcggctgtccttctgcaccaacatggagatcccccacttcttctgtgaccccagcgaggtgctgaagctggcctgcagcgacaccttcatcaacaacatcgtgatgtactttgtgaccatcgtgctgggcgtcttccccctgtgtggcatcctcttctcctacagccagatcttcagctctgtgctgcgggtgtctgcccggggccagcacaaggccttcagcacctgtggcagccacctgtctgtggtgtccctcttctatggaacaggcctgggcgtgtacctgagcagcgctgtgaccccacccagcaggaccagcctggccgcctctgtgatgtacaccatggtgacccccatgctgaaccccttcatctacagcctgaggaacaaggacatgaagggcagcctgggccgcctgctgctgcgggccaccagcctgaaggagggcaccatcgccaagctgtcctag

SEQ ID NO: 162700 - DNA, 939 bp, synthetic construct
  misc_feature 1..939: note = Description of Artificial Sequence: Synthetic coding sequence
  source 1..939: mol_type = other DNA
atggaggccgagaacctgacagagctgagcaagttcctgctgctgggcctgagtgatgatcctgagctgcagcctgtgctgtttggcctcttcctgtccatgtacctggtgacagtgctgggcaacctgctgatcatcctggccgtgtccagtgacagccacctgcacacccccatgtacttcttcctgagcaacctgagctttgtggacatctgcttcatcagcaccaccgtgcccaagatgctggtgtccatccaggcccggagcaaggacatctcctacatgggctgcctgacccaggtgtacttcctgatgatgtttgctggcatggacaccttcctgctggccgtgatggcctatgacagatttgtggccatctgccaccccctgcactacaccgtcatcatgaacccctgcctgtgtggcctgctggtgctggcctcctggttcatcatcttctggttcagcctggtgcacatcctgctgatgaagaggctgaccttcagcactggaacagagatcccccacttcttctgtgagcccgcccaggtgctgaaggtggcctgcagcaacaccctgctgaacaacatcgtgctgtatgtggccacagccctgctgggcgtcttccctgtggccggcatcctcttctcctacagccagatcgtgagcagcctgatgggcatgagcagcaccaagggcaagtacaaggccttcagcacctgtggcagccacctgtgtgtggtgtccctcttctacggcaccggcctgggcgtgtacctgagcagcgctgtgacccacagcagccagagcagcagcacagcctctgtgatgtatgccatggtgacccccatgctgaaccccttcatctacagcctgaggaacaaggatgtgaagggggccctggagcggctgctgagcagagctgacagctgcccctag

SEQ ID NO: 162701 - DNA, 972 bp, synthetic construct
  misc_feature 1..972: note = Description of Artificial Sequence: Synthetic coding sequence
  source 1..972: mol_type = other DNA
atggacagtgatgccagcctggtgagcagccggcccagcagccctgagccagatgacctcttcctgcctgcccggagcaagggcagcagcggcagcgccttcaccggcggcaccgtgagcagcagcacccccagcgactgccccccagagctgtctgctgagctgcggggggccatgggcagcgctggggcccaccctggggacaagctgggcggcagcggcttcaagagcagcagcagcagcaccagcagcagcaccagcagcgctgctgccagcagcaccaagaaggacaagaagcagatgacagagcctgagctgcagcagctgcggctgaagatcaacagccgggagaggaagaggatgcatgacctgaacatcgccatggatggcctgcgggaggtgatgccctatgcccacggccccagcgtgaggaagctgagcaagatcgccaccctgctgctggccaggaactacatcctgatgctgaccaacagcctggaggagatgaagaggctggtgtctgagatctatggaggccaccacgccggcttccaccccagcgcctgtggcggcctggcccacagcgcccccctgcctgctgccacagcccaccctgctgctgctgcccatgctgcccaccaccctgctgtgcaccaccccatcctgcccccagctgctgctgctgctgctgctgctgctgctgctgctgctgtgagcagcgccagcctgcccggcagcggcctgcccagcgtgggcagcatccggcccccccacggcctgctgaagagccccagcgctgctgctgctgcccccctgggcggcggcggcggcggcagcggggccagcggcggcttccagcactggggcggcatgccctgcccctgcagcatgtgccaggtgcccccaccccaccaccacgtgtctgccatgggcgccggcagcctgccccggctgaccagtgatgccaagtag

SEQ ID NO: 162702 - DNA, 972 bp, synthetic construct; identical to SEQ ID NO: 162701
  misc_feature 1..972: note = Description of Artificial Sequence: Synthetic coding sequence
  source 1..972: mol_type = other DNA

SEQ ID NO: 162703 - DNA, 189 bp, synthetic construct
  misc_feature 1..189: note = Description of Artificial Sequence: Synthetic coding sequence
  source 1..189: mol_type = other DNA
atggacagtgatgccagcctggtgagcagccggcccagcagccctgagccagatgacctcttcctgcctgcccggagcaagggcagcagcggcagcgccttcaccggcggcaccgtgagcagcagcacccccagcgactgccccccagagctgtctgctgagctgcggggggccatgggcagcgcctag

SEQ ID NO: 162704 - DNA, 1323 bp, synthetic construct
  misc_feature 1..1323: note = Description of Artificial Sequence: Synthetic coding sequence
  source 1..1323: mol_type = other DNA
atggagtaccagatcctgaagatgagcctgtgcctcttcatcctgctcttcctgaccccaggcatcctgtgcatctgccccctgcagtgcatctgcacagagcggcaccgccacgtggactgcagcggcaggaacctgagcaccctgcccagcggcctgcaggagaacatcatccacctgaacctgagctacaaccacttcacagacctgcacaaccagctgacccagtacaccaacctgcggaccctggacatcagcaacaaccggctggagagcctgcctgcccacctgcccaggagcctgtggaacatgtctgctgccaacaacaacatcaagctgctggacaagagtgacacagcctaccagtggaacctgaagtacctggatgtgtccaagaacatgctggagaaggtggtgctgatcaagaacaccctgcggagcctggaggtgctgaacctgagcagcaacaagctgtggacagtgcccaccaacatgcccagcaagctgcacatcgtggacctgagcaacaacagcctgacccagatcctgcccggcaccctcatcaacctgaccaacctgacccacctgtacctgcacaacaacaagttcaccttcatcccagaccagagctttgaccagctgttccagctgcaggagatcaccctgtacaacaaccgctggagctgtgaccacaagcagaacatcacctacctgctgaagtggatgatggagaccaaggcccacgtgattggcaccccctgcagcacccagatcagcagcctgaaggagcacaacatgtaccccaccccatctggcttcaccagcagcctcttcaccgtgtctggcatgcagacagtggacaccatcaacagcctgtctgtggtgacccagcccaaggtgaccaagatccccaagcagtaccgcaccaaggagaccaccttcggggccaccctgagcaaggacaccaccttcaccagcacagacaaggcctttgtgccctacccagaggacaccagcacagagaccatcaacagccatgaggccgccgccgccaccctgaccatccacctgcaggacggcatggtgaccaacaccagcctgaccagcagcaccaagagcagccccacccccatgaccctgagcatcaccagcggcatgcccaacaacttcagcgagatgccccagcagagcaccaccctgaacctgtggagggaggagaccaccaccaacgtgaagacccccctgcccagcgtggccaatgcctggaaggtgaatgccagcttcctgctgctgctgaatgtggtggtgatgctggccgtgtag

SEQ ID NO: 162705 - DNA, 819 bp, synthetic construct
  misc_feature 1..819: note = Description of Artificial Sequence: Synthetic coding sequence
  source 1..819: mol_type = other DNA
atgaacagcgacagcagctctgtgagcagccgggccagcagcccagacatggatgagatgtacctgcgggaccaccaccaccgccaccaccaccaccaggagagccggctgaacagcgtgagcagcacccagggcgacatgatgcagaagatgcctggagagagcctgagcagagctggggccaaggccgccggggagagcagcaagtacaagatcaagaagcagctgtctgagcaggacctgcagcagctgcggctgaagatcaatggccgggagaggaagaggatgcatgacctgaacctggccatggatggcctgcgggaggtgatgccctatgcccacggccccagcgtgaggaagctgagcaagatcgccaccctgctgctggccaggaactacatcctgatgctgaccagcagcctggaggagatgaagaggctggtgggggagatctacggcggccaccacagcgccttccactgcggcaccgtgggccacagcgctggccacccagcccacgccgccaacagcgtgcaccctgtgcaccccatcctgggcggggccctgagcagtggaaatgccagcagccccctgtctgctgccagcctgcctgccatcggcaccatccggcccccccacagcctgctgaaggcccccagcaccccaccagccctgcagctgggcagcggcttccagcactgggccggcctgccctgcccctgcaccatctgccagatgcctcctccaccccacctgagcgccctgagcacagccaacatggcccggctgtctgctgagagcaaggacctgctgaagtag

SEQ ID NO: 162706 - DNA, 375 bp, synthetic construct
  misc_feature 1..375: note = Description of Artificial Sequence: Synthetic coding sequence
  source 1..375: mol_type = other DNA
atgtggaagggctgcctgaccctgtacacaggccggggcggggagctgcagaagattggagagttctgcatggtgtacagcgaggtgcccaacttcagcgagcccaacccagactaccggggccagcagaacaagggggcccagagcgagcagaagaacaacagcatgaacagcaacatgggcaccggcacctttggacctgtgggcaatggagtgcacacaggccctgagagccgggagcaccagttcagccacgccggccgcagcaatggccggggcctcatcaacccccagctgcagggcacagccagcaaccagacagtgatgaccaccatcagcaatggccgggacccccggcgggccttcaagaggtag

SEQ ID NO: 162707 - DNA, 375 bp, synthetic construct; identical to SEQ ID NO: 162706
  misc_feature 1..375: note = Description of Artificial Sequence: Synthetic coding sequence
  source 1..375: mol_type = other DNA

SEQ ID NO: 162708 - DNA, 615 bp, synthetic construct
  misc_feature 1..615: note = Description of Artificial Sequence: Synthetic coding sequence
  source 1..615: mol_type = other DNA
atgaacagagtgaatgaccccctcatcttcatccgggacatcaagccaggcctgaagaacctgaatgtggtgttcatcgtgctggagatcggccgggtgaccaagaccaaggatggccacgaggtgcgcagctgcaaggtggccgacaagacaggcagcatcaccatctctgtgtgggatgagatcggcggcctcatccagcccggggacatcatccggctgacccggggctacgcctccatgtggaagggctgcctgaccctgtacacaggccggggcggggagctgcagaagattggagagttctgcatggtgtacagcgaggtgcccaacttcagcgagcccaacccagactaccggggccagcagaacaagggggcccagagcgagcagaagaacaacagcatgaacagcaacatgggcaccggcacctttggacctgtgggcaatggagtgcacacaggccctgagagccgggagcaccagttcagccacgccggccgcagcaatggccggggcctcatcaacccccagctgcagggcacagccagcaaccagacagtgatgaccaccatcagcaatggccgggacccccggcgggccttcaagaggtag

SEQ ID NO: 162709 - DNA, 636 bp, synthetic construct
  misc_feature 1..636: note = Description of Artificial Sequence: Synthetic coding sequence
  source 1..636: mol_type = other DNA
atgaccacagagacctttgtgaaggacatcaagccaggcctgaagaacctgaacctgatcttcatcgtgctggagaccggccgggtgaccaagaccaaggatggccacgaggtgaggacctgcaaggtggccgacaagacaggcagcatcaacatctctgtgtgggatgatgtgggcaacctgatccagcccggggacatcatccggctgaccaagggctacgccagcgtcttcaagggctgcctgaccctgtacacaggccggggcggggacctgcagaagattggagagttctgcatggtgtacagcgaggtgcccaacttcagcgagcccaaccctgagtacagcacccagcaggcccccaacaaggctgtgcagaatgacagcaaccccagcgccagccagcccaccaccggccccagcgctgccagccctgccagcgagaaccagaatggaaatggcctgagcgcccctcctggccctgggggcggcccccaccccccccacacccccagccacccccccagcacccgcatcaccaggagccagcccaaccacaccccagctggccccccaggccccagcagcaaccctgtgtccaatggcaaggagacccggcgcagcagcaagaggtag

SEQ ID NO: 162710 - DNA, 636 bp, synthetic construct; identical to SEQ ID NO: 162709
  misc_feature 1..636: note = Description of Artificial Sequence: Synthetic coding sequence
  source 1..636: mol_type = other DNA

SEQ ID NO: 162711 - DNA, 636 bp, synthetic construct; identical to SEQ ID NO: 162709
  misc_feature 1..636: note = Description of Artificial Sequence: Synthetic coding sequence
  source 1..636: mol_type = other DNA

SEQ ID NO: 162712 - DNA, 459 bp, synthetic construct
  misc_feature 1..459: note = Description of Artificial Sequence: Synthetic coding sequence
  source 1..459: mol_type = other DNA
atgaccacagagacctttgtgaaggacatcaagccaggcctgaagaacctgaacctgatcttcatcgtgctggagaccggccgggtgaccaagaccaaggatggccacgaggtgaggacctgcaaggtggccgacaagacaggcagcatcaacatctctgtgtgggatgatgtgggcaacctgatccagcccggggacatcatccggctgaccaagggctacgccagcgtcttcaagggctgcctgaccctgtacacaggccggggcggggacctgcagaagattggagagttctgcatggtgtacagcgaggtgcccaacttcagcgagcccaaccctgagtacagcacccagcaggcccccaacaaggctgtgcagaatgacagcaaccccagcgccagccagcccaccaccggccccagcgctgccagccctgccagcgagaaccagaatggatag

SEQ ID NO: 162713 - DNA, 435 bp, synthetic construct
  misc_feature 1..435: note = Description of Artificial Sequence: Synthetic coding sequence
  source 1..435: mol_type = other DNA
atgaccacagagacctttgtgaaggacatcaagccaggcctgaagaacctgaacctgatcttcatcgtgctggagaccggccgggtgaccaagaccaaggatggccacgaggtgaggacctgcaaggtggccgacaagacaggcagcatcaacatctctgtgtgggatgatgtgggcaacctgatccagcccggggacatcatccggctgaccaagggctacgccagcgtcttcaagggctgcctgaccctgtacacaggccggggcggggacctgcagaagattggagagttctgcatggtgtacagcgaggtgcccaacttcagcgagcccaaccctgagtacagcacccagcaggcccccaacaaggctgtgcagaatgacagcaaccccagcgccagccagcccaccaccggccccagcgctgccagctag

SEQ ID NO: 162714 - DNA, 2409 bp, synthetic construct
  misc_feature 1..2409: note = Description of Artificial Sequence: Synthetic coding sequence
  source 1..2409: mol_type = other DNA
atgggccacccccccctggagttcagtgactgctacctggacagcccagacttccgggagcggctgaagtgctatgagcaggagctggagaggaccaacaagttcatcaaggatgtgatcaaggatggaaatgccctgatcagcgccatgaggaactacagcagcgctgtgcagaagttcagccagaccctgcagagcttccagtttgacttcatcggggacaccctgacagatgatgagatcaacattgctgagagcttcaaggagtttgctgagctgctgaatgaggtggagaatgaaagaatgatgatggtgcacaatgccagtgacctgctgatcaagcccctggagaacttcaggaaggagcagatcggcttcaccaaggagaggaagaagaagtttgagaaggatggagagcgcttctacagcctgctggacagacacctgcacctgagcagcaagaagaaggagagccagctgcaggaggccgacctgcaggtggacaaggagcggcacaacttctttgagagcagcctggactatgtgtaccagatccaggaggtgcaggagagcaagaagttcaacatcgtggagcctgtgctggccttcctgcacagcctcttcatcagcaacagcctgactgtggagctgacccaggacttcctgccctacaagcagcagctgcagctgagcctgcagaacaccaggaaccacttcagcagcacccgggaggagatggaggagctgaagaagaggatgaaggaggccccccagacctgcaagctgcccggccagcccaccatcgagggctacctgtacacccaggagaagtgggccctgggcatctcctgggtgaagtactactgccagtatgagaaggagaccaagaccctgaccatgacccccatggagcagaagccaggggccaagcagggccccctggacctgaccctgaagtactgtgtgcggaggaagacagagagcattgacaagcgcttctgctttgatattgagaccaatgaaagacctggcaccatcaccctgcaggccctgtctgaggccaacagaaggctgtggatggaggccatggatggcaaggagcccatctaccacagccccatcaccaagcagcaggagatggagctgaatgaggtgggcttcaagtttgtgaggaagtgcatcaacatcatcgagaccaagggcatcaagacagagggcctgtacagaacagtgggcagcaacatccaggtgcagaagctgctgaatgccttctttgaccccaagtgccctggagatgtggacttccacaacagcgactgggacatcaagaccatcaccagcagcctgaagttctacctgaggaacctgtctgagcctgtgatgacctaccgcctgcacaaggagctggtgtctgctgccaagagtgacaacctggactaccgcctgggcgccatccacagcctggtgtacaagctgcctgagaagaaccgggagatgctggagctgctgatccgccacctggtgaatgtgtgtgagcacagcaaggagaacctgatgacccccagcaacatgggcgtcatcttcggccccaccctgatgagggcccaggaggacacagtggccgccatgatgaacatcaagttccagaacatcgtggtggagatcctgattgagcactttgggaagatctacctgggccccccagaggagagcgctgcccctcctgtgcccccaccccgggtgacagcccggcggcacaagcccatcaccatcagcaagaggctgctgcgggagaggacagtgttctacaccagcagcctggatgaaagtgaagatgagatccagcaccagacccccaacggcaccatcaccagcagcattgagccccccaagccaccccagcaccccaagctgcccatccagaggtctggagaaacagaccccggcaggaagagccccagccggcccatcctggatggcaagctggagccctgcccagaggtggatgtgggcaagctggtgtcccggctgcaggacggcggcaccaagatcacccccaaggccaccaacggccccatgcctggcagcggccccaccaagacccccagcttccacatcaagaggcctgccccccggcccctggcccaccacaaggagggagatgctgacagcttcagcaaggtgcggcccccaggagagaagcccaccatcatccggccccctgtgcggcccccagaccccccctgcagagctgccaccccccagaagccagagcccaagccagacatcgtggccggaaatgctggggagatcaccagctctgtggtggccagcaggacccgcttctttgaaacagccagcaggaagacaggcagcagccagggccgcctgcctggagatgagagctag

SEQ ID NO: 162715 - DNA, 2085 bp, synthetic construct
  misc_feature 1..2085: note = Description of Artificial Sequence: Synthetic coding sequence
  source 1..2085: mol_type = other DNA
atgggccacccccccctggagttcagtgactgctacctggacagcccagacttccgggagcggctgaagtgctatgagcaggagctggagaggaccaacaagttcatcaaggatgtgatcaaggatggaaatgccctgatcagcgccatgaggaactacagcagcgctgtgcagaagttcagccagaccctgcagagcttccagtttgacttcatcggggacaccctgacagatgatgagatcaacattgctgagagcttcaaggagtttgctgagctgctgaatgaggtggagaatgaaagaatgatgatggtgcacaatgccagtgacctgctgatcaagcccctggagaacttcaggaaggagcagatcggcttcaccaaggagaggaagaagaagtttgagaaggatggagagcgcttctacagcctgctggacagacacctgcacctgagcagcaagaagaaggagagccagctgcaggaggccgacctgcaggtggacaaggagcggcacaacttctttgagagcagcctggactatgtgtaccagatccaggaggtgcaggagagcaagaagttcaacatcgtggagcctgtgctggccttcctgcacagcctcttcatcagcaacagcctgactgtggagctgacccaggacttcctgccctacaagcagcagctgcagctgagcctgcagaacaccaggaaccacttcagcagcacccgggaggagatggaggagctgaagaagaggatgaaggaggccccccagacctgcaagctgcccggccagcccaccatcgagggctacctgtacacccaggagaagtgggccctgggcatctcctgggtgaagtactactgccagtatgagaaggagaccaagaccctgaccatgacccccatggagcagaagccaggggccaagcagggccccctggacctgaccctgaagtactgtgtgcggaggaagacagagagcattgacaagcgcttctgctttgatattgagaccaatgaaagacctggcaccatcaccctgcaggccctgtctgaggccaacagaaggctgtggatggaggccatggatggcaaggagcccatctaccacagccccatcaccaagcagcaggagatggagctgaatgaggtgggcttcaagtttgtgaggaagtgcatcaacatcatcgagaccaagggcatcaagacagagggcctgtacagaacagtgggcagcaacatccaggtgcagaagctgctgaatgccttctttgaccccaagtgccctggagatgtggacttccacaacagcgactgggacatcaagaccatcaccagcagcctgaagttctacctgaggaacctgtctgagcctgtgatgacctaccgcctgcacaaggagctggtgtctgctgccaagagtgacaacctggactaccgcctgggcgccatccacagcctggtgtacaagctgcctgagaagaaccgggagatgctggagctgctgatccgccacctggtgaatgtgtgtgagcacagcaaggagaacctgatgacccccagcaacatgggcgtcatcttcggccccaccctgatgagggcccaggaggacacagtggccgccatgatgaacatcaagttccagaacatcgtggtggagatcctgattgagcactttgggaagatctacctgggccccccagaggagagcgctgcccctcctgtgcccccaccccgggtgacagcccggcggcacaagcccatcaccatcagcaagaggctgctgcgggagaggacagtgttctacaccagcagcctggatgaaagtgaaggagatgctgacagcttcagcaaggtgcggcccccaggagagaagcccaccatcatccggccccctgtgcggcccccagaccccccctgcagagctgccaccccccagaagccagagcccaagccagacatcgtggccggaaatgctggggagatcaccagctctgtggtggccagcaggacccgcttctttgaaacagccagcaggaagacaggcagcagccagggccgcctgcctggagatgagagctag

SEQ ID NO: 162716 - DNA, 225 bp, synthetic construct
  misc_feature 1..225: note = Description of Artificial Sequence: Synthetic coding sequence
  source 1..225: mol_type = other DNA
atgctggagctgctgatccgccacctggtgaatgtgtgtgagcacagcaaggagaacctgatgacccccagcaacatgggcgtcatcttcggccccaccctgatgagggcccaggaggacacagtggccgccatgatgaacatcaagttccagaacatcgtggtggagatcctgattgagcactttgggaagatcagcagcttcttcctgcacaggagcatctag

SEQ ID NO: 162717 - DNA, 3111 bp, synthetic construct
  misc_feature 1..3111: note = Description of Artificial Sequence: Synthetic coding sequence
  source 1..3111: mol_type = other DNA
atggccagctctgtgggcaatgtggccgacagcacaggcctggccgagctggcccaccgggagtaccaggccggggactttgaagctgctgagcggcactgcatgcagctgtggaggcaggagccagacaacacaggagtgctgctgctgctgagcagcatccacttccagtgccggcggctggacagaagtgcccacttcagcaccctggccatcaagcagaaccccctgctggccgaggcctacagcaacctgggcaatgtgtacaaggagcggggccagctgcaggaggccatcgagcactacagacatgccctgcggctgaagccagacttcattgatggctacatcaacctggccgccgccctggtggccgccggggacatggagggcgctgtgcaggcctacgtgtctgccctgcagtacaacccagacctgtactgtgtgcggagtgacctgggcaacctgctgaaggccctgggccgcctggaggaggccaaggcctgctacctgaaggccatcgagacccagcccaactttgctgtggcctggagcaacctgggctgtgtgttcaatgcccagggcgagatctggctggccatccaccactttgagaaggctgtgaccctggaccccaacttcctggatgcctacatcaacctgggcaatgtgctgaaggaggcccgcatctttgacagagctgtggccgcctacctgcgggccctgagcctgagccccaaccacgctgtggtgcacggcaacctggcctgtgtgtactatgagcagggcctgattgacctggccatcgacacctacagaagagccatcgagctgcagccccacttcccagatgcctactgcaacctggccaatgccctgaaggagaagggctctgtggccgaggccgaggactgctacaacacagccctgcggctgtgccccacccatgctgacagcctgaacaacctggccaacatcaagcgggagcagggcaacatcgaggaggccgtgcggctgtacaggaaggccctggaggtgtttcctgagtttgctgctgcccacagcaacctggcctctgtgctgcagcagcagggcaagctgcaggaggccctgatgcactacaaggaggccatccgcatcagccccacctttgctgatgcctacagcaacatgggcaacaccctgaaggagatgcaggatgtgcagggcgccctgcagtgctacacccgggccatccagatcaacccagcctttgctgatgcccacagcaacctggccagcatccacaaggacagcggcaacatccctgaggccatcgccagctacagaacagccctgaagctgaagccagacttcccagatgcctactgcaacctggcccactgcctgcagatcgtgtgtgactggacagattatgatgagaggatgaagaagctggtgtccatcgtggccgaccagctggagaagaaccggctgcccagcgtgcacccccaccacagcatgctgtaccccctgagccacggcttcaggaaggccatcgccgagagacatggcaacctgtgcctggacaagatcaacgtgctgcacaagccaccctatgagcaccccaaggacctgaagctgagtgatggccgcctgcgggtgggctacgtgtccagtgactttggaaaccaccccaccagccacctgatgcagagcatccctggcatgcacaacccagacaagtttgaggtgttctgctacgccctgagcccagatgatggcaccaacttccgggtgaaggtgatggccgaggccaaccacttcatcgacctgagccagatcccctgcaatggcaaggctgctgaccgcatccaccaggacggcatccacatcctggtgaacatgaatggctacaccaagggggccagaaatgagctgtttgccctgcggcctgcccccatccaggccatgtggctgggctacccaggcaccagcggggccctcttcatggactacatcatcacagaccaggagaccagccctgctgaggtggccgagcagtacagcgagaagctggcctacatgccccacaccttcttcatcggggaccacgccaacatgttcccccacctgaagaagaaggctgtgattgacttcaagagcaatggccacatctatgacaaccgcatcgtgctgaatggaattgacctgaaggccttcctggacagcctgcctgatgtgaagatcgtgaagatgaagtgcccagatggaggagacaatgctgacagcagcaacacagccctgaacatgcctgtgatccccatgaacaccatcgccgaggccgtgattgagatgatcaacagaggccagatccagatcaccatcaatggcttcagcatcagcaatggcctggccaccacccagatcaacaacaaggccgccactggagaggaggtgcccaggaccatcatcgtgaccaccaggagccagtatggcctgcctgaagatgccatcgtgtactgcaacttcaaccagctgtacaagattgaccccagcaccctgcagatgtgggccaacatcctgaagagggtgcccaacagcgtgctgtggctgctgcgcttccctgctgtgggggagcccaacatccagcagtatgcccagaacatgggcctgccccagaaccgcatcatcttcagccctgtggcccccaaggaggagcacgtgagaagaggccagctggctgatgtgtgcctggacacccccctgtgcaatggccacaccaccggcatggatgtgctgtgggccggcacccccatggtgaccatgcctggagagaccctggccagccgggtggccgccagccagctgacctgcctgggctgcctggagctgattgccaagaaccggcaggagtatgaagatattgctgtgaagctgggcacagacctggagtacctgaagaaggtgcggggcaaggtgtggaagcagaggatcagcagccccctcttcaacaccaagcagtacaccatggagctggagcggctgtacctgcagatgtgggagcactacgccgccggcaacaagccagaccacatgatcaagcctgtggaggtgacagaaagtgcctag

SEQ ID NO: 162718 - DNA, 3141 bp, synthetic construct
  misc_feature 1..3141: note = Description of Artificial Sequence: Synthetic coding sequence
  source 1..3141: mol_type = other DNA
atggccagctctgtgggcaatgtggccgacagcacagagcccaccaagaggatgctgtccttccagggcctggccgagctggcccaccgggagtaccaggccggggactttgaagctgctgagcggcactgcatgcagctgtggaggcaggagccagacaacacaggagtgctgctgctgctgagcagcatccacttccagtgccggcggctggacagaagtgcccacttcagcaccctggccatcaagcagaaccccctgctggccgaggcctacagcaacctgggcaatgtgtacaaggagcggggccagctgcaggaggccatcgagcactacagacatgccctgcggctgaagccagacttcattgatggctacatcaacctggccgccgccctggtggccgccggggacatggagggcgctgtgcaggcctacgtgtctgccctgcagtacaacccagacctgtactgtgtgcggagtgacctgggcaacctgctgaaggccctgggccgcctggaggaggccaaggcctgctacctgaaggccatcgagacccagcccaactttgctgtggcctggagcaacctgggctgtgtgttcaatgcccagggcgagatctggctggccatccaccactttgagaaggctgtgaccctggaccccaacttcctggatgcctacatcaacctgggcaatgtgctgaaggaggcccgcatctttgacagagctgtggccgcctacctgcgggccctgagcctgagccccaaccacgctgtggtgcacggcaacctggcctgtgtgtactatgagcagggcctgattgacctggccatcgacacctacagaagagccatcgagctgcagccccacttcccagatgcctactgcaacctggccaatgccctgaaggagaagggctctgtggccgaggccgaggactgctacaacacagccctgcggctgtgccccacccatgctgacagcctgaacaacctggccaacatcaagcgggagcagggcaacatcgaggaggccgtgcggctgtacaggaaggccctggaggtgtttcctgagtttgctgctgcccacagcaacctggcctctgtgctgcagcagcagggcaagctgcaggaggccctgatgcactacaaggaggccatccgcatcagccccacctttgctgatgcctacagcaacatgggcaacaccctgaaggagatgcaggatgtgcagggcgccctgcagtgctacacccgggccatccagatcaacccagcctttgctgatgcccacagcaacctggccagcatccacaaggacagcggcaacatccctgaggccatcgccagctacagaacagccctgaagctgaagccagacttcccagatgcctactgcaacctggcccactgcctgcagatcgtgtgtgactggacagattatgatgagaggatgaagaagctggtgtccatcgtggccgaccagctggagaagaaccggctgcccagcgtgcacccccaccacagcatgctgtaccccctgagccacggcttcaggaaggccatcgccgagagacatggcaacctgtgcctggacaagatcaacgtgctgcacaagccaccctatgagcaccccaaggacctgaagctgagtgatggccgcctgcgggtgggctacgtgtccagtgactttggaaaccaccccaccagccacctgatgcagagcatccctggcatgcacaacccagacaagtttgaggtgttctgctacgccctgagcccagatgatggcaccaacttccgggtgaaggtgatggccgaggccaaccacttcatcgacctgagccagatcccctgcaatggcaaggctgctgaccgcatccaccaggacggcatccacatcctggtgaacatgaatggctacaccaagggggccagaaatgagctgtttgccctgcggcctgcccccatccaggccatgtggctgggctacccaggcaccagcggggccctcttcatggactacatcatcacagaccaggagaccagccctgctgaggtggccgagcagtacagcgagaagctggcctacatgccccacaccttcttcatcggggaccacgccaacatgttcccccacctgaagaagaaggctgtgattgacttcaagagcaatggccacatctatgacaaccgcatcgtgctgaatggaattgacctgaaggccttcctggacagcctgcctgatgtgaagatcgtgaagatgaagtgcccagatggaggagacaatgctgacagcagcaacacagccctgaacatgcctgtgatccccatgaacaccatcgccgaggccgtgattgagatgatcaacagaggccagatccagatcaccatcaatggcttcagcatcagcaatggcctggccaccacccagatcaacaacaaggccgccactggagaggaggtgcccaggaccatcatcgtgaccaccaggagccagtatggcctgcctgaagatgccatcgtgtactgcaacttcaaccagctgtacaagattgaccccagcaccctgcagatgtgggccaacatcctgaagagggtgcccaacagcgtgctgtggctgctgcgcttccctgctgtgggggagcccaacatccagcagtatgcccagaacatgggcctgccccagaaccgcatcatcttcagccctgtggcccccaaggaggagcacgtgagaagaggccagctggctgatgtgtgcctggacacccccctgtgcaatggccacaccaccggcatggatgtgctgtgggccggcacccccatggtgaccatgcctggagagaccctggccagccgggtggccgccagccagctgacctgcctgggctgcctggagctgattgccaagaaccggcaggagtatgaagatattgctgtgaagctgggcacagacctggagtacctgaagaaggtgcggggcaaggtgtggaagcagaggatcagcagccccctcttcaacaccaagcagtacaccatggagctggagcggctgtacctgcagatgtgggagcactacgccgccggcaacaagccagaccacatgatcaagcctgtggaggtgacagaaagtgcctag

SEQ ID NO: 162719 - DNA, 330 bp, synthetic construct
  misc_feature 1..330: note = Description of Artificial Sequence: Synthetic coding sequence
  source 1..330: mol_type = other DNA
atgagcatcacagatgtgctgtctgcagatgacattgctgctgccctgcaggagtgccgggaccctgacacctttgagccccagaagttcttccagaccagcggcctgagcaagatgtctgccaaccaggtgaaggatgtgttccgcttcatcgacaatgaccagagcggctacctggatgaggaggagctgaagttcttcctgcagaagtttgaaagtggggcccgggagctgacagaaagtgagaccaagagcctgatggctgctgctgacaatgatggagatggcaagatcggggctgaggagttccaggagatggtgcacagctag

SEQ ID NO: 162720 - DNA, 330 bp, synthetic construct; identical to SEQ ID NO: 162719
  misc_feature 1..330: note = Description of Artificial Sequence: Synthetic coding sequence
  source 1..330: mol_type = other DNA

SEQ ID NO: 162721 - DNA, 1638 bp, synthetic construct
  misc_feature 1..1638: note = Description of Artificial Sequence: Synthetic coding sequence
  source 1..1638: mol_type = other DNA
atgccacccttcctgctgctgacctgcctcttcatcaccggcacctctgtgtcccctgtggccctggacccctgcagcgcctacatcagcctgaatgagccctggaggaacacagaccaccagctggatgagagccagggcccccccctgtgtgacaaccacgtgaatggagagtggtaccacttcaccggcatggctggagatgccatgcccaccttctgcatccctgagaaccactgcggcacccacgcccctgtgtggctgaatggcagccaccccctggagggagatggcatcgtgcagaggcaggcctgtgccagcttcaatggaaactgctgcctgtggaacaccaccgtggaggtgaaggcctgccctgggggctactacgtgtaccgcctgaccaagcccagcgtgtgcttccacgtgtactgcggccacttctatgacatctgtgatgaggactgccacggcagctgcagcgacaccagcgagtgcacctgtgcccctggcaccgtgctgggccctgaccggcagacctgctttgatgaaaatgaatgtgagcagaacaacggcggctgcagcgagatctgtgtgaacctgaagaacagctaccgctgtgaatgtggggtgggccgggtgctgcggagtgatggcaagacctgtgaagatgtggagggctgccacaacaacaatggaggctgcagccacagctgcctgggcagcgagaagggctaccagtgtgagtgcccccggggcctggtgctgtctgaggacaaccacacctgccaggtgcctgtgctgtgcaagagcaatgccatcgaggtgaacatcccccgggagctggtgggcggcctggagctgttcctgaccaacaccagctgccggggcgtgtccaatggcacccacgtgaacatcctcttcagcctgaagacctgtggcaccgtggtggatgtggtgaatgacaagatcgtggccagcaacctggtgacaggcctgcccaagcagaccccaggcagcagcggggacttcatcatccgcaccagcaagctgctgatccctgtgacctgtgagttcccccggctgtacaccatcagcgagggctacgtgcccaacctgaggaacagccccctggagatcatgagcaggaaccacggcatcttccccttcaccctggagatcttcaaggacaatgaatttgaggagccctaccgggaggccctgcccaccctgaagctgcgggacagcctgtacttcggcatcgagcctgtggtgcacgtgtctggcctggagagcctggtggagagctgctttgccacccccaccagcaagattgatgaggtgctgaagtactacctgatcagagatggctgtgtgtctgatgacagcgtgaagcagtacaccagccgggaccacctggccaagcacttccaggtgcctgtgttcaagtttgtgggcaaggaccacaaggaggtgttcctgcactgccgggtgctggtgtgtggggtgctggatgagaggagccgctgtgcccagggctgccacaggaggatgagaagaggagctggaggagaggacagcgctggcctgcagggccagaccctgactggaggccccatcagaattgactgggaggactag

SEQ ID NO: 162722 - DNA, 966 bp, synthetic construct
  misc_feature 1..966: note = Description of Artificial Sequence: Synthetic coding sequence
  source 1..966: mol_type = other DNA
atgccacccttcctgctgctgacctgcctcttcatcaccggcacctctgtgtcccctgtggccctggacccctgcagcgcctacatcagcctgaatgagccctggaggaacacagaccaccagctggatgagagccagggcccccccctgtgtgacaaccacgtgaatggagagtggtaccacttcaccggcatggctggagatgccatgcccaccttctgcatccctgagaaccactgcggcacccacgcccctgtgtggctgaatggcagccaccccctggagggagatggcatcgtgcagaggcaggcctgtgccagcttcaatggaaactgctgcctgtggaacaccaccgtggaggtgaaggcctgccctgggggctactacgtgtaccgcctgaccaagcccagcgtgtgcttccacgtgtactgcggccacttctatgacatctgtgatgaggactgccacggcagctgcagcgacaccagcgagtgcacctgtgcccctggcaccgtgctgggccctgaccggcagacctgctttgatgaaaatgaatgtgagcagaacaacggcggctgcagcgagatctgtgtgaacctgaagaacagctaccgctgtgaatgtggggtgggccgggtgctgcggagtgatggcaagacctgtgaagatgtggagggctgccacaacaacaatggaggctgcagccacagctgcctgggcagcgagaagggctaccagtgtgagtgcccccggggcctggtgctgtctgaggacaaccacacctgccaggtgcctgtgctgtgcaagagcaatgccatcgaggtgaacatcccccgggagctggtgggcggcctggagctgttcctgaccaacaccagctgccggggcgtgtccaatggcacccacgtgaacatcctcttcagcctgaagacctgtggcaccgtggtggacagctgcttccagtag

SEQ ID NO: 162723 - DNA, 735 bp, synthetic construct
  misc_feature 1..735: note = Description of Artificial Sequence: Synthetic coding sequence
  source 1..735: mol_type = other DNA
atgggcctggagctgttcctggacctggtgtcccagcccagcagagctgtgtacatctttgccaagaagaatggcatccccctggagctgaggacagtggacctggtgaagggccagcacaagagcaaggagttcctgcagatcaacagcctgggcaagctgcccaccctgaaggatggagacttcatcctgacagagagcagcgccatcctgatctacctgagctgcaagtaccagaccccagaccactggtaccccagcgacctgcaggcccgggcccgggtgcatgagtacctgggctggcatgctgactgcatccggggcaccttcggcatccccctgtgggtgcaggtgctgggccccctgattggagtgcaggtgcccaaggagaaggtggagaggaacagaacagccatggaccaggccctgcagtggctggaggacaagttcctgggggaccggcccttcctggccggccagcaggtgaccctggccgacctgatggccctggaggagctgatgcagcctgtggccctgggctatgagctgtttgagggccggccccggctggccgcctggaggggccgggtggaggccttcctgggcgctgagctgtgccaggaggcccacagcatcatcctgagcatcctggagcaggccgccaagaagaccctgcccacccccagccctgaggcctaccaggccatgctgctgcgcatcgcccgcatcccctag

SEQ ID NO: 162724 - DNA, 696 bp, synthetic construct
  misc_feature 1..696: note = Description of Artificial Sequence: Synthetic coding sequence
  source 1..696: mol_type = other DNA
atggcctccatggccgccatcggcagctgcagcaaggagtacagagtgctgctgggccagctgcagaagcagacagacctgatgcaggacaccagccggctgctggacccctacatccgcatccagggcctggatgtgcccaagctgcgggagcactgccgggagaggcctggggccttccccagcgaggagaccctgcggggcctgggcagaagaggcttcctgcagaccctgaatgccaccctgggctgtgtgctgcaccggctggccgacctggagcagaggctgcccaaggcccaggacctggagaggagcggcctgaacatcgaggacctggagaagctgcagatggcccggcccaacatcctgggcctgaggaacaacatctactgcatggcccagctgctggacaacagcgacacagctgagcccaccaaggccggccgcggggccagccagccccccacccccaccccagccagtgatgccttccagaggaagctggagggctgccgcttcctgcacggctaccaccgcttcatgcacagcgtgggccgggtcttcagcaagtggggcgagagccccaacagaagcagaagacacagcccccaccaggccctgaggaaaggagtgcggaggacccggcccagcaggaagggcaagaggctgatgacccggggccagctgcccaggtag

SEQ ID NO: 162725 - DNA, 2940 bp, synthetic construct
  misc_feature 1..2940: note = Description of Artificial Sequence: Synthetic coding sequence
  source 1..2940: mol_type = other DNA
atggccctgtttgctgtgttccagaccaccttcttcctgaccctgctgagcctgcggacctaccagagcgaggtgctggccgagcggctgcccctgacccctgtgtccctgaaggtgtccaccaacagcacccggcagagcctgcacctgcagtggacagtgcacaacctgccctaccaccaggagctgaagatggtgttccagatccagatcagccgcatcgagaccagcaatgtcatctgggtgggcaactacagcaccaccgtgaagtggaaccaggtgctgcactggagctgggagagcgagctgcccctggagtgtgccacccactttgtgcgcatcaagagcctggtggatgatgccaagtttcctgagcccaacttctggagcaactggagctcctgggaggaggtgtctgtgcaggacagcacaggccaggacatcctgtttgtgttccccaaggacaagctggtggaggagggcaccaacgtgaccatctgctacgtgtccaggaacatccagaacaacgtgtcctgctacctggagggcaagcagatccatggagagcagctggacccccacgtgacagccttcaacctgaacagcgtgcccttcatcagaaataaaggcaccaacatctactgtgaggccagccagggcaatgtgtctgagggcatgaagggcatcgtgctgtttgtgtccaaggtgctggaggagcccaaggacttcagctgtgaaacagaggacttcaagaccctgcactgcacctgggaccctggaacagacacagccctgggctggagcaagcagcccagccagagctacaccctgtttgagagcttcagcggggagaagaagctgtgcacccacaagaactggtgcaactggcagatcacccaggacagccaggagacctacaacttcaccctgattgctgagaactacctgaggaagaggtctgtgaacatcctcttcaacctgacccaccgggtgtacctgatgaaccccttctctgtgaactttgaaaatgtgaatgccaccaatgccatcatgacctggaaggtgcacagcatccggaacaacttcacctacctgtgccagatcgagctgcatggagagggcaagatgatgcagtacaacgtgtccatcaaggtgaatggagagtacttcctgtctgagctggagcccgccacagagtacatggcccgggtgcgctgtgctgatgccagccacttctggaagtggagcgagtggagcggccagaacttcaccaccctggaggccgcccccagcgaggccccagatgtgtggagaattgtgtccctggagcccggcaaccacacagtgaccctcttctggaagcccctgagcaagctgcacgccaacgggaagatcctcttctacaacgtggtggtggagaacctggacaagcccagcagcagcgagctgcacagcatcccagccccagccaacagcaccaagctgatcctggaccgctgcagctaccagatctgtgtgattgccaacaacagcgtgggcgccagccctgccagcgtcatcgtcatctctgctgaccctgagaacaaggaggtggaggaggagagaattgctggaacagaaggaggcttcagcctgtcctggaagccccagcctggagatgtgattggctacgtggtggactggtgtgaccacacccaggatgtgctgggggacttccagtggaagaatgtgggccccaacaccaccagcaccgtcatcagcacagatgccttccggcctggggtgcgctatgacttccgcatctacggcctgagcaccaagagaattgcctgcctgctggagaagaagacaggctacagccaggagctggcccccagcgacaacccccacgtgctggtggacaccctgaccagccacagcttcaccctgtcctggaaggactacagcacagagagccagcccggcttcatccagggctaccacgtgtacctgaagagcaaggcccggcagtgccaccccaggtttgagaaggctgtgctgagtgatggcagcgagtgctgcaagtacaagattgacaaccctgaggagaaggccctgattgtggacaacctgaagccagagagcttctatgagttcttcatcacccccttcaccagcgctggggagggccccagcgccaccttcaccaaggtgaccaccccagatgagcacagctccatgctgatccacatcctgctgcccatggtgttctgtgtgctgctgatcatggtgatgtgctacctgaagagccagtggatcaaggagacctgctacccagacatcccagacccctacaagagcagcatcctgagcctcatcaagttcaaggagaacccccacctgatcatcatgaatgtgtctgactgcatcccagatgccatcgaggtggtgtccaagccagagggcaccaagatccagttcctgggcaccaggaagagcctgacagaaacagagctgaccaagcccaactacctgtacctgctgcccacagagaagaaccacagcggccctggcccctgcatctgctttgagaacctgacctacaaccaggccgccagtgacagcggcagctgtggccacgtgcctgtgagccccaaggcccccagcatgctgggcctgatgaccagcccagaaaatgtgctgaaggccctggagaagaactacatgaacagcctgggggagatcccagctggggagaccagcctgaactacgtgtcccagctggccagccccatgtttggagacaaggacagcctgcccaccaaccctgtggaggccccccactgcagcgagtacaagatgcagatggctgtgtccctgcggctggccctgcccccacccacagagaacagcagcctgagcagcatcaccctgctggaccccggggagcactactgctag

SEQ ID NO: 162726 - DNA, 1029 bp, synthetic construct
  misc_feature 1..1029: note = Description of Artificial Sequence: Synthetic coding sequence
  source 1..1029: mol_type = other DNA
atggccctgtttgctgtgttccagaccaccttcttcctgaccctgctgagcctgcggacctaccagagcgaggtgctggccgagcggctgcccctgacccctgtgtccctgaaggtgtccaccaacagcacccggcagagcctgcacctgcagtggacagtgcacaacctgccctaccaccaggagctgaagatggtgttccagatccagatcagccgcatcgagaccagcaatgtcatctgggtgggcaactacagcaccaccgtgaagtggaaccaggtgctgcactggagctgggagagcgagctgcccctggagtgtgccacccactttgtgcgcatcaagagcctggtggatgatgccaagtttcctgagcccaacttctggagcaactggagctcctgggaggaggtgtctgtgcaggacagcacaggccaggacatcctgtttgtgttccccaaggacaagctggtggaggagggcaccaacgtgaccatctgctacgtgtccaggaacatccagaacaacgtgtcctgctacctggagggcaagcagatccatggagagcagctggacccccacgtgacagccttcaacctgaacagcgtgcccttcatcagaaataaaggcaccaacatctactgtgaggccagccagggcaatgtgtctgagggcatgaagggcatcgtgctgtttgtgtccaaggtgctggaggagcccaaggacttcagctgtgaaacagaggacttcaagaccctgcactgcacctgggaccctggaacagacacagccctgggctggagcaagcagcccagccagagctacaccctgtttgagagcttcagcggggagaagaagctgtgcacccacaagaactggtgcaactggcagatcacccaggacagccaggagacctacaacttcaccctgattgctgagaactacctgaggaagaggtctgtgaacatcctcttcaacctgacccacagaggagagaccagggtggtgacagcccaccggggccactag

SEQ ID NO: 162727 - DNA, 1398 bp, synthetic construct
  misc_feature 1..1398: note = Description of Artificial Sequence: Synthetic coding sequence
  source 1..1398: mol_type = other DNA
atgaatgcccagctgaccatggaggccatcggggagctgcacggcgtgtcccatgagcctgtgcctgccccagctgacctgctgggcggcagcccccacgcccggagctctgtggcccaccggggcagccacctgcccccagcccaccccaggtccatgggcatggccagcctgctggatggcggcagcggcggcggggactaccaccaccaccaccgggcccctgagcacagcctggccggccccctgcaccccaccatgaccatggcctgtgagaccccacctggcatgtccatgcccaccacctacaccaccctgacccccctgcagcccctgccccccatcagcacagtgtctgacaagttcccccaccaccaccaccaccaccaccaccaccaccacccccaccaccaccagaggctggccggaaatgtgtctggcagcttcaccctgatgagagatgagcggggcctggcctccatgaacaacctgtacaccccctaccacaaggatgtggccggcatgggccagagcctgagccccctgagcagcagcggcctgggcagcatccacaacagccagcagggcctgccccactacgcccaccctggagctgccatgcccacagacaagatgctgacccccaacggctttgaggcccaccacccagccatgctgggcagacatggagagcagcacctgacccccaccagcgctggcatggtgcccatcaatggcctgcccccccaccacccccacgcccacctgaatgcccagggccacggccagctgctgggcacagcccgggagcccaaccccagcgtgactggagcccaggtgtccaatggcagcaacagcggccagatggaggagatcaacaccaaggaggtggcccagaggatcaccacagagctgaagcgctacagcatcccccaggccatctttgcccagagggtgctgtgccgcagccagggcaccctgagtgacctgctgaggaaccccaagccctggagcaagctgaagagcggccgggagaccttccggaggatgtggaagtggctgcaggagcctgagttccagaggatgtctgccctgcggctggccgcctgcaagaggaaggagcaggagcacggcaaggaccggggcaacacccccaagaagccccggctggtgttcacagatgtgcagaggaggaccctgcacgccatcttcaaggagaacaagaggcccagcaaggagctgcagatcaccatcagccagcagctgggcctggagctgagcacagtgagcaacttcttcatgaatgcccggcggcgcagcctggacaagtggcaggatgagggcagcagcaacagcggcaacagcagcagcagcagcagcacctgcaccaaggcctag

SEQ ID NO: 162728 - DNA, 1515 bp, synthetic construct
  misc_feature 1..1515: note = Description of Artificial Sequence: Synthetic coding sequence
  source 1..1515: mol_type = other DNA
atgaaggccgcctacacagcctaccgctgcctgaccaaggacctggagggctgtgccatgaaccctgagctgaccatggagagcctgggcaccctgcacggccctgctgggggcggcagcggcggcggcggcggcggcggcggcggcggcggcggcggcggccctggccacgagcaggagctgctggccagccccagcccccaccacgccggccgcggggctgctggcagcctgcggggccccccacctccacccacagcccaccaggagctgggcacagctgctgctgctgctgctgctgccagccgcagcgccatggtgacctccatggccagcatcctggatggaggagactacagacctgagctgagcatccccctgcaccacgccatgtccatgagctgtgacagcagccccccaggcatgggcatgagcaacacctacaccaccctgacccccctgcagcccctgccccccatcagcacagtgtctgacaagttccaccacccccacccccaccaccacccccaccaccaccaccaccaccaccaccagaggctgtctggaaatgtgtctggcagcttcaccctgatgagagatgagcggggcctgcctgccatgaacaacctgtacagcccctacaaggagatgcctggcatgagccagagcctgagccccctggccgccacccccctgggcaatggcctgggcggcctgcacaatgcccagcagagcctgcccaactacggccccccaggccatgacaagatgctgagccccaactttgatgcccaccacacagccatgctgaccagaggagagcagcacctgagccggggcctgggcaccccacctgctgccatgatgagccacctgaatggcctgcaccaccctggccacacccagagccacggccctgtgctggcccccagccgggagaggcctcccagcagcagcagcggcagccaggtggccaccagcggccagctggaggagatcaacaccaaggaggtggcccagaggatcacagctgagctgaagcgctacagcatcccccaggccatctttgcccagagggtgctgtgccgcagccagggcaccctgagtgacctgctgaggaaccccaagccctggagcaagctgaagagcggccgggagaccttccggaggatgtggaagtggctgcaggagcctgagttccagaggatgtctgccctgcggctggccgcctgcaagaggaaggagcaggagcccaacaaggacaggaacaacagccagaagaagagccggctggtgttcacagacctgcagaggaggaccctgtttgccatcttcaaggagaacaagaggcccagcaaggagatgcagatcaccatcagccagcagctgggcctggagctgaccaccgtgagcaacttcttcatgaatgccaggagaagaagcctggagaagtggcaggatgacctgagcactggaggcagcagcagcaccagcagcacctgcaccaaggcctag

SEQ ID NO: 162729 - DNA, 1458 bp, synthetic construct
  misc_feature 1..1458: note = Description of Artificial Sequence: Synthetic coding sequence
  source 1..1458: mol_type = other DNA
atgaaccctgagctgaccatggagagcctgggcaccctgcacggccctgctgggggcggcagcggcggcggcggcggcggcggcggcggcggcggcggcggcggccctggccacgagcaggagctgctggccagccccagcccccaccacgccggcagaggagctgctggcagcctgcggggccccccacctccacccacagcccaccaggagctgggcacagctgctgctgctgctgctgctgccagccgcagcgccatggtgacctccatggccagcatcctggatggaggagactacagacctgagctgagcatccccctgcaccacgccatgtccatgagctgtgacagcagccccccaggcatgggcatgagcaacacctacaccaccctgacccccctgcagcccctgccccccatcagcacagtgtctgacaagttccaccacccccacccccaccaccacccccaccaccaccaccaccaccaccaccagaggctgtctggaaatgtgtctggcagcttcaccctgatgagagatgagcggggcctgcctgccatgaacaacctgtacagcccctacaaggagatgcctggcatgagccagagcctgagccccctggccgccacccccctgggcaatggcctgggcggcctgcacaatgcccagcagagcctgcccaactacggccccccaggccatgacaagatgctgagccccaactttgatgcccaccacacagccatgctgaccagaggagagcagcacctgagccggggcctgggcaccccacctgctgccatgatgagccacctgaatggcctgcaccaccctggccacacccagagccacggccctgtgctggcccccagccgggagcggccccccagcagcagcagcggcagccaggtggccaccagcggccagctggaggagatcaacaccaaggaggtggcccagaggatcacagctgagctgaagcgctacagcatcccccaggccatctttgcccagagggtgctgtgccgcagccagggcaccctgagtgacctgctgaggaaccccaagccctggagcaagctgaagagcggccgggagaccttccggaggatgtggaagtggctgcaggagcctgagttccagaggatgtctgccctgcggctggccgcctgcaagaggaaggagcaggagcccaacaaggacaggaacaacagccagaagaagagccggctggtgttcacagacctgcagaggaggaccctgtttgccatcttcaaggagaacaagaggcccagcaaggagatgcagatcaccatcagccagcagctgggcctggagctgaccaccgtgagcaacttcttcatgaatgcccggcggcgcagcctggagaagtggcaggatgacctgagcactggaggcagcagcagcaccagcagcacctgcaccaaggcctag

SEQ ID NO: 162730 - DNA, 450 bp, synthetic construct
  misc_feature 1..450: note = Description of Artificial Sequence: Synthetic coding sequence
  source 1..450: mol_type = other DNA
atggtggatgatgctggagctgctgagagccagaggggcaagcagaccccagcccacagcctggagcagctgcggcggctgcccctgcccccaccccagatccgcatccggccctggtggttccctgtgcaggagctgcgggaccccctggtgttctacctggaggcctggctggctgatgagctgtttggaccagaccgggccatcatccctgagatggagtggaccagccaggccctgctgactgtggacatcgtggacagcggcaacctggtggagatcaccgtgtttggccggccccgggtgcagaacagagtgaagtccatgctgctgtgcctggcctggttccaccgggagcaccgggcccgggcagagaagatgaagcacctggagaagaacctgaaggcccacgccagtgacccccacagcccccaggaccctgtggcctag

SEQ ID NO: 162731 - DNA, 387 bp, synthetic construct
  misc_feature 1..387: note = Description of Artificial Sequence: Synthetic coding sequence
  source 1..387: mol_type = other DNA
atggcccctgtgaagaagctggtggtgaagggcggcaagaagaagaagcaggtgctgaagttcaccctggactgcacccaccctgtggaggatggcatcatggatgctgccaactttgagcagttcctgcaggagcgcatcaaggtgaatggcaaggccggcaacctgggcggcggcgtggtgaccatcgagaggagcaagagcaagatcaccgtgaccagcgaggtgcccttcagcaagcgctacctgaagtacctgaccaagaagtacctgaagaagaacaacctgcgggactggctgcgggtggtggccaacagcaaggagagctatgagctgcgctacttccagatcaaccaggatgaggaggaggaggaggatgaagattag

SEQ ID NO: 162732 - DNA, 975 bp, synthetic construct
  misc_feature 1..975: note = Description of Artificial Sequence: Synthetic coding sequence
  source 1..975: mol_type = other DNA
atggagcccgcccccagcgctggagctgagctgcagccccccctgtttgccaatgccagtgatgcctaccccagcgcctgccccagcgctggggccaatgccagcggccccccaggggcccggagcgccagcagcctggccctggccatcgccatcacagccctgtacagcgctgtgtgtgctgtgggcctgctgggcaatgtgctggtgatgtttggcatcgtgcgctacaccaagatgaagacagccaccaacatctacatcttcaacctggccctggctgatgccctggccaccagcaccctgcccttccagagcgccaagtacctgatggagacctggccctttggagagctgctgtgcaaggctgtgctgagcattgactactacaacatgttcaccagcatcttcaccctgaccatgatgtctgtggaccgctacatcgctgtgtgccaccctgtgaaggccctggacttccgcaccccagccaaggccaagctgatcaacatctgcatctgggtgctggccagcggcgtgggcgtgcccatcatggtgatggctgtgacccggcccagagatggagctgtggtgtgcatgctgcagttccccagccccagctggtactgggacacagtgaccaagatctgtgtgttcctgtttgcctttgtggtgtgctgggcccccatccacatcttcgtcatcgtgtggaccctggtggacatcgacagaagagaccccctggtggtggccgccctgcacctgtgcatcgccctgggctacgccaacagcagcctgaaccctgtgctgtatgccttcctggatgagaacttcaagcgctgcttccggcagctgtgcaggaagccctgtggccgcccagaccccagcagcttcagccgggcccgggaggccacagcccgggagcgggtgacagcctgcacccccagtgatggccctgggggcggcgctgctgcctag

SEQ ID NO: 162733 - DNA, 1143 bp, synthetic construct
  misc_feature 1..1143: note = Description of Artificial Sequence: Synthetic coding sequence
  source 1..1143: mol_type = other DNA
atggacagccccatccagatcttccggggggagcccggccccacctgtgcccccagcgcctgcctgccccccaacagcagcgcctggttccctggctgggccgagccagacagcaatggatctgctggctctgaagatgcccagctggagcccgcccacatcagccctgccatccctgtgatcatcacagctgtgtacagcgtggtgtttgtggtgggcctggtgggcaacagcctggtgatgtttgtgatcatccgctacaccaagatgaagacagccaccaacatctacatcttcaacctggccctggctgatgccctggtgaccaccaccatgcccttccagagcacagtgtacctgatgaacagctggccctttggagatgtgctgtgcaagatcgtcatcagcattgactactacaacatgttcaccagcatcttcaccctgaccatgatgtctgtggaccgctacatcgctgtgtgccaccctgtgaaggccctggacttccgcacccccctgaaggccaagatcatcaacatctgcatctggctgctgagcagctctgtgggcatcagcgccatcgtgctgggcggcaccaaggtgagagaagatgtggatgtgattgaatgttccctgcagttcccagatgatgactacagctggtgggacctcttcatgaagatctgtgtgttcatctttgcctttgtgattcctgtgctgatcatcatcgtgtgctacaccctgatgatcctgcggctgaagtctgtgcggctgctgagcggcagccgggagaaggacaggaacctgcggcgcatcacccggctggtgctggtggtggtggccgtgtttgtggtgtgctggacccccatccacatcttcatcctggtggaggccctgggcagcaccagccacagcacagctgccctgagcagctactacttctgcatcgccctgggctacaccaacagcagcctgaaccccatcctgtatgccttcctggatgagaacttcaagcgctgcttccgggacttctgcttccccctgaagatgaggatggagcggcagagcaccagccgggtgaggaacacagtgcaggaccctgcctacctgcgggacattgatggcatgaacaagcctgtgtag

SEQ ID NO: 162734 - DNA, 1101 bp, synthetic construct
  misc_feature 1..1101: note = Description of Artificial Sequence: Synthetic coding sequence
  source 1..1101: mol_type = other DNA
atggacagccccatccagatcttccggggggagcccggccccacctgtgcccccagcgcctgcctgccccccaacagcagcgctggctctgaagatgcccagctggagcccgcccacatcagccctgccatccctgtgatcatcacagctgtgtacagcgtggtgtttgtggtgggcctggtgggcaacagcctggtgatgtttgtgatcatccgctacaccaagatgaagacagccaccaacatctacatcttcaacctggccctggctgatgccctggtgaccaccaccatgcccttccagagcacagtgtacctgatgaacagctggccctttggagatgtgctgtgcaagatcgtcatcagcattgactactacaacatgttcaccagcatcttcaccctgaccatgatgtctgtggaccgctacatcgctgtgtgccaccctgtgaaggccctggacttccgcacccccctgaaggccaagatcatcaacatctgcatctggctgctgagcagctctgtgggcatcagcgccatcgtgctgggcggcaccaaggtgagagaagatgtggatgtgattgaatgttccctgcagttcccagatgatgactacagctggtgggacctcttcatgaagatctgtgtgttcatctttgcctttgtgattcctgtgctgatcatcatcgtgtgctacaccctgatgatcctgcggctgaagtctgtgcggctgctgagcggcagccgggagaaggacaggaacctgcggcgcatcacccggctggtgctggtggtggtggccgtgtttgtggtgtgctggacccccatccacatcttcatcctggtggaggccctgggcagcaccagccacagcacagctgccctgagcagctactacttctgcatcgccctgggctacaccaacagcagcctgaaccccatcctgtatgccttcctggatgagaacttcaagcgctgcttccgggacttctgcttccccctgaagatgaggatggagcggcagagcaccagccgggtgaggaacacagtgcaggaccctgcctacctgcgggacattgatggcatgaacaagcctgtgtag

SEQ ID NO: 162735 - DNA, 1143 bp, synthetic construct; identical to SEQ ID NO: 162733
  misc_feature 1..1143: note = Description of Artificial Sequence: Synthetic coding sequence
  source 1..1143: mol_type = other DNA

SEQ ID NO: 162736 - DNA, 1344 bp, synthetic construct
  misc_feature 1..1344: note = Description of Artificial Sequence: Synthetic coding sequence
  source 1..1344: mol_type = other DNA
atgagcagaagaccctgcagctgtgccctgcggcccccacgctgcagctgcagcgccagccccagcgctgtgacagctgctggccggccccggcccagcgacagctgcaaggaggagagcagcaccctgtctgtgaagatgaagtgtgacttcaactgcaaccacgtgcacagcggcctgaagctggtgaagccagatgacatcggccgcctggtgtcctacaccccagcctacctggagggcagctgcaaggactgcatcaaggactatgaaaggctgagctgcatcggcagccccatcgtgagccccagaattgtgcagctggagacagagagcaagaggctgcacaacaaggagaaccagcacgtgcagcagaccctgaacagcaccaatgaaattgaggccctggagaccagccggctgtatgaagattctggctacagcagcttcagcctgcagagcggcctgtctgaacatgaggagggcagcctgctggaggagaactttggagacagcctgcagagctgcctgctgcagatccagagcccagaccagtaccccaacaagaacctgctgcctgtgctgcactttgagaaggtggtgtgcagcaccctgaagaagaatgccaagaggaaccccaaggtggaccgggagatgctgaaggagatcatcgcccggggcaacttccggctgcagaacatcattggaaggaagatgggcctggagtgtgtggacatcctgtctgagctgttccggcggggcctgcggcacgtgctggccaccatcctggcccagctgagtgacatggacctgatcaacgtgtccaaggtgtccaccacctggaagaagatcctggaggatgacaagggggccttccagctgtacagcaaggccatccagagggtgacagagaacaacaacaagttcagcccccacgccagcacccgggagtatgtgatgttccgcacccccctggcctctgtgcagaagtctgctgcccagaccagcctgaagaaggatgcccagaccaagctgagcaaccagggcgaccagaagggcagcacctacagccgccacaatgagttcagcgaggtggccaagaccctgaagaagaatgaaagcctgaaggcctgcatccgctgcaacagccctgccaagtatgactgctacctgcagagggccacctgcaagcgggagggctgcggctttgactactgcaccaagtgcctgtgcaactaccacaccaccaaggactgcagtgatggcaagctgctgaaggccagctgcaagattggccccctgcccggcaccaagaagagcaagaagaacctgcggcggctgtag

SEQ ID NO: 162737 - DNA, 1203 bp, synthetic construct
  misc_feature 1..1203: note = Description of Artificial Sequence: Synthetic coding sequence
  source 1..1203: mol_type = other DNA
atggacagcagcgctgcccccaccaatgccagcaactgcacagatgccctggcctacagcagctgcagccctgcccccagccctggctcctgggtgaacctgagccacctggatggcaacctgagtgacccctgtggccccaacagaacagacctgggcggccgggacagcctgtgcccccccaccggcagccccagcatgatcacagccatcaccatcatggccctgtacagcatcgtgtgtgtggtgggcctgtttggaaacttcctggtgatgtatgtgattgtgcgctacaccaagatgaagacagccaccaacatctacatcttcaacctggccctggctgatgccctggccaccagcaccctgcccttccagagcgtgaactacctgatgggcacctggcccttcggcaccatcctgtgcaagatcgtcatcagcattgactactacaacatgttcaccagcatcttcaccctgtgcaccatgtctgtggaccgctacatcgctgtgtgccaccctgtgaaggccctggacttccgcaccccaagaaatgccaagatcatcaacgtgtgcaactggatcctgagcagcgccatcggcctgcctgtgatgttcatggccaccaccaagtaccggcagggcagcattgactgcaccctgaccttcagccaccccacctggtactgggagaacctgctgaagatctgtgtgttcatctttgccttcatcatgcctgtgctgatcatcaccgtgtgctacggcctgatgatcctgcggctgaagtctgtgaggatgctgagcggcagcaaggagaaggacaggaacctgcggcgcatcaccaggatggtgctggtggtggtggccgtgttcatcgtgtgctggacccccatccacatctacgtgatcatcaaggccctggtgaccatccctgagaccaccttccagacagtgtcctggcacttctgcatcgccctgggctacaccaacagctgcctgaaccctgtgctgtatgccttcctggatgagaacttcaagcgctgcttccgggagttctgcatccccaccagcagcaacatcgagcagcagaacagcacccgcatccggcagaacacccgggaccaccccagcacagccaacacagtggacaggaccaaccaccagctggagaacctggaggccgagacagcccccctgccctag

SEQ ID NO: 162738 - DNA, 1257 bp, synthetic construct
  misc_feature 1..1257: note = Description of Artificial Sequence: Synthetic coding sequence
  source 1..1257: mol_type = other DNA
atggacagcagcgctgcccccaccaatgccagcaactgcacagatgccctggcctacagcagctgcagccctgcccccagccctggctcctgggtgaacctgagccacctggatggcaacctgagtgacccctgtggccccaacagaacagacctgggcggccgggacagcctgtgcccccccaccggcagccccagcatgatcacagccatcaccatcatggccctgtacagcatcgtgtgtgtggtgggcctgtttggaaacttcctggtgatgtatgtgattgtgcgctacaccaagatgaagacagccaccaacatctacatcttcaacctggccctggctgatgccctggccaccagcaccctgcccttccagagcgtgaactacctgatgggcacctggcccttcggcaccatcctgtgcaagatcgtcatcagcattgactactacaacatgttcaccagcatcttcaccctgtgcaccatgtctgtggaccgctacatcgctgtgtgccaccctgtgaaggccctggacttccgcaccccaagaaatgccaagatcatcaacgtgtgcaactggatcctgagcagcgccatcggcctgcctgtgatgttcatggccaccaccaagtaccggcagggcagcattgactgcaccctgaccttcagccaccccacctggtactgggagaacctgctgaagatctgtgtgttcatctttgccttcatcatgcctgtgctgatcatcaccgtgtgctacggcctgatgatcctgcggctgaagtctgtgaggatgctgagcggcagcaaggagaaggacaggaacctgcggcgcatcaccaggatggtgctggtggtggtggccgtgttcatcgtgtgctggacccccatccacatctacgtgatcatcaaggccctggtgaccatccctgagaccaccttccagacagtgtcctggcacttctgcatcgccctgggctacaccaacagctgcctgaaccctgtgctgtatgccttcctggatgagaacttcaagcgctgcttccgggagttctgcatccccaccagcagcaacatcgagcagcagaacagcacccgcatccggcagaacacccgggaccaccccagcacagccaacacagtggacaggaccaaccaccagccccccctggccgtgtccatggcccagatcttcacccgctaccccccacccacccaccgggagaagacctgcaatgactacatgaagaggtag

SEQ ID NO: 162739 - DNA, 1209 bp, synthetic construct
  misc_feature 1..1209: note = Description of Artificial Sequence: Synthetic coding sequence
  source 1..1209: mol_type = other DNA
atggacagcagcgctgcccccaccaatgccagcaactgcacagatgccctggcctacagcagctgcagccctgcccccagccctggctcctgggtgaacctgagccacctggatggcaacctgagtgacccctgtggccccaacagaacagacctgggcggccgggacagcctgtgcccccccaccggcagccccagcatgatcacagccatcaccatcatggccctgtacagcatcgtgtgtgtggtgggcctgtttggaaacttcctggtgatgtatgtgattgtgcgctacaccaagatgaagacagccaccaacatctacatcttcaacctggccctggctgatgccctggccaccagcaccctgcccttccagagcgtgaactacctgatgggcacctggcccttcggcaccatcctgtgcaagatcgtcatcagcattgactactacaacatgttcaccagcatcttcaccctgtgcaccatgtctgtggaccgctacatcgctgtgtgccaccctgtgaaggccctggacttccgcaccccaagaaatgccaagatcatcaacgtgtgcaactggatcctgagcagcgccatcggcctgcctgtgatgttcatggccaccaccaagtaccggcagggcagcattgactgcaccctgaccttcagccaccccacctggtactgggagaacctgctgaagatctgtgtgttcatctttgccttcatcatgcctgtgctgatcatcaccgtgtgctacggcctgatgatcctgcggctgaagtctgtgaggatgctgagcggcagcaaggagaaggacaggaacctgcggcgcatcaccaggatggtgctggtggtggtggccgtgttcatcgtgtgctggacccccatccacatctacgtgatcatcaaggccctggtgaccatccctgagaccaccttccagacagtgtcctggcacttctgcatcgccctgggctacaccaacagctgcctgaaccctgtgctgtatgccttcctggatgagaacttcaagcgctgcttccgggagttctgcatccccaccagcagcaacatcgagcagcagaacagcacccgcatccggcagaacacccgggaccaccccagcacagccaacacagtggacaggaccaaccaccagatccgggaccccatcagcaacctgccccgggtgtctgtgttctag

SEQ ID NO: 162740 - DNA, 1212 bp, synthetic construct
  misc_feature 1..1212: note = Description of Artificial Sequence: Synthetic coding sequence
  source 1..1212: mol_type = other DNA
atggacagcagcgctgcccccaccaatgccagcaactgcacagatgccctggcctacagcagctgcagccctgcccccagccctggctcctgggtgaacctgagccacctggatggcaacctgagtgacccctgtggccccaacagaacagacctgggcggccgggacagcctgtgcccccccaccggcagccccagcatgatcacagccatcaccatcatggccctgtacagcatcgtgtgtgtggtgggcctgtttggaaacttcctggtgatgtatgtgattgtgcgctacaccaagatgaagacagccaccaacatctacatcttcaacctggccctggctgatgccctggccaccagcaccctgcccttccagagcgtgaactacctgatgggcacctggcccttcggcaccatcctgtgcaagatcgtcatcagcattgactactacaacatgttcaccagcatcttcaccctgtgcaccatgtctgtggaccgctacatcgctgtgtgccaccctgtgaaggccctggacttccgcaccccaagaaatgccaagatcatcaacgtgtgcaactggatcctgagcagcgccatcggcctgcctgtgatgttcatggccaccaccaagtaccggcagggcagcattgactgcaccctgaccttcagccaccccacctggtactgggagaacctgctgaagatctgtgtgttcatctttgccttcatcatgcctgtgctgatcatcaccgtgtgctacggcctgatgatcctgcggctgaagtctgtgaggatgctgagcggcagcaaggagaaggacaggaacctgcggcgcatcaccaggatggtgctggtggtggtggccgtgttcatcgtgtgctggacccccatccacatctacgtgatcatcaaggccctggtgaccatccctgagaccaccttccagacagtgtcctggcacttctgcatcgccctgggctacaccaacagctgcctgaaccctgtgctgtatgccttcctggatgagaacttcaagcgctgcttccgggagttctgcatccccaccagcagcaacatcgagcagcagaacagcacccgcatccggcagaacacccgggaccaccccagcacagccaacacagtggacaggaccaaccaccagggccccccagccaagtttgtggccgaccagctggccggcagcagctag

SEQ ID NO: 162741 - DNA, 1263 bp, synthetic construct
  misc_feature 1..1263: note = Description of Artificial Sequence: Synthetic coding sequence
  source 1..1263: mol_type = other DNA
atggacagcagcgctgcccccaccaatgccagcaactgcacagatgccctggcctacagcagctgcagccctgcccccagccctggctcctgggtgaacctgagccacctggatggcaacctgagtgacccctgtggccccaacagaacagacctgggcggccgggacagcctgtgcccccccaccggcagccccagcatgatcacagccatcaccatcatggccctgtacagcatcgtgtgtgtggtgggcctgtttggaaacttcctggtgatgtatgtgattgtgcgctacaccaagatgaagacagccaccaacatctacatcttcaacctggccctggctgatgccctggccaccagcaccctgcccttccagagcgtgaactacctgatgggcacctggcccttcggcaccatcctgtgcaagatcgtcatcagcattgactactacaacatgttcaccagcatcttcaccctgtgcaccatgtctgtggaccgctacatcgctgtgtgccaccctgtgaaggccctggacttccgcaccccaagaaatgccaagatcatcaacgtgtgcaactggatcctgagcagcgccatcggcctgcctgtgatgttcatggccaccaccaagtaccggcagggcagcattgactgcaccctgaccttcagccaccccacctggtactgggagaacctgctgaagatctgtgtgttcatctttgccttcatcatgcctgtgctgatcatcaccgtgtgctacggcctgatgatcctgcggctgaagtctgtgaggatgctgagcggcagcaaggagaaggacaggaacctgcggcgcatcaccaggatggtgctggtggtggtggccgtgttcatcgtgtgctggacccccatccacatctacgtgatcatcaaggccctggtgaccatccctgagaccaccttccagacagtgtcctggcacttctgcatcgccctgggctacaccaacagctgcctgaaccctgtgctgtatgccttcctggatgagaacttcaagcgctgcttccgggagttctgcatccccaccagcagcaacatcgagcagcagaacagcacccgcatccggcagaacacccgggaccaccccagcacagccaacacagtggacaggaccaaccaccaggtggagctgaacctggactgccactgtgaaaatgccaagccctggcccctgagctacaatgccggccagagccccttccccttccctggccgggtgtag

SEQ ID NO: 162742 - DNA, 1179 bp, synthetic construct
  misc_feature 1..1179: note = Description of Artificial Sequence: Synthetic coding sequence
  source 1..1179: mol_type = other DNA
atggacagcagcgctgcccccaccaatgccagcaactgcacagatgccctggcctacagcagctgcagccctgcccccagccctggctcctgggtgaacctgagccacctggatggcaacctgagtgacccctgtggccccaacagaacagacctgggcggccgggacagcctgtgcccccccaccggcagccccagcatgatcacagccatcaccatcatggccctgtacagcatcgtgtgtgtggtgggcctgtttggaaacttcctggtgatgtatgtgattgtgcgctacaccaagatgaagacagccaccaacatctacatcttcaacctggccctggctgatgccctggccaccagcaccctgcccttccagagcgtgaactacctgatgggcacctggcccttcggcaccatcctgtgcaagatcgtcatcagcattgactactacaacatgttcaccagcatcttcaccctgtgcaccatgtctgtggaccgctacatcgctgtgtgccaccctgtgaaggccctggacttccgcaccccaagaaatgccaagatcatcaacgtgtgcaactggatcctgagcagcgccatcggcctgcctgtgatgttcatggccaccaccaagtaccggcagggcagcattgactgcaccctgaccttcagccaccccacctggtactgggagaacctgctgaagatctgtgtgttcatctttgccttcatcatgcctgtgctgatcatcaccgtgtgctacggcctgatgatcctgcggctgaagtctgtgaggatgctgagcggcagcaaggagaaggacaggaacctgcggcgcatcaccaggatggtgctggtggtggtggccgtgttcatcgtgtgctggacccccatccacatctacgtgatcatcaaggccctggtgaccatccctgagaccaccttccagacagtgtcctggcacttctgcatcgccctgggctacaccaacagctgcctgaaccctgtgctgtatgccttcctggatgagaacttcaagcgctgcttccgggagttctgcatccccaccagcagcaacatcgagcagcagaacagcacccgcatccggcagaacacccgggaccaccccagcacagccaacacagtggacaggaccaaccaccaggtgcgcagcctgtag

SEQ ID NO: 162743 - DNA, 1482 bp, synthetic construct
  misc_feature 1..1482: note = Description of Artificial Sequence: Synthetic coding sequence
  source 1..1482: mol_type = other DNA
atgtgcctgcacagaagagtgcccagcgaggagacctacagcctggacagatttgcccagaaccccccactcttccccccacccagcctgcctgccagcgagagcaggatggcccacgcccccctgctgcagagatgtggggccgccaggacaggcttctgcaagaagcagcaggagctgtggcagaggaggaaggaggccgctgaggccctgggcaccaggaaggtgtctgtgctgctggccaccagccacagcggggcccggcctgctgtgtccaccatggacagcagcgctgcccccaccaatgccagcaactgcacagatgccctggcctacagcagctgcagccctgcccccagccctggctcctgggtgaacctgagccacctggatggcaacctgagtgacccctgtggccccaacagaacagacctgggcggccgggacagcctgtgccccccaacaggcagccccagcatgatcacagccatcaccatcatggccctgtacagcatcgtgtgtgtggtgggcctgtttggaaacttcctggtgatgtatgtgattgtgcgctacaccaagatgaagacagccaccaacatctacatcttcaacctggccctggctgatgccctggccaccagcaccctgcccttccagagcgtgaactacctgatgggcacctggcccttcggcaccatcctgtgcaagatcgtcatcagcattgactactacaacatgttcaccagcatcttcaccctgtgcaccatgtctgtggaccgctacatcgctgtgtgccaccctgtgaaggccctggacttccgcaccccaagaaatgccaagatcatcaacgtgtgcaactggatcctgagcagcgccatcggcctgcctgtgatgttcatggccaccaccaagtaccggcagggcagcattgactgcaccctgaccttcagccaccccacctggtactgggagaacctgctgaagatctgtgtgttcatctttgccttcatcatgcctgtgctgatcatcaccgtgtgctacggcctgatgatcctgcggctgaagtctgtgaggatgctgagcggcagcaaggagaaggacaggaacctgcggcgcatcaccaggatggtgctggtggtggtggccgtgttcatcgtgtgctggacccccatccacatctacgtgatcatcaaggccctggtgaccatccctgagaccaccttccagacagtgtcctggcacttctgcatcgccctgggctacaccaacagctgcctgaaccctgtgctgtatgccttcctggatgagaacttcaagcgctgcttccgggagttctgcatccccaccagcagcaacatcgagcagcagaacagcacccgcatccggcagaacacccgggaccaccccagcacagccaacacagtggacaggaccaaccaccagctggagaacctggaggccgagacagcccccctgccctag

SEQ ID NO: 162744 - DNA, 1194 bp, synthetic construct
  misc_feature 1..1194: note = Description of Artificial Sequence: Synthetic coding sequence
  source 1..1194: mol_type = other DNA
atggacagcagcgctgcccccaccaatgccagcaactgcacagatgccctggcctacagcagctgcagccctgcccccagccctggctcctgggtgaacctgagccacctggatggcaacctgagtgacccctgtggccccaacagaacagacctgggcggccgggacagcctgtgcccccccaccggcagccccagcatgatcacagccatcaccatcatggccctgtacagcatcgtgtgtgtggtgggcctgtttggaaacttcctggtgatgtatgtgattgtgcgctacaccaagatgaagacagccaccaacatctacatcttcaacctggccctggctgatgccctggccaccagcaccctgcccttccagagcgtgaactacctgatgggcacctggcccttcggcaccatcctgtgcaagatcgtcatcagcattgactactacaacatgttcaccagcatcttcaccctgtgcaccatgtctgtggaccgctacatcgctgtgtgccaccctgtgaaggccctggacttccgcaccccaagaaatgccaagatcatcaacgtgtgcaactggatcctgagcagcgccatcggcctgcctgtgatgttcatggccaccaccaagtaccggcagggcagcattgactgcaccctgaccttcagccaccccacctggtactgggagaacctgctgaagatctgtgtgttcatctttgccttcatcatgcctgtgctgatcatcaccgtgtgctacggcctgatgatcctgcggctgaagtctgtgaggatgctgagcggcagcaaggagaaggacaggaacctgcggcgcatcaccaggatggtgctggtggtggtggccgtgttcatcgtgtgctggacccccatccacatctacgtgatcatcaaggccctggtgaccatccctgagaccaccttccagacagtgtcctggcacttctgcatcgccctgggctacaccaacagctgcctgaaccctgtgctgtatgccttcctggatgagaacttcaagcgctgcttccgggagttctgcatccccaccagcagcaacatcgagcagcagaacagcacccgcatccggcagaacacccgggaccaccccagcacagccaacacagtggacaggaccaaccaccagcgggagcggcggcagaagagtgactggtag

SEQ ID NO: 162745 - DNA, 1221 bp, synthetic construct
  misc_feature 1..1221: note = Description of Artificial Sequence: Synthetic coding sequence
  source 1..1221: mol_type = other DNA
atggacagcagcgctgcccccaccaatgccagcaactgcacagatgccctggcctacagcagctgcagccctgcccccagccctggctcctgggtgaacctgagccacctggatggcaacctgagtgacccctgtggccccaacagaacagacctgggcggccgggacagcctgtgcccccccaccggcagccccagcatgatcacagccatcaccatcatggccctgtacagcatcgtgtgtgtggtgggcctgtttggaaacttcctggtgatgtatgtgattgtgcgctacaccaagatgaagacagccaccaacatctacatcttcaacctggccctggctgatgccctggccaccagcaccctgcccttccagagcgtgaactacctgatgggcacctggcccttcggcaccatcctgtgcaagatcgtcatcagcattgactactacaacatgttcaccagcatcttcaccctgtgcaccatgtctgtggaccgctacatcgctgtgtgccaccctgtgaaggccctggacttccgcaccccaagaaatgccaagatcatcaacgtgtgcaactggatcctgagcagcgccatcggcctgcctgtgatgttcatggccaccaccaagtaccggcagggcagcattgactgcaccctgaccttcagccaccccacctggtactgggagaacctgctgaagatctgtgtgttcatctttgccttcatcatgcctgtgctgatcatcaccgtgtgctacggcctgatgatcctgcggctgaagtctgtgaggatgctgagcggcagcaaggagaaggacaggaacctgcggcgcatcaccaggatggtgctggtggtggtggccgtgttcatcgtgtgctggacccccatccacatctacgtgatcatcaaggccctggtgaccatccctgagaccaccttccagacagtgtcctggcacttctgcatcgccctgggctacaccaacagctgcctgaaccctgtgctgtatgccttcctggatgagaacttcaagcgctgcttccgggagttctgcatccccaccagcagcaacatcgagcagcagaacagcacccgcatccggcagaacacccgggaccaccccagcacagccaacacagtggacaggaccaaccaccagaagattgacctcttccagaagagcagcctgctgaactgtgagcacaccaagggctag

SEQ ID NO: 162746 - DNA, 960 bp, synthetic construct
  misc_feature 1..960: note = Description of Artificial Sequence: Synthetic coding sequence
  source 1..960: mol_type = other DNA
atgatgagggccaagagcatcagcaccaaggccggcaagcccagccgctacaccaagatgaagacagccaccaacatctacatcttcaacctggccctggctgatgccctggccaccagcaccctgcccttccagagcgtgaactacctgatgggcacctggcccttcggcaccatcctgtgcaagatcgtcatcagcattgactactacaacatgttcaccagcatcttcaccctgtgcaccatgtctgtggaccgctacatcgctgtgtgccaccctgtgaaggccctggacttccgcaccccaagaaatgccaagatcatcaacgtgtgcaactggatcctgagcagcgccatcggcctgcctgtgatgttcatggccaccaccaagtaccggcagggcagcattgactgcaccctgaccttcagccaccccacctggtactgggagaacctgctgaagatctgtgtgttcatctttgccttcatcatgcctgtgctgatcatcaccgtgtgctacggcctgatgatcctgcggctgaagtctgtgaggatgctgagcggcagcaaggagaaggacaggaacctgcggcgcatcaccaggatggtgctggtggtggtggccgtgttcatcgtgtgctggacccccatccacatctacgtgatcatcaaggccctggtgaccatccctgagaccaccttccagacagtgtcctggcacttctgcatcgccctgggctacaccaacagctgcctgaaccctgtgctgtatgccttcctggatgagaacttcaagcgctgcttccgggagttctgcatccccaccagcagcaacatcgagcagcagaacagcacccgcatccggcagaacacccgggaccaccccagcacagccaacacagtggacaggaccaaccaccagctggagaacctggaggccgagacagcccccctgccctag

SEQ ID NO: 162747 - DNA, 1209 bp, synthetic construct; identical to SEQ ID NO: 162739
  misc_feature 1..1209: note = Description of Artificial Sequence: Synthetic coding sequence
  source 1..1209: mol_type = other DNA

SEQ ID NO: 162748 - DNA, 492 bp, synthetic construct
  misc_feature 1..492: note = Description of Artificial Sequence: Synthetic coding sequence
  source 1..492: mol_type = other DNA
atggtgcaggccaggacaggcttctgcaagaagcagcaggagctgtggcagaggaggaaggaggccgctgaggccctgggcaccaggaaggtgtctgtgctgctggccaccagccacagcggggcccggcctgctgtgtccaccatggacagcagcgctgcccccaccaatgccagcaactgcacagatgccctggcctacagcagctgcagccctgcccccagccctggctcctgggtgaacctgagccacctggatggcaacctgagtgacccctgtggccccaacagaacagacctgggcggccgggacagcctgtgcccccccaccggcagccccagcatgatcacagccatcaccatcatggccctgtacagcatcgtgtgtgtggtgggcctgtttggaaacttcctggtgatgtatgtgattgtgcgctacaccaagatgaagacagccaccaacatctacatcttcaacctggccctggcctag

SEQ ID NO: 162749 - DNA, 903 bp, synthetic construct
  misc_feature 1..903: note = Description of Artificial Sequence: Synthetic coding sequence
  source 1..903: mol_type = other DNA
atgaagacagccaccaacatctacatcttcaacctggccctggctgatgccctggccaccagcaccctgcccttccagagcgtgaactacctgatgggcacctggcccttcggcaccatcctgtgcaagatcgtcatcagcattgactactacaacatgttcaccagcatcttcaccctgtgcaccatgtctgtggaccgctacatcgctgtgtgccaccctgtgaaggccctggacttccgcaccccaagaaatgccaagatcatcaacgtgtgcaactggatcctgagcagcgccatcggcctgcctgtgatgttcatggccaccaccaagtaccggcagggcagcattgactgcaccctgaccttcagccaccccacctggtactgggagaacctgctgaagatctgtgtgttcatctttgccttcatcatgcctgtgctgatcatcaccgtgtgctacggcctgatgatcctgcggctgaagtctgtgaggatgctgagcggcagcaaggagaaggacaggaacctgcggcgcatcaccaggatggtgctggtggtggtggccgtgttcatcgtgtgctggacccccatccacatctacgtgatcatcaaggccctggtgaccatccctgagaccaccttccagacagtgtcctggcacttctgcatcgccctgggctacaccaacagctgcctgaaccctgtgctgtatgccttcctggatgagaacttcaagcgctgcttccgggagttctgcatccccaccagcagcaacatcgagcagcagaacagcacccgcatccggcagaacacccgggaccaccccagcacagccaacacagtggacaggaccaaccaccagctggagaacctggaggccgagacagcccccctgccctag

SEQ ID NO: 162750 - DNA, 903 bp, synthetic construct; identical to SEQ ID NO: 162749
  misc_feature 1..903: note = Description of Artificial Sequence: Synthetic coding sequence
  source 1..903: mol_type = other DNA

SEQ ID NO: 162751 - DNA, 903 bp, synthetic construct; identical to SEQ ID NO: 162749
  misc_feature 1..903: note = Description of Artificial Sequence: Synthetic coding sequence
  source 1..903: mol_type = other DNA

SEQ ID NO: 162752 - DNA, 1209 bp, synthetic construct; identical to SEQ ID NO: 162739
  misc_feature 1..1209: note = Description of Artificial Sequence: Synthetic coding sequence
  source 1..1209: mol_type = other DNA

SEQ ID NO: 162753 - DNA, 561 bp, synthetic construct
  misc_feature 1..561: note = Description of Artificial Sequence: Synthetic coding sequence
  source 1..561: mol_type = other DNA
atggacagcagcgctgcccccaccaatgccagcaactgcacagatgccctggcctacagcagctgcagccctgcccccagccctggctcctgggtgaacctgagccacctggatggcaacctgagtgacccctgtggccccaacagaacagacctgggcggccgggacagcctgtgcccccccaccggcagccccagcatgatcacagccatcaccatcatggccctgtacagcatcgtgtgtgtggtgggcctgtttggaaacttcctggtgatgtatgtgattgtgcgcttccaccggctgtacaccaacatcctgagcagcaacctggtgctgggcaagccagctgaggacctgtgcttccacctgcggctgcactacgccagcgcccaccactacagagtgctgtggacagatgacctggccccccaggagtgcccccacgccctgtggctgcagaggaagggccaggagagcagcaaggaccaccaggatggagctgggggcggcggctgtgtgcaccggctgctggacagccacagccacctgcggcaccactag

SEQ ID NO: 162754 - DNA, 1170 bp, synthetic construct
  misc_feature 1..1170: note = Description of Artificial Sequence: Synthetic coding sequence
  source 1..1170: mol_type = other DNA
atggacagcagcgctgcccccaccaatgccagcaactgcacagatgccctggcctacagcagctgcagccctgcccccagccctggctcctgggtgaacctgagccacctggatggcaacctgagtgacccctgtggccccaacagaacagacctgggcggccgggacagcctgtgcccccccaccggcagccccagcatgatcacagccatcaccatcatggccctgtacagcatcgtgtgtgtggtgggcctgtttggaaacttcctggtgatgtatgtgattgtgcgctacaccaagatgaagacagccaccaacatctacatcttcaacctggccctggctgatgccctggccaccagcaccctgcccttccagagcgtgaactacctgatgggcacctggcccttcggcaccatcctgtgcaagatcgtcatcagcattgactactacaacatgttcaccagcatcttcaccctgtgcaccatgtctgtggaccgctacatcgctgtgtgccaccctgtgaaggccctggacttccgcaccccaagaaatgccaagatcatcaacgtgtgcaactggatcctgagcagcgccatcggcctgcctgtgatgttcatggccaccaccaagtaccggcagggcagcattgactgcaccctgaccttcagccaccccacctggtactgggagaacctgctgaagatctgtgtgttcatctttgccttcatcatgcctgtgctgatcatcaccgtgtgctacggcctgatgatcctgcggctgaagtctgtgaggatgctgagcggcagcaaggagaaggacaggaacctgcggcgcatcaccaggatggtgctggtggtggtggccgtgttcatcgtgtgctggacccccatccacatctacgtgatcatcaaggccctggtgaccatccctgagaccaccttccagacagtgtcctggcacttctgcatcgccctgggctacaccaacagctgcctgaaccctgtgctgtatgccttcctggatgagaacttcaagcgctgcttccgggagttctgcatccccaccagcagcaacatcgagcagcagaacagcacccgcatccggcagaacacccgggaccaccccagcacagccaacacagtggacaggaccaaccaccagagctag

SEQ ID NO: 162755 - DNA, 1095 bp, synthetic construct
  misc_feature 1..1095: note = Description of Artificial Sequence: Synthetic coding sequence
  source 1..1095: mol_type = other DNA
atggcccagcagtggagcctgcagaggctggccggccgccacccccaggacagctatgaggacagcacccagagcagcatcttcacctacaccaacagcaacagcacccggggcccctttgagggccccaactaccacatcgccccccgctgggtgtaccacctgacctctgtgtggatgatctttgtggtgacagcctctgtgttcaccaacggcctggtgctggccgccaccatgaagttcaagaagctgcggcaccccctgaactggatcctggtgaacctggccgtggccgacctggccgagaccgtgattgccagcaccatcagcatcgtgaaccaggtgtctggctactttgtgctgggccaccccatgtgtgtgctggagggctacacagtgtccctgtgtggcatcaccggcctgtggagcctggccatcatctcctgggagcgctggctggtggtgtgcaagccctttggaaatgtgcgctttgatgccaagctggccatcgtgggcatcgccttctcctggatctggagcgctgtgtggacagccccacccatcttcggctggagccgctactggccccacggcctgaagaccagctgtggcccagatgtgttttctggcagcagctacccaggagtgcagagctacatgattgtgctgatggtgacctgctgcatcatccccctggccatcatcatgctgtgctacctgcaggtgtggctggccatccgggctgtggccaagcagcagaaggagagcgagagcacccagaaggccgagaaggaggtgaccaggatggtggtggtgatgatctttgcctactgtgtgtgctggggcccctacaccttctttgcctgctttgctgctgccaaccctggctacgccttccaccccctgatggccgccctgcctgcctactttgccaagagcgccaccatctacaaccctgtgatctacgtgttcatgaaccggcagttcaggaactgcatcctgcagctgtttgggaagaaggtggatgatggcagcgagctgagcagcgccagcaagacagaggtgtcctctgtgtcctctgtgtccccagcctag

SEQ ID NO: 162756 - DNA, 1095 bp, synthetic construct
  misc_feature 1..1095: note = Description of Artificial Sequence: Synthetic coding sequence
  source 1..1095: mol_type = other DNA
atggcccagcagtggagcctgcagaggctggccggccgccacccccaggacagctatgaggacagcacccagagcagcatcttcacctacaccaacagcaacagcacccggggcccctttgagggccccaactaccacatcgccccccgctgggtgtaccacctgacctctgtgtggatgatctttgtggtgattgcctctgtgttcaccaacggcctggtgctggccgccaccatgaagttcaagaagctgcggcaccccctgaactggatcctggtgaacctggccgtggccgacctggccgagaccgtgattgccagcaccatctctgtggtgaaccaggtgtatggctactttgtgctgggccaccccatgtgtgtgctggagggctacacagtgtccctgtgtggcatcaccggcctgtggagcctggccatcatctcctgggagcgctggatggtggtgtgcaagccctttggaaatgtgcgctttgatgccaagctggccatcgtgggcatcgccttctcctggatctgggccgctgtgtggacagccccacccatcttcggctggagccgctactggccccacggcctgaagaccagctgtggcccagatgtgttttctggcagcagctacccaggagtgcagagctacatgattgtgctgatggtgacctgctgcatcacccccctgagcatcatcgtgctgtgctacctgcaggtgtggctggccatccgggctgtggccaagcagcagaaggagagcgagagcacccagaaggccgagaaggaggtgaccaggatggtggtggtgatggtgctggccttctgcttctgctggggcccctatgccttctttgcctgctttgctgctgccaaccctggctaccccttccaccccctgatggccgccctgcctgccttctttgccaagagcgccaccatctacaaccctgtgatctacgtgttcatgaaccggcagttcaggaactgcatcctgcagctgtttgggaagaaggtggatgatggcagcgagctgagcagcgccagcaagacagaggtgtcctctgtgtcctctgtgtccccagcctag

SEQ ID NO: 162757 - DNA, 1047 bp, synthetic construct
  misc_feature 1..1047: note = Description of Artificial Sequence: Synthetic coding sequence
  source 1..1047: mol_type = other DNA
atgaggaagatgtctgaggaggagttctacctgttcaagaacatcagctctgtgggcccctgggatggcccccagtaccacatcgcccctgtgtgggccttctacctgcaggccgccttcatgggcaccgtcttcctgattggcttccccctgaatgccatggtgctggtggccaccctgcgctacaagaagctgcggcagcccctgaactacatcctggtgaatgtgtcctttggaggcttcctgctgtgcatcttctctgtgtttcctgtgtttgtggccagctgcaatggctactttgtgtttggaagacatgtgtgtgccctggagggcttcctgggcaccgtggccggcctggtgacaggctggagcctggccttcctggcctttgagcgctacatcgtcatctgcaagcccttcggcaacttccgcttcagcagcaagcacgccctgactgtggtgctggccacctggaccatcggcatcggcgtgtccatcccccccttcttcggctggagccgcttcatccctgagggcctgcagtgcagctgtggccctgactggtacacagtgggcaccaagtacagaagtgagagctacacctggttcctgttcatcttctgcttcatcgtgcccctgagcctcatctgcttctcctacacccagctgctgcgggccctgaaggctgtggccgcccagcagcaggagagcgccaccacccagaaggccgagcgggaggtgtccaggatggtggtggtgatggtgggcagcttctgtgtgtgctacgtgccctatgctgcctttgccatgtacatggtgaacaacagaaaccacggcctggacctgcggctggtgaccatccccagcttcttcagcaagagcgcctgcatctacaaccccatcatctactgcttcatgaacaagcagttccaggcctgcatcatgaagatggtgtgtgggaaggccatgacagatgaaagtgacacctgcagcagccagaagacagaggtgtccacagtgagcagcacccaggtgggccccaactag

SEQ ID NO: 162758 - DNA, 972 bp, synthetic construct
  misc_feature 1..972: note = Description of Artificial Sequence: Synthetic coding sequence
  source 1..972: mol_type = other DNA
atgtacagcggcaacagaagtggcggccacggctactgggatggcggcggcgctgctggagctgagggccctgccccagctggcaccctgagccctgcccccctcttcagccctggcacctatgagcggctggccctgctgctgggcagcatcggcctgctgggcgtgggcaacaacctgctggtgctggtgctgtactacaagttccagaggctgcggacccccacccacctgctgctggtgaacatcagcctgagtgacctgctggtgtccctgtttggagtgaccttcacctttgtgtcctgcctgagaaatggctgggtgtgggacacagtgggctgtgtgtgggatggcttcagcggcagcctgtttggctggatcagccagctgcaggccgccacccgggaggcccgggcctccatgggccctgtgcagcagggcaccatctgcatgcagctgcgctgtgtggaggacctgcagaccatccaggtgatcaagatcctgaagtatgagaagaagctggccaagatgtgcttcctgatgatcttcaccttcctggtgtgctggatgccctacatcgtcatctgcttcctggtggtgaatggacatggccacctggtgacccccaccatcagcatcgtgtcctacctgtttgccaagagcaacacagtgtacaaccctgtgatctacgtgttcatgatcaggaagttccgccgcagcctgctgcagctgctgtgcctgcggctgctgcgctgccagaggcctgccaaggacctgcctgctgctggcagcgagatgcagatccggcccatcgtgatgagccagaaggatggagaccggcccaagaagaaggtgaccttcaacagcagcagcatcatcttcatcatcaccagtgatgagagcctgtctgtggatgacagcgacaagaccaacggcagcaaggtggatgtgatccaggtgcggcccctgtag

SEQ ID NO: 162759 - DNA, 1209 bp, synthetic construct
  misc_feature 1..1209: note = Description of Artificial Sequence: Synthetic coding sequence
  source 1..1209: mol_type = other DNA
atgtacagcggcaacagaagtggcggccacggctactgggatggcggcggcgctgctggagctgagggccctgccccagctggcaccctgagccctgcccccctcttcagccctggcacctatgagcggctggccctgctgctgggcagcatcggcctgctgggcgtgggcaacaacctgctggtgctggtgctgtactacaagttccagaggctgcggacccccacccacctgctgctggtgaacatcagcctgagtgacctgctggtgtccctgtttggagtgaccttcacctttgtgtcctgcctgagaaatggctgggtgtgggacacagtgggctgtgtgtgggatggcttcagcggcagcctgtttggcatcgtgtccatcgccaccctgactgtgctggcctatgagcgctacatccgggtggtgcacgcccgggtcatcaacttctcctgggcctggagggccatcacctacatctggctgtacagcctggcctgggccggggcccccctgctgggctggaaccgctacatcctggatgtgcacggcctgggctgcaccgtggactggaagagcaaggatgccaatgacagcagctttgtgctcttcctgttcctgggctgcctggtggtgcccctgggcgtcatcgcccactgctacggccacatcctgtacagcatccgcatgctgcgctgtgtggaggacctgcagaccatccaggtgatcaagatcctgaagtatgagaagaagctggccaagatgtgcttcctgatgatcttcaccttcctggtgtgctggatgccctacatcgtcatctgcttcctggtggtgaatggccacggccacctggtgacccccaccatcagcatcgtgtcctacctgtttgccaagagcaacacagtgtacaaccctgtgatctacgtgttcatgatcaggaagttcagaagaagcctgctgcagctgctgtgcctgcggctgctgcgctgccagaggcctgccaaggacctgcctgctgctggcagcgagatgcagatccggcccatcgtgatgagccagaaggatggagaccggcccaagaagaaggtgaccttcaacagcagcagcatcatcttcatcatcaccagtgatgagagcctgtctgtggatgacagcgacaagaccaacggcagcaaggtggatgtgatccaggtgcggcccctgtag

SEQ ID NO: 162760 - DNA, 2886 bp, synthetic construct
  misc_feature 1..2886: note = Description of Artificial Sequence: Synthetic coding sequence
  source 1..2886: mol_type = other DNA
atgtggaggctgcggcgggctgctgtggcctgtgaggtgtgccagagcctggtgaagcacagcagcggcatcaagggcagcctgcccctgcagaagctgcacctggtgagccgcagcatctaccacagccaccaccccaccctgaagctgcagaggccccagctgcggaccagcttccagcagttcagcagcctgaccaacctgcccctgaggaagctgaagttcagccccatcaagtatggctaccagcccaggaggaacttctggccagcccggctggccacccggctgctgaagctgcgctacctgatcctgggcagcgctgtgggcggcggctacacagccaagaagacctttgaccagtggaaggacatgatcccagacctgtctgagtacaagtggatcgtgcctgacatcgtgtgggagattgatgagtacatcgactttggcagccctgaggagacagccttccgggccacagaccggggcagcgagagtgacaagcacttcaggaagggcctgctgggggagctgatcctgctgcagcagcagatccaggagcacgaggaggaggccaggagagctgctggccagtacagcaccagctatgcccagcagaagaggaaggtgtctgacaaggagaagattgaccagctgcaggaggagctgctgcacacccagctgaagtaccagaggatcctggagcggctggagaaggagaacaaggagctgaggaagctggtgctgcagaaggatgacaagggcatccaccacaggaagctgaagaagagcctgattgacatgtacagcgaggtgctggatgtgctgagtgactatgatgccagctacaacacccaggaccacctgccccgggtggtggtggtgggggaccagagcgctgggaagacctctgtgctggagatgattgcccaggcccgcatcttcccccggggcagcggggagatgatgaccaggagccctgtgaaggtgaccctgtctgagggcccccaccacgtggccctcttcaaggacagcagccgggagtttgacctgaccaaggaggaggacctggccgccctgcggcatgaaattgagctgaggatgaggaagaatgtgaaggagggctgcaccgtgtccccagagaccatcagcctgaatgtgaagggccctggcctgcagaggatggtgctggtggacctgcccggggtcatcaacacagtgaccagcggcatggccccagacaccaaggagaccatcttcagcatcagcaaggcctacatgcagaaccccaatgccatcatcctgtgcatccaggacggctctgtggatgctgagaggagcatcgtgacagacctggtgtcccagatggacccccatggaagaaggaccatctttgtgctgaccaaggtggacctggccgagaagaatgtggccagccccagccgcatccagcagatcatcgagggcaagctgttccccatgaaggccctgggctactttgctgtggtgacaggcaagggcaacagcagcgagagcattgaggccatccgggagtatgaggaggagttcttccagaacagcaagctgctgaagacctccatgctgaaggcccaccaggtgaccaccaggaacctgagcctggccgtgtctgactgcttctggaagatggtgcgggagagcgtggagcagcaggccgacagcttcaaggccacccgcttcaacctggagacagagtggaagaacaactacccccggctgcgggagctggacagaaatgagctgtttgagaaggccaagaatgagatcctggatgaggtgatcagcctgagccaggtgacccccaagcactgggaggagatcctgcagcagagcctgtgggagcgggtgtccacccacgtgattgagaacatctacctgcctgctgcccagaccatgaacagcggcaccttcaacaccaccgtggacatcaagctgaagcagtggacagacaagcagctgcccaacaaggctgtggaggtggcctgggagaccctgcaggaggagttcagccgcttcatgacagagcccaagggcaaggagcatgatgacatctttgacaagctgaaggaggccgtgaaggaggagagcatcaagaggcacaagtggaatgactttgctgaggacagcctgcgggtcatccagcacaatgccctggaggacaggagcatcagtgacaagcagcagtgggatgctgccatctacttcatggaggaggccctgcaggcccggctgaaggacacagaaaatgccatcgagaacatggtgggccctgactggaagaagcgctggctgtactggaagaacagaacccaggagcagtgtgtgcacaatgagaccaagaatgagctggagaagatgctgaagtgcaatgaggagcacccagcctacctggccagtgatgagatcaccaccgtgaggaagaacctggagagccggggcgtggaggtggaccccagcctcatcaaggacacctggcaccaggtgtacagaagacacttcctgaagacagccctgaaccactgcaacctgtgccggcggggcttctactactaccagaggcactttgtggacagcgagctggagtgcaatgatgtggtgctcttctggaggatccagaggatgctggccatcacagccaacaccctgcggcagcagctgaccaacacagaggtgcggcggctggagaagaatgtgaaggaggtgctggaggactttgctgaagatggagagaagaagatcaagctgctgaccgggaagagggtgcagctggccgaggacctgaagaaggtgcgggagatccaggagaagctggatgccttcatcgaggccctgcaccaggagaagtag

SEQ ID NO: 162761 - DNA, 3048 bp, synthetic construct
  misc_feature 1..3048: note = Description of Artificial Sequence: Synthetic coding sequence
  source 1..3048: mol_type = other DNA
atgtggaggctgcggcgggctgctgtggcctgtgaggtgtgccagagcctggtgaagcacagcagcggcatcaagggcagcctgcccctgcagaagctgcacctggtgagccgcagcatctaccacagccaccaccccaccctgaagctgcagaggccccagctgcggaccagcttccagcagttcagcagcctgaccaacctgcccctgaggaagctgaagttcagccccatcaagtatggctaccagcccaggaggaacttctggccagcccggctggccacccggctgctgaagctgcgctacctgatcctgggcagcgctgtgggcggcggctacacagccaagaagacctttgaccagtggaaggacatgatcccagacctgtctgagtacaagtggatcgtgcctgacatcgtgtgggagattgatgagtacatcgactttgagaagatcaggaaggccctgcccagcagcgaggacctggtgaagctggccccagactttgacaagatcgtggagagcctgagcctgctgaaggacttcttcaccagcggccacaagctggtgtctgaggtgattggagccagtgacctgctgctgctgctgggcagccctgaggagacagccttccgggccacagaccggggcagcgagagtgacaagcacttcaggaagggcctgctgggggagctgatcctgctgcagcagcagatccaggagcacgaggaggaggccaggagagctgctggccagtacagcaccagctatgcccagcagaagaggaaggtgtctgacaaggagaagattgaccagctgcaggaggagctgctgcacacccagctgaagtaccagaggatcctggagcggctggagaaggagaacaaggagctgaggaagctggtgctgcagaaggatgacaagggcatccaccacaggaagctgaagaagagcctgattgacatgtacagcgaggtgctggatgtgctgagtgactatgatgccagctacaacacccaggaccacctgccccgggtggtggtggtgggggaccagagcgctgggaagacctctgtgctggagatgattgcccaggcccgcatcttcccccggggcagcggggagatgatgaccaggagccctgtgaaggtgaccctgtctgagggcccccaccacgtggccctcttcaaggacagcagccgggagtttgacctgaccaaggaggaggacctggccgccctgcggcatgaaattgagctgaggatgaggaagaatgtgaaggagggctgcaccgtgtccccagagaccatcagcctgaatgtgaagggccctggcctgcagaggatggtgctggtggacctgcccggggtcatcaacacagtgaccagcggcatggccccagacaccaaggagaccatcttcagcatcagcaaggcctacatgcagaaccccaatgccatcatcctgtgcatccaggacggctctgtggatgctgagaggagcatcgtgacagacctggtgtcccagatggacccccatggaagaaggaccatctttgtgctgaccaaggtggacctggccgagaagaatgtggccagccccagccgcatccagcagatcatcgagggcaagctgttccccatgaaggccctgggctactttgctgtggtgacaggcaagggcaacagcagcgagagcattgaggccatccgggagtatgaggaggagttcttccagaacagcaagctgctgaagacctccatgctgaaggcccaccaggtgaccaccaggaacctgagcctggccgtgtctgactgcttctggaagatggtgcgggagagcgtggagcagcaggccgacagcttcaaggccacccgcttcaacctggagacagagtggaagaacaactacccccggctgcgggagctggacagaaatgagctgtttgagaaggccaagaatgagatcctggatgaggtgatcagcctgagccaggtgacccccaagcactgggaggagatcctgcagcagagcctgtgggagcgggtgtccacccacgtgattgagaacatctacctgcctgctgcccagaccatgaacagcggcaccttcaacaccaccgtggacatcaagctgaagcagtggacagacaagcagctgcccaacaaggctgtggaggtggcctgggagaccctgcaggaggagttcagccgcttcatgacagagcccaagggcaaggagcatgatgacatctttgacaagctgaaggaggccgtgaaggaggagagcatcaagaggcacaagtggaatgactttgctgaggacagcctgcgggtcatccagcacaatgccctggaggacaggagcatcagtgacaagcagcagtgggatgctgccatctacttcatggaggaggccctgcaggcccggctgaaggacacagaaaatgccatcgagaacatggtgggccctgactggaagaagcgctggctgtactggaagaacagaacccaggagcagtgtgtgcacaatgagaccaagaatgagctggagaagatgctgaagtgcaatgaggagcacccagcctacctggccagtgatgagatcaccaccgtgaggaagaacctggagagccggggcgtggaggtggaccccagcctcatcaaggacacctggcaccaggtgtacagaagacacttcctgaagacagccctgaaccactgcaacctgtgccggcggggcttctactactaccagaggcactttgtggacagcgagctggagtgcaatgatgtggtgctcttctggaggatccagaggatgctggccatcacagccaacaccctgcggcagcagctgaccaacacagaggtgcggcggctggagaagaatgtgaaggaggtgctggaggactttgctgaagatggagagaagaagatcaagctgctgaccgggaagagggtgcagctggccgaggacctgaagaaggtgcgggagatccaggagaagctggatgccttcatcgaggccctgcaccaggagaagtag

SEQ ID NO: 162762 - DNA, 2940 bp, synthetic construct
  misc_feature 1..2940: note = Description of Artificial Sequence: Synthetic coding sequence
  source 1..2940: mol_type = other DNA
atgtggaggctgcggcgggctgctgtggcctgtgaggtgtgccagagcctggtgaagcacagcagcggcatcaagggcagcctgcccctgcagaagctgcacctggtgagccgcagcatctaccacagccaccaccccaccctgaagctgcagaggccccagctgcggaccagcttccagcagttcagcagcctgaccaacctgcccctgaggaagctgaagttcagccccatcaagtatggctaccagcccaggaggaacttctggccagcccggctggccacccggctgctgaagctgcgctacctgatcctgggcagcgctgtgggcggcggctacacagccaagaagacctttgaccagtggaaggacatgatcccagacctgtctgagtacaagtggatcgtgcctgacatcgtgtgggagattgatgagtacatcgactttggccacaagctggtgtctgaggtgattggagccagtgacctgctgctgctgctgggcagccctgaggagacagccttccgggccacagaccggggcagcgagagtgacaagcacttcaggaagggcctgctgggggagctgatcctgctgcagcagcagatccaggagcacgaggaggaggccaggagagctgctggccagtacagcaccagctatgcccagcagaagaggaaggtgtctgacaaggagaagattgaccagctgcaggaggagctgctgcacacccagctgaagtaccagaggatcctggagcggctggagaaggagaacaaggagctgaggaagctggtgctgcagaaggatgacaagggcatccaccacaggaagctgaagaagagcctgattgacatgtacagcgaggtgctggatgtgctgagtgactatgatgccagctacaacacccaggaccacctgccccgggtggtggtggtgggggaccagagcgctgggaagacctctgtgctggagatgattgcccaggcccgcatcttcccccggggcagcggggagatgatgaccaggagccctgtgaaggtgaccctgtctgagggcccccaccacgtggccctcttcaaggacagcagccgggagtttgacctgaccaaggaggaggacctggccgccctgcggcatgaaattgagctgaggatgaggaagaatgtgaaggagggctgcaccgtgtccccagagaccatcagcctgaatgtgaagggccctggcctgcagaggatggtgctggtggacctgcccggggtcatcaacacagtgaccagcggcatggccccagacaccaaggagaccatcttcagcatcagcaaggcctacatgcagaaccccaatgccatcatcctgtgcatccaggacggctctgtggatgctgagaggagcatcgtgacagacctggtgtcccagatggacccccatggaagaaggaccatctttgtgctgaccaaggtggacctggccgagaagaatgtggccagccccagccgcatccagcagatcatcgagggcaagctgttccccatgaaggccctgggctactttgctgtggtgacaggcaagggcaacagcagcgagagcattgaggccatccgggagtatgaggaggagttcttccagaacagcaagctgctgaagacctccatgctgaaggcccaccaggtgaccaccaggaacctgagcctggccgtgtctgactgcttctggaagatggtgcgggagagcgtggagcagcaggccgacagcttcaaggccacccgcttcaacctggagacagagtggaagaacaactacccccggctgcgggagctggacagaaatgagctgtttgagaaggccaagaatgagatcctggatgaggtgatcagcctgagccaggtgacccccaagcactgggaggagatcctgcagcagagcctgtgggagcgggtgtccacccacgtgattgagaacatctacctgcctgctgcccagaccatgaacagcggcaccttcaacaccaccgtggacatcaagctgaagcagtggacagacaagcagctgcccaacaaggctgtggaggtggcctgggagaccctgcaggaggagttcagccgcttcatgacagagcccaagggcaaggagcatgatgacatctttgacaagctgaaggaggccgtgaaggaggagagcatcaagaggcacaagtggaatgactttgctgaggacagcctgcgggtcatccagcacaatgccctggaggacaggagcatcagtgacaagcagcagtgggatgctgccatctacttcatggaggaggccctgcaggcccggctgaaggacacagaaaatgccatcgagaacatggtgggccctgactggaagaagcgctggctgtactggaagaacagaacccaggagcagtgtgtgcacaatgagaccaagaatgagctggagaagatgctgaagtgcaatgaggagcacccagcctacctggccagtgatgagatcaccaccgtgaggaagaacctggagagccggggcgtggaggtggaccccagcctcatcaaggacacctggcaccaggtgtacagaagacacttcctgaagacagccctgaaccactgcaacctgtgccggcggggcttctactactaccagaggcactttgtggacagcgagctggagtgcaatgatgtggtgctcttctggaggatccagaggatgctggccatcacagccaacaccctgcggcagcagctgaccaacacagaggtgcggcggctggagaagaatgtgaaggaggtgctggaggactttgctgaagatggagagaagaagatcaagctgctgaccgggaagagggtgcagctggccgaggacctgaagaaggtgcgggagatccaggagaagctggatgccttcatcgaggccctgcaccaggagaagtag

SEQ ID NO: 162763 - DNA, 2937 bp, synthetic construct
  misc_feature 1..2937: note = Description of Artificial Sequence: Synthetic coding sequence
  source 1..2937: mol_type = other DNA
atgtggaggctgcggcgggctgctgtggcctgtgaggtgtgccagagcctggtgaagcacagcagcggcatcaagggcagcctgcccctgcagaagctgcacctggtgagccgcagcatctaccacagccaccaccccaccctgaagctgcagaggccccagctgcggaccagcttccagcagttcagcagcctgaccaacctgcccctgaggaagctgaagttcagccccatcaagtatggctaccagcccaggaggaacttctggccagcccggctggccacccggctgctgaagctgcgctacctgatcctgggcagcgctgtgggcggcggctacacagccaagaagacctttgaccagtggaaggacatgatcccagacctgtctgagtacaagtggatcgtgcctgacatcgtgtgggagattgatgagtacatcgactttgagaagatcaggaaggccctgcccagcagcgaggacctggtgaagctggccccagactttgacaagatcgtggagagcctgagcctgctgaaggacttcttcaccagcggccacaagctggtgtctgaggtgattggagccagtgacctgctgctgctgctgggcagccctgaggagacagccttccgggccacagaccggggcagcgagagtgacaagcacttcaggaaggtgtctgacaaggagaagattgaccagctgcaggaggagctgctgcacacccagctgaagtaccagaggatcctggagcggctggagaaggagaacaaggagctgaggaagctggtgctgcagaaggatgacaagggcatccaccacaggaagctgaagaagagcctgattgacatgtacagcgaggtgctggatgtgctgagtgactatgatgccagctacaacacccaggaccacctgccccgggtggtggtggtgggggaccagagcgctgggaagacctctgtgctggagatgattgcccaggcccgcatcttcccccggggcagcggggagatgatgaccaggagccctgtgaaggtgaccctgtctgagggcccccaccacgtggccctcttcaaggacagcagccgggagtttgacctgaccaaggaggaggacctggccgccctgcggcatgaaattgagctgaggatgaggaagaatgtgaaggagggctgcaccgtgtccccagagaccatcagcctgaatgtgaagggccctggcctgcagaggatggtgctggtggacctgcccggggtcatcaacacagtgaccagcggcatggccccagacaccaaggagaccatcttcagcatcagcaaggcctacatgcagaaccccaatgccatcatcctgtgcatccaggacggctctgtggatgctgagaggagcatcgtgacagacctggtgtcccagatggacccccacggccgccgcaccatctttgtgctgaccaaggtggacctggccgagaagaatgtggccagccccagccgcatccagcagatcatcgagggcaagctgttccccatgaaggccctgggctactttgctgtggtgactggaaaaggaaacagcagcgagagcattgaggccatccgggagtatgaggaggagttcttccagaacagcaagctgctgaagacctccatgctgaaggcccaccaggtgaccaccaggaacctgagcctggccgtgtctgactgcttctggaagatggtgcgggagagcgtggagcagcaggccgacagcttcaaggccacccgcttcaacctggagacagagtggaagaacaactacccccggctgcgggagctggacagaaatgagctgtttgagaaggccaagaatgagatcctggatgaagtcatcagcctgagccaggtgacccccaagcactgggaggagatcctgcagcagagcctgtgggagcgggtgtccacccacgtgattgagaacatctacctgcctgctgcccagaccatgaacagcggcaccttcaacaccaccgtggacatcaagctgaagcagtggacagacaagcagctgcccaacaaggctgtggaggtggcctgggagaccctgcaggaggagttcagccgcttcatgacagagcccaagggcaaggagcatgatgacatctttgacaagctgaaggaggccgtgaaggaggagagcatcaagaggcacaagtggaatgactttgctgaggacagcctgcgggtcatccagcacaatgccctggaggacaggagcatcagtgacaagcagcagtgggatgctgccatctacttcatggaggaggccctgcaggcccggctgaaggacacagaaaatgccatcgagaacatggtgggccctgactggaagaagcgctggctgtactggaagaacagaacccaggagcagtgtgtgcacaatgagaccaagaatgagctggagaagatgctgaagtgcaatgaggagcacccagcctacctggccagtgatgagatcaccaccgtgaggaagaacctggagagcagaggagtggaggtggaccccagcctcatcaaggacacctggcaccaggtgtaccgccgccacttcctgaagacagccctgaaccactgcaacctgtgcagaagaggcttctactactaccagaggcactttgtggacagcgagctggagtgcaatgatgtggtgctcttctggaggatccagaggatgctggccatcacagccaacaccctgcggcagcagctgaccaacacagaggtgcggcggctggagaagaatgtgaaggaggtgctggaggactttgctgaagatggagagaagaagatcaagctgctgaccgggaagagggtgcagctggccgaggacctgaagaaggtgcgggagatccaggagaagctggatgccttcatcgaggccctgcaccaggagaagtag

SEQ ID NO: 162764 - DNA, 2994 bp, synthetic construct
  misc_feature 1..2994: note = Description of Artificial Sequence: Synthetic coding sequence
  source 1..2994: mol_type = other DNA
atgtggaggctgcggcgggctgctgtggcctgtgaggtgtgccagagcctggtgaagcacagcagcggcatcaagggcagcctgcccctgcagaagctgcacctggtgagccgcagcatctaccacagccaccaccccaccctgaagctgcagaggccccagctgcggaccagcttccagcagttcagcagcctgaccaacctgcccctgaggaagctgaagttcagccccatcaagtatggctaccagcccaggaggaacttctggccagcccggctggccacccggctgctgaagctgcgctacctgatcctgggcagcgctgtgggcggcggctacacagccaagaagacctttgaccagtggaaggacatgatcccagacctgtctgagtacaagtggatcgtgcctgacatcgtgtgggagattgatgagtacatcgactttgagaagatcaggaaggccctgcccagcagcgaggacctggtgaagctggccccagactttgacaagatcgtggagagcctgagcctgctgaaggacttcttcaccagcggcagccctgaggagacagccttccgggccacagaccggggcagcgagagtgacaagcacttcaggaagggcctgctgggggagctgatcctgctgcagcagcagatccaggagcacgaggaggaggccaggagagctgctggccagtacagcaccagctatgcccagcagaagaggaaggtgtctgacaaggagaagattgaccagctgcaggaggagctgctgcacacccagctgaagtaccagaggatcctggagcggctggagaaggagaacaaggagctgaggaagctggtgctgcagaaggatgacaagggcatccaccacaggaagctgaagaagagcctgattgacatgtacagcgaggtgctggatgtgctgagtgactatgatgccagctacaacacccaggaccacctgccccgggtggtggtggtgggggaccagagcgctgggaagacctctgtgctggagatgattgcccaggcccgcatcttcccccggggcagcggggagatgatgaccaggagccctgtgaaggtgaccctgtctgagggcccccaccacgtggccctcttcaaggacagcagccgggagtttgacctgaccaaggaggaggacctggccgccctgcggcatgaaattgagctgaggatgaggaagaatgtgaaggagggctgcaccgtgtccccagagaccatcagcctgaatgtgaagggccctggcctgcagaggatggtgctggtggacctgcccggggtcatcaacacagtgaccagcggcatggccccagacaccaaggagaccatcttcagcatcagcaaggcctacatgcagaaccccaatgccatcatcctgtgcatccaggacggctctgtggatgctgagaggagcatcgtgacagacctggtgtcccagatggacccccatggaagaaggaccatctttgtgctgaccaaggtggacctggccgagaagaatgtggccagccccagccgcatccagcagatcatcgagggcaagctgttccccatgaaggccctgggctactttgctgtggtgacaggcaagggcaacagcagcgagagcattgaggccatccgggagtatgaggaggagttcttccagaacagcaagctgctgaagacctccatgctgaaggcccaccaggtgaccaccaggaacctgagcctggccgtgtctgactgcttctggaagatggtgcgggagagcgtggagcagcaggccgacagcttcaaggccacccgcttcaacctggagacagagtggaagaacaactacccccggctgcgggagctggacagaaatgagctgtttgagaaggccaagaatgagatcctggatgaggtgatcagcctgagccaggtgacccccaagcactgggaggagatcctgcagcagagcctgtgggagcgggtgtccacccacgtgattgagaacatctacctgcctgctgcccagaccatgaacagcggcaccttcaacaccaccgtggacatcaagctgaagcagtggacagacaagcagctgcccaacaaggctgtggaggtggcctgggagaccctgcaggaggagttcagccgcttcatgacagagcccaagggcaaggagcatgatgacatctttgacaagctgaaggaggccgtgaaggaggagagcatcaagaggcacaagtggaatgactttgctgaggacagcctgcgggtcatccagcacaatgccctggaggacaggagcatcagtgacaagcagcagtgggatgctgccatctacttcatggaggaggccctgcaggcccggctgaaggacacagaaaatgccatcgagaacatggtgggccctgactggaagaagcgctggctgtactggaagaacagaacccaggagcagtgtgtgcacaatgagaccaagaatgagctggagaagatgctgaagtgcaatgaggagcacccagcctacctggccagtgatgagatcaccaccgtgaggaagaacctggagagccggggcgtggaggtggaccccagcctcatcaaggacacctggcaccaggtgtacagaagacacttcctgaagacagccctgaaccactgcaacctgtgccggcggggcttctactactaccagaggcactttgtggacagcgagctggagtgcaatgatgtggtgctcttctggaggatccagaggatgctggccatcacagccaacaccctgcggcagcagctgaccaacacagaggtgcggcggctggagaagaatgtgaaggaggtgctggaggactttgctgaagatggagagaagaagatcaagctgctgaccgggaagagggtgcagctggccgaggacctgaagaaggtgcgggagatccaggagaagctggatgccttcatcgaggccctgcaccaggagaagtag

SEQ ID NO: 162765 - DNA, 501 bp, synthetic construct
  misc_feature 1..501: note = Description of Artificial Sequence: Synthetic coding sequence
  source 1..501: mol_type = other DNA
atgtggaggctgcggcgggctgctgtggcctgtgaggtgtgccagagcctggtgaagcacagcagcggcatcaagggcagcctgcccctgcagaagctgcacctggtgagccgcagcatctaccacagccaccaccccaccctgaagctgcagaggccccagctgcggaccagcttccagcagttcagcagcctgaccaacctgcccctgaggaagctgaagttcagccccatcaagtatggctaccagcccaggaggaacttctggccagcccggctggccacccggctgctgaagctgcgctacctgatcctgggcagcgctgtgggcggcggctacacagccaagaagacctttgaccagtggaaggacatgatcccagacctgtctgagtacaagtggatcgtgcctgacatcgtgtgggagattgatgagtacatcgactttggcagccctgaggagacagccttccgggccacagaccggggcagcgagagctag

SEQ ID NO: 162766 - DNA, 2883 bp, synthetic construct
  misc_feature 1..2883: note = Description of Artificial Sequence: Synthetic coding sequence
  source 1..2883: mol_type = other DNA
atgtggaggctgcggcgggctgctgtggcctgtgaggtgtgccagagcctggtgaagcacagcagcggcatcaagggcagcctgcccctgcagaagctgcacctggtgagccgcagcatctaccacagccaccaccccaccctgaagctgcagaggccccagctgcggaccagcttccagcagttcagcagcctgaccaacctgcccctgaggaagctgaagttcagccccatcaagtatggctaccagcccaggaggaacttctggccagcccggctggccacccggctgctgaagctgcgctacctgatcctgggcagcgctgtgggcggcggctacacagccaagaagacctttgaccagtggaaggacatgatcccagacctgtctgagtacaagtggatcgtgcctgacatcgtgtgggagattgatgagtacatcgactttgagaagatcaggaaggccctgcccagcagcgaggacctggtgaagctggccccagactttgacaagatcgtggagagcctgagcctgctgaaggacttcttcaccagcggcagccctgaggagacagccttccgggccacagaccggggcagcgagagtgacaagcacttcaggaaggtgtctgacaaggagaagattgaccagctgcaggaggagctgctgcacacccagctgaagtaccagaggatcctggagcggctggagaaggagaacaaggagctgaggaagctggtgctgcagaaggatgacaagggcatccaccacaggaagctgaagaagagcctgattgacatgtacagcgaggtgctggatgtgctgagtgactatgatgccagctacaacacccaggaccacctgccccgggtggtggtggtgggggaccagagcgctgggaagacctctgtgctggagatgattgcccaggcccgcatcttcccccggggcagcggggagatgatgaccaggagccctgtgaaggtgaccctgtctgagggcccccaccacgtggccctcttcaaggacagcagccgggagtttgacctgaccaaggaggaggacctggccgccctgcggcatgaaattgagctgaggatgaggaagaatgtgaaggagggctgcaccgtgtccccagagaccatcagcctgaatgtgaagggccctggcctgcagaggatggtgctggtggacctgcccggggtcatcaacacagtgaccagcggcatggccccagacaccaaggagaccatcttcagcatcagcaaggcctacatgcagaaccccaatgccatcatcctgtgcatccaggacggctctgtggatgctgagaggagcatcgtgacagacctggtgtcccagatggacccccacggccgccgcaccatctttgtgctgaccaaggtggacctggccgagaagaatgtggccagccccagccgcatccagcagatcatcgagggcaagctgttccccatgaaggccctgggctactttgctgtggtgactggaaaaggaaacagcagcgagagcattgaggccatccgggagtatgaggaggagttcttccagaacagcaagctgctgaagacctccatgctgaaggcccaccaggtgaccaccaggaacctgagcctggccgtgtctgactgcttctggaagatggtgcgggagagcgtggagcagcaggccgacagcttcaaggccacccgcttcaacctggagacagagtggaagaacaactacccccggctgcgggagctggacagaaatgagctgtttgagaaggccaagaatgagatcctggatgaagtcatcagcctgagccaggtgacccccaagcactgggaggagatcctgcagcagagcctgtgggagcgggtgtccacccacgtgattgagaacatctacctgcctgctgcccagaccatgaacagcggcaccttcaacaccaccgtggacatcaagctgaagcagtggacagacaagcagctgcccaacaaggctgtggaggtggcctgggagaccctgcaggaggagttcagccgcttcatgacagagcccaagggcaaggagcatgatgacatctttgacaagctgaaggaggccgtgaaggaggagagcatcaagaggcacaagtggaatgactttgctgaggacagcctgcgggtcatccagcacaatgccctggaggacaggagcatcagtgacaagcagcagtgggatgctgccatctacttcatggaggaggccctgcaggcccggctgaaggacacagaaaatgccatcgagaacatggtgggccctgactggaagaagcgctggctgtactggaagaacagaacccaggagcagtgtgtgcacaatgagaccaagaatgagctggagaagatgctgaagtgcaatgaggagcacccagcctacctggccagtgatgagatcaccaccgtgaggaagaacctggagagcagaggagtggaggtggaccccagcctcatcaaggacacctggcaccaggtgtaccgccgccacttcctgaagacagccctgaaccactgcaacctgtgcagaagaggcttctactactaccagaggcactttgtggacagcgagctggagtgcaatgatgtggtgctcttctggaggatccagaggatgctggccatcacagccaacaccctgcggcagcagctgaccaacacagaggtgcggcggctggagaagaatgtgaaggaggtgctggaggactttgctgaagatggagagaagaagatcaagctgctgaccgggaagagggtgcagctggccgaggacctgaagaaggtgcgggagatccaggagaagctggatgccttcatcgaggccctgcaccaggagaagtag

SEQ ID NO: 162767 - DNA, 558 bp, synthetic construct
  misc_feature 1..558: note = Description of Artificial Sequence: Synthetic coding sequence
  source 1..558: mol_type = other DNA
tgatatctcatcctgggcagcgctgtgggcggcggctacacagccaagaagacctttgaccagtggaaggacatgatcccagacctgtctgagtacaagtggatcgtgcctgacatcgtgtgggagattgatgagtacatcgactttgagaagatcaggaaggccctgcccagcagcgaggacctggtgaagctggccccagactttgacaagatcgtggagagcctgagcctgctgaaggacttcttcaccagcggccacaagctggtgtctgaggtgattggagccagtgacctgctgctgctgctgggcagccctgaggagacagccttccgggccacagaccggggcagcgagagtgacaagcacttcaggaaggtgtctgacaaggagaagattgaccagctgcaggaggagctgctgcacacccagctgaagtaccagaggatcctggagcggctggagaaggagaacaaggagctgaggaagctggtgctgcagaaggatgacaagggcatccaccacaggaagctgaagaagagcctgattgacatgtag

SEQ ID NO: 162768 - DNA, 540 bp, synthetic construct
  misc_feature 1..540: note = Description of Artificial Sequence: Synthetic coding sequence
  source 1..540: mol_type = other DNA
atggtggtgggcgccttccccatggccaagctgctgtacctgggcatccggcaggtgtccaagcccctggccaaccgcatcaaggaggccgcccggcgctctgagttcttcaagacctacatctgcctgcccccagcccagctgtaccactgggtggagatgaggaccaagatgaggatcatgggcttccggggcaccgtcatcaagcccctgaatgaggaggccgctgctgagctgggcgctgagctgctgggggaggccaccatcttcatcgtgggcggcggctgcctggtgctggagtactggaggcaccaggcccagcagaggcacaaggaggaggagcagagagctgcctggaatgccctgagagatgaggtgggccacctggccctggccctggaggccctgcaggcccaggtgcaggccgccccaccccagggcgccctggaggagctgaggacagagctgcaggaggtgcgggcccagctgtgcaaccctggccgcagcgccagccatgctgtgcctgccagcaagaagtag

SEQ ID NO: 162769 - DNA, 543 bp, synthetic construct
  misc_feature 1..543: note = Description of Artificial Sequence: Synthetic coding sequence
  source 1..543: mol_type = other DNA
atggtggtgggcgccttccccatggccaagctgctgtacctgggcatccggcaggtgtccaagcccctggccaaccgcatcaaggaggccgcccggcgctctgagttcttcaagacctacatctgcctgcccccagcccagctgtaccactggctggagatgaggaccaagatgaggatcatgggcttcaatgctgctgccatcaagcccctgaatgaaggagctgctgctgagctgggcgctgagctgctgggggagggcatcatcttcatcacagcctgcagctgcctgatgctggagtactggaggcaccagctgcagcagaggaggaaggagaaggagaggagagtggcccgggaggccctgcggggggaggtgggccacctgggcctggccctggaggagctgcaggcccaggtgcaggccaccagcacccagctggccctggaggagctgcgggcccagctgcaggaggtgcgggcccacctgtgcctgcgggaccccccaccagcccctcctgtggccccagccagcgagaagtag

SEQ ID NO: 162770 - DNA, 381 bp, synthetic construct
  misc_feature 1..381: note = Description of Artificial Sequence: Synthetic coding sequence
  source 1..381: mol_type = other DNA
atgaggaccaagatgaggatcatgggcttccggggcaccgtcatcaagcccctgaatgaggaggccgctgctgagctgggcgctgagctgctgggggaggccaccatcttcatcgtgggcggcggctgcctggtgctggagtactggaggcaccaggcccagcagaggcacaaggaggaggagcagagagctgcctggaatgccctgagagatgaggtgggccacctggccctggccctggaggccctgcaggcccaggtgcaggccgccccaccccagggcgccctggaggagctgaggacagagctgcaggaggtgcgggcccagctgtgcaaccctggccgcagcgccagccatgctgtgcctgccagcaagaagtag

SEQ ID NO: 162771 - DNA, 1734 bp, synthetic construct
  misc_feature 1..1734: note = Description of Artificial Sequence: Synthetic coding sequence
  source 1..1734: mol_type = other DNA
atgagccaccagcccctgagctgcctgacagagaaggaggacagccccagcgagagcactggaaatggccccccccacctggcccaccccaacctggacaccttcaccccagaggagctgctgcagcagatgaaggagctgctgacagagaaccaccagctgaaggaggccatgaagctgaacaaccaggccatgaagggccgctttgaggagctgagcgcctggacagagaagcagaaggaggagcggcagttctttgagatccagagcaaggaggccaaggagcggctgatggccctgagccatgaaaatgagaagctgaaggaggagctgggcaagctgaagggcaagtctgagaggagcagcgaggaccccacagatgacagccggctgcccagggctgaggccgagcaggagaaggaccagctgcggacccaggtggtgcggctgcaggccgagaaggctgacctgctgggcatcgtgtctgagctgcagctgaagctgaacagcagcggcagcagtgaagattcttttgtggagatccgcatggccgagggggaggccgagggctctgtgaaggagatcaagcacagccctggccccaccaggacagtgtccactggaacagccctgagcaagtaccgcagccgctctgcagatggagccaagaactactttgagcacgaggagctgactgtgtcccagctgctgctgtgcctgcgggagggcaaccagaaggtggagcggctggaggtggccctgaaggaggccaaggagcgggtgtctgactttgagaagaagaccagcaacagaagtgaaattgagacccagacagagggcagcacagagaaggaaaatgatgaggagaagggccctgagaccgtgggcagcgaggtggaggccctgaacctgcaggtgaccagcctcttcaaggagctgcaggaggcccacaccaagctgagcaaggccgagctgatgaagaagaggctgcaggagaagtgccaggccctggagaggaagaacagcgccatccccagcgagctgaatgagaagcaggagctggtgtacaccaacaagaagctggagctgcaggtggagagcatgctgtctgagatcaagatggagcaggccaagacagaagatgagaagagcaagctgactgtgctgcagatgacccacaacaagctgctgcaggagcacaacaatgccctgaagaccatcgaggagctgaccaggaaggagagcgagaaggtggacagagctgtgctgaaggagctgtctgagaagctggagctggccgagaaggccctggccagcaagcagctgcagatggatgagatgaagcagaccatcgccaagcaggaggaggacctggagaccatgaccatcctgcgggcccagatggaggtgtactgcagcgacttccacgccgagcgggccgcccgggagaagatccacgaggagaaggagcagctggccctgcagctggccgtgctgctgaaggaaaatgatgcctttgaagatggcggccggcagagcctgatggagatgcagagcagacatggagcccggaccagtgacagcgaccagcaggcctacctggtgcagagaggagctgaggaccgggactggaggcagcagaggaacatccccatccacagctgccccaagtgtggggaggtgctgcctgacatcgacaccctgcagatccacgtgatggactgcatcatctag

SEQ ID NO: 162772 - DNA, 1734 bp, synthetic construct; identical to SEQ ID NO: 162771
  misc_feature 1..1734: note = Description of Artificial Sequence: Synthetic coding sequence
  source 1..1734: mol_type = other DNA

SEQ ID NO: 162773 - DNA, 1734 bp, synthetic construct; identical to SEQ ID NO: 162771
  misc_feature 1..1734: note = Description of Artificial Sequence: Synthetic coding sequence
  source 1..1734: mol_type = other DNA

SEQ ID NO: 162774 - DNA, 1716 bp, synthetic construct
  misc_feature 1..1716: note = Description of Artificial Sequence: Synthetic coding sequence
  source 1..1716: mol_type = other DNA
atgagccaccagcccctgagctgcctgacagagaaggaggacagccccagcgagagcactggaaatggccccccccacctggcccaccccaacctggacaccttcaccccagaggagctgctgcagcagatgaaggagctgctgacagagaaccaccagctgaaggaggccatgaagctgaacaaccaggccatgaagggccgctttgaggagctgagcgcctggacagagaagcagaaggaggagcggcagttctttgagatccagagcaaggaggccaaggagcggctgatggccctgagccatgaaaatgagaagctgaaggaggagctgggcaagctgaagggcaagtctgagaggagcagcgaggaccccacagatgacagccggctgcccagggctgaggccgagcaggagaaggaccagctgcggacccaggtggtgcggctgcaggccgagaaggctgacctgctgggcatcgtgtctgagctgcagctgaagctgaacagcagcggcagcagtgaagattcttttgtggagatccgcatggccgagggggaggccgagggctctgtgaaggagatcaagcacagccctggccccaccaggacagtgtccacaggcaccagccgctctgcagatggagccaagaactactttgagcacgaggagctgactgtgtcccagctgctgctgtgcctgcgggagggcaaccagaaggtggagcggctggaggtggccctgaaggaggccaaggagcgggtgtctgactttgagaagaagaccagcaacagaagtgaaattgagacccagacagagggcagcacagagaaggaaaatgatgaggagaagggccctgagaccgtgggcagcgaggtggaggccctgaacctgcaggtgaccagcctcttcaaggagctgcaggaggcccacaccaagctgagcaaggccgagctgatgaagaagaggctgcaggagaagtgccaggccctggagaggaagaacagcgccatccccagcgagctgaatgagaagcaggagctggtgtacaccaacaagaagctggagctgcaggtggagagcatgctgtctgagatcaagatggagcaggccaagacagaagatgagaagagcaagctgactgtgctgcagatgacccacaacaagctgctgcaggagcacaacaatgccctgaagaccatcgaggagctgaccaggaaggagagcgagaaggtggacagagctgtgctgaaggagctgtctgagaagctggagctggccgagaaggccctggccagcaagcagctgcagatggatgagatgaagcagaccatcgccaagcaggaggaggacctggagaccatgaccatcctgcgggcccagatggaggtgtactgcagcgacttccacgccgagcgggccgcccgggagaagatccacgaggagaaggagcagctggccctgcagctggccgtgctgctgaaggaaaatgatgcctttgaagatggcggccggcagagcctgatggagatgcagagcagacatggagcccggaccagtgacagcgaccagcaggcctacctggtgcagagaggagctgaggaccgggactggaggcagcagaggaacatccccatccacagctgccccaagtgtggggaggtgctgcctgacatcgacaccctgcagatccacgtgatggactgcatcatctag

SEQ ID NO: 162775 - DNA, 1734 bp, synthetic construct; identical to SEQ ID NO: 162771
  misc_feature 1..1734: note = Description of Artificial Sequence: Synthetic coding sequence
  source 1..1734: mol_type = other DNA

SEQ ID NO: 162776 - DNA, 1716 bp, synthetic construct; identical to SEQ ID NO: 162774
  misc_feature 1..1716: note = Description of Artificial Sequence: Synthetic coding sequence
  source 1..1716: mol_type = other DNA

SEQ ID NO: 162777 - DNA, 381 bp, synthetic construct
  misc_feature 1..381: note = Description of Artificial Sequence: Synthetic coding sequence
  source 1..381: mol_type = other DNA
tgaggagaggccgagggctctgtgaaggagatcaagcacagccctggccccaccaggacagtgtccactggaacagccctgagcaagtaccgcagccgctctgcagatggagccaagaactactttgagcacgaggagctgactgtgtcccagctgctgctgtgcctgcgggagggcaaccagaaggtggagcggctggaggtggccctgaaggaggccaaggagcgggtgtctgactttgagaagaagaccagcaacagaagtgaaattgagacccagacagagggcagcacagagaaggaaaatgatgaggagaagggccctgagaccaccggcttccaccacgtgggccaggacggcctggacctgctgaccagctag

SEQ ID NO: 162778 - DNA, 444 bp, synthetic construct
  misc_feature 1..444: note = Description of Artificial Sequence: Synthetic coding sequence
  source 1..444: mol_type = other DNA
atgaagctgaacaaccaggccatgaagggccgctttgaggagctgagcgcctggacagagaagcagaaggaggagcggcagttctttgagatccagagcaaggaggccaaggagcggctgatggccctgagccatgaaaatgagaagctgaaggaggagctgggcaagctgaagggcaagtctgagaggagcagcgaggaccccacagatgacagccggctgcccagggctgaggccgagcaggagaaggaccagctgcggacccaggtggtgcggctgcaggccgagaaggctgacctgctgggcatcgtgtctgagctgcagctgaagctgaacagcagcggcagcagcgaggacagctttgtggagatccgcatggccgagggggaggccgagggctctgtgaaggagatcaagcacagccctggccccaccaggacatag

SEQ ID NO: 162779 - DNA, 912 bp, synthetic construct
  misc_feature 1..912: note = Description of Artificial Sequence: Synthetic coding sequence
  source 1..912: mol_type = other DNA
atgcaccctgagcccgcccccccacccagccgcagcagccctgagctgcccccatctgggggcagcaccaccagcggcagccgccgcagcagaagaagaagtggagatggagagcccccaggggcccctcctcctcctcctccacccagcgctgtgacctacccagactggattggccagagctacagcgaggtgatgagcctgaatgagcacagcatgcaggccctgtcctggaggaagctgtacctgagccgggccaagctgaaggccagcagcaggaccagcgccctgctgagcggctttgccatggtggccatggtggaggtgcagctggatgctgaccatgactacccacctggcctgctgattgccttcagcgcctgcaccaccgtgctggtggccgtgcacctgtttgccctgatgatcagcacctgcatcctgcccaacatcgaggccgtgtccaatgtgcacaacctgaacagcgtgaaggagagcccccatgagaggatgcaccgccacatcgagctggcctgggccttcagcaccgtcatcggcaccctgctcttcctggccgaggtggtgctgctgtgctgggtgaagttcctgcccctgaagaagcagcccggccagccccggcccaccagcaagcccccagccagcggggctgctgccaacgtgtccaccagcggcatcaccccaggccaggccgccgccatcgccagcaccaccatcatggtgcccttcggcctcatcttcatcgtgtttgctgtgcacttctaccgcagcctggtgagccacaagacagaccggcagttccaggagctgaatgagctggccgagtttgcccggctgcaggaccagctggaccacagaggagaccaccccctgaccccaggcagccactacgcctag

SEQ ID NO: 162780 - DNA, 765 bp, synthetic construct
  misc_feature 1..765: note = Description of Artificial Sequence: Synthetic coding sequence
  source 1..765: mol_type = other DNA
atgtctgctgagctgaatgtgcccatcgaccccagcgccccagcctgcccagagcccggccacaagggcatggactacagagactgggtgagaagaagctacctggagctggtgaccagcaaccaccacagcgtgcaggccctgtcctggaggaagctgtacctgagccgggccaagctgaaggccagcagcaggaccagcgccctgctgagcggctttgccatggtggccatggtggaggtgcagctggagacccagtaccagtacccccggcccctgctgattgccttcagcgcctgcaccaccgtgctggtggccgtgcacctgtttgccctgctgatcagcacctgcatcctgcccaacgtggaggccgtgagcaacatccacaacctgaacagcatcagcgagagcccccatgagaggatgcacccctacatcgagctggcctggggcttcagcacagtgctgggcatcctgctcttcctggccgaggtggtgctgctgtgctggatcaagttcctgcctgtggatgcccggcggcagcccggccccccacctggccctggcagccacacaggctggcaggccgccctggtgtccaccatcatcatggtgcctgtgggcctcatctttgtggtgttcaccatccacttctaccgcagcctggtgcgccacaagacagagcggcacaaccgggagattgaggagctgcacaagctgaaggtgcagctggatggccacgagaggagcctgcaggtgctgtag

SEQ ID NO: 162781 - DNA, 765 bp, synthetic construct; identical to SEQ ID NO: 162780
  misc_feature 1..765: note = Description of Artificial Sequence: Synthetic coding sequence
  source 1..765: mol_type = other DNA

SEQ ID NO: 162782 - DNA, 639 bp, synthetic construct
  misc_feature 1..639: note = Description of Artificial Sequence: Synthetic coding sequence
  source 1..639: mol_type = other DNA
atgtctgctgagctgaatgtgcccatcgaccccagcgccccagcctgcccagagcccggccacaagggcatggactacagagactgggtgagaagaagctacctggagctggtgaccagcaaccaccacagcgtgcaggccctgtcctggaggaagctgtacctgagccgggccaagctgaaggccagcagcaggaccagcgccctgctgagcggctttgccatggtggccatggtggaggtgcagctggagacccagtaccagtacccccggcccctgctgattgccttcagcgcctgcaccaccgtgctggtggccgtgcacctgtttgccctgctgatcagcacctgcatcctgcccaacgtggaggccgtgagcaacatccacaacctgaacagcatcagcgagagcccccatgagaggatgcacccctacatcgagctggcctggggcttcagcacagtgctgggcatcctgctcttcctggccgaggtggtgctgctgtgctggatcaagttcctgcctgtggatgcccggcggcagcccggccccccacctggccctggcagccacacaggctggcaggccgccctggtgtccaccatcatcatggtgcctgtgggcctcatctttgtgtag

SEQ ID NO: 162783 - DNA, 765 bp, synthetic construct; identical to SEQ ID NO: 162780
  misc_feature 1..765: note = Description of Artificial Sequence: Synthetic coding sequence
  source 1..765: mol_type = other DNA

SEQ ID NO: 162784 - DNA, 765 bp, synthetic construct; identical to SEQ ID NO: 162780
  misc_feature 1..765: note = Description of Artificial Sequence: Synthetic coding sequence
  source 1..765: mol_type = other DNA

SEQ ID NO: 162785 - DNA, 93 bp, synthetic construct
  misc_feature 1..93: note = Description of Artificial Sequence: Synthetic coding sequence
  source 1..93: mol_type = other DNA
atgtctgctgagctgaatgtgcccatcgaccccagcgccccagcctgcccagagcccggccacaagggcatggactacagagactgggtgtag

SEQ ID NO: 162786 - DNA, 690 bp, synthetic construct
  misc_feature 1..690: note = Description of Artificial Sequence: Synthetic coding sequence
  source 1..690: mol_type = other DNA
atgtctgctgagctgaatgtgcccatcgaccccagcgccccagcctgcccagagcccggccacaagggcatggactacagagactgggtgagaagaagctacctggagctggtgaccagcaaccaccacagcgtgcaggccctgtcctggaggaagctgtacctgagccgggccaagctgaaggccagcagcaggaccagcgccctgctgagcggctttgccatggtggccatggtggaggtgcagctggagacccagtaccagtacccccggcccctgctgattgccttcagcgcctgcaccaccgtgctggtggccgtgcacctgtttgccctgctgatcagcacctgcatcctgcccaacgtggaggccgtgagcaacatccacaacctgaacagcatcagcgagagcccccatgagaggatgcacccctacatcgagctggcctggggcttcagcacagtgctgggcatcctgctcttcctggccgaggtggtgctgctgtgctggatcaagttcctgcctgtggatgcccggcggcagcccggccccccacctggccctggcagccacacaggctggcaggccgccctggtgtccaccatcatcatggtgcctgtgggcctcatctttgtggtgttcaccatccacttctaccgcagcctggtgcgccacaagacagaaagatag

SEQ ID NO: 162787 - DNA, 294 bp, synthetic construct
  misc_feature 1..294: note = Description of Artificial Sequence: Synthetic coding sequence
  source 1..294: mol_type = other DNA
atgtctgctgagctgaatgtgcccatcgaccccagcgccccagcctgcccagagcccggccacaagggcatggactacagagactgggtgagaagaagctacctggagctggtgaccagcaaccaccacagcgtgcaggccctgtcctggaggaagctgtacctgagccgggccaagctgaaggccagcagcaggaccagcgccctgctgagcggctttgccatggtggccatggtggaggtgcagctggagacccagtaccagtacccccggcccctgctgattgccttctag

SEQ ID NO: 162788 - DNA, 888 bp, synthetic construct
  misc_feature 1..888: note = Description of Artificial Sequence: Synthetic coding sequence
  source 1..888: mol_type = other DNA
atgaagggcggggagggagatgctggggagcaggcccccctgaaccctgagggggagagccctgctggcagcgccacctaccgggagtttgtgcaccggggctacctggacctgatgggcgccagccagcacagcctgcgggccctgtcctggaggcggctgtacctgagccgggccaagctgaaggccagcagcaggaccagcgccctgctgagcggctttgccatggtggccatggtggaggtgcagctggagagtgaccacgagtacccacctggcctgctggtggccttcagcgcctgcaccaccgtgctggtggccgtgcacctgtttgccctgatggtgtccacctgcctgctgccccacattgaagctgtgagcaacatccacaacctgaacagcgtgcaccagagcccccaccagaggctgcaccgctacgtggagctggcctggggcttcagcacagccctgggcaccttcctgttcctggccgaggtggtgctggtgggctgggtgaagtttgtgcccatcggggcccccctggacacccccacccccatggtgcccaccagccgggtgcccggcaccctggcccctgtggccaccagcctgagccctgccagcaacctgcccaggagcagcgccagcgctgcccccagccaggccgagcccgcctgccccccccggcaggcctgtggcggcggcggggcccacggccctggctggcaggccgccatggccagcacagccatcatggtgcctgtgggcctggtgtttgtggcctttgccctgcacttctaccgcagcctggtggcccacaagacagaccgctacaagcaggagctggaggagctgaaccggctgcagggcgagctgcaggccgtgtag

SEQ ID NO: 162789 - DNA, 822 bp, synthetic construct
  misc_feature 1..822: note = Description of Artificial Sequence: Synthetic coding sequence
  source 1..822: mol_type = other DNA
atgaagggcggggagggagatgctggggagcaggcccccctgaaccctgagggggagagccctgctggcagcgccacctaccgggagtttgtgcaccggggctacctggacctgatgggcgccagccagcacagcctgcgggccctgtcctggaggcggctgtacctgagccgggccaagctgaaggccagcagcaggaccagcgccctgctgagcggctttgccatggtggccatggtggaggtgcagctggagagtgaccacgagtacccacctggcctgctggtggccttcagcgcctgcaccaccgtgctggtggccgtgcacctgtttgccctgatggtgtccacctgcctgctgccccacattgaagctgtgagcaacatccacaacctgaacagcgtgcaccagagcccccaccagaggctgcaccgctacgtggagctggcctggggcttcagcacagccctgggcaccttcctgttcctggccgaggtggtgctggtgggctgggtgaagtttgtgcccatcggggcccccctggacacccccacccccatggtgcccaccagccgggtgcccggcaccctggcccctgtggccaccagcctgagccctgccagcaacctgcccaggagcagcgccagcgctgcccccagccaggccgagcccgcctgccccccccggcaggcctgtggcggcggcggggcccacggccctggctggcaggccgccatggccagcaccttccctggcatcttccccatcagcctgagcctgggcttctgcaagctgctgtgcacctgggccggcctgtcctag

SEQ ID NO: 162790 - DNA, 414 bp, synthetic construct
  misc_feature 1..414: note = Description of Artificial Sequence: Synthetic coding sequence
  source 1..414: mol_type = other DNA
atggccggcagccaggacatctttgatgccatcgtgatggctgatgagcgcttccatggagagggctaccgggagggctatgaggagggcagcagcctgggcgtgatggagggccggcagcacggcaccctgcatggagccaagattggcagcgagatcggctgctaccagggctttgcctttgcctggaagtgcctgctgcacagctgcaccacagagaaggacagcaggaagatgaaggtgctggagagcctcatcggcatgatccagaagttcccctatgatgaccccacctatgacaagctgcacgaggacctggacaagatccggggcaagttcaagcagttctgcagcctgctgaatgtgcagcctgacttcaagatctctgctgagggcagcggcctgtccttctag

SEQ ID NO: 162791 - DNA, 666 bp, synthetic construct
  misc_feature 1..666: note = Description of Artificial Sequence: Synthetic coding sequence
  source 1..666: mol_type = other DNA
atggccggcagccaggacatctttgatgccatcgtgatggctgatgagcgcttccatggagagggctaccgggagggctatgaggagggcagcagcctgggcgtgatggagggccggcagcacggcaccctgcatggagccaagattggcagcgagatcggctgctaccagggctttgcctttgcctggaagtgcctgctgcacagctgcaccacagagaaggacagcaggaagatgaaggtgctggagagcctcatcggcatgatccagaagttcccctatgatgaccccacctatgacaagctgcacgaggacctggacaagatccggggcaagttcaagcagacaggcctgagccccagcgctgtgatggtgcggcccccatcctatgtggagctgcctgtgacctgctggtgctgggaggccccccgctgcaaccagaagtgcacagatcctgctgcccggcggccagacccccagacctgtgccagccaggaccggctgcgctgtgccccctgcacctgccaccagcccctggccagccgctacacccagcaccctggcctggtgcccctgccccaccacgaccggcagagcgtgccccagggcccccgggtggtgcagacagatgctgctgccaggatggtggagcagcagaccatgtag

SEQ ID NO: 162792 - DNA, 414 bp, synthetic construct; identical to SEQ ID NO: 162790
  misc_feature 1..414: note = Description of Artificial Sequence: Synthetic coding sequence
  source 1..414: mol_type = other DNA

SEQ ID NO: 162793 - DNA, 237 bp, synthetic construct
  misc_feature 1..237: note = Description of Artificial Sequence: Synthetic coding sequence
  source 1..237: mol_type = other DNA
atggccggcagccaggacatctttgatgccatcgtgatggctgatgagagcaggaagatgaaggtgctggagagcctgattggcatgatccagaagttcccctatgatgaccccacctatgacaagctgcacgaggacctggacaagatccggggcaagttcaagcagttctgcagcctgctgaatgtgcagcctgacttcaagatctctgctgagggcagcggcctgtccttctag

SEQ ID NO: 162794 - DNA, 3039 bp, synthetic construct
  misc_feature 1..3039: note = Description of Artificial Sequence: Synthetic coding sequence
  source 1..3039: mol_type = other DNA
atgatggcccagagcaacatgttcaccgtggctgatgtgctgagccaggatgagctgaggaagaagctgtaccagaccttcaaggaccggggcatcctggacaccctgaagacccagctgaggaaccagctgatccacgagctgatgcaccctgtgctgagcggggagctgcagcccaggagcatctctgtggagggcagcagcctgctgattggagccagcaacagcctggtggccgaccacctgcagagatgtggctatgagtacagcctgagcgtcttcttccctgagagcggcctggccaaggagaaggtgttcaccatgcaggacctgctgcagctgatcaagatcaaccccaccagcagcctgtacaagagcctggtgtctggcagtgacaaggagaaccagaagggcttcctgatgcacttcctgaaggagctggccgagtaccaccaggccaaggagagctgcaacatggagacccagaccagcagcaccttcaacagagacagcctggccgagaagctgcagctgattgatgaccagtttgctgatgcctacccccagaggatcaagtttgagagcctggagatcaagctgaatgagtacaagcgggagattgaggagcagctgcgggcagagatgtgccagaagctgaagttcttcaaggacacagaaattgccaagatcaagatggaggccaagaagaagtatgagaaggagctgaccatgttccagaatgactttgagaaggcctgccaggccaagtctgaggccctggtgctgcgggagaagagcaccctggagcgcatccacaagcaccaggagattgagaccaaggagatctatgcccagaggcagctgctgctgaaggacatggacctgctgcggggccgggaggccgagctgaagcagagggtggaggcctttgagctgaaccagaagctgcaggaggagaagcacaagagcatcacagaggccctgcggcggcaggagcagaacatcaagagctttgaggagacctatgacaggaagctgaagaatgagctgctgaagtaccagctggagctgaaggatgactacatcatccgcaccaaccggctgattgaagatgagaggaagaacaaggagaaggctgtgcacctgcaggaggagctgattgccatcaacagcaagaaggaggagctgaaccagagcgtgaacagagtgaaggagctggagctggagctggagagcgtgaaggcccagagcctggccatcaccaagcagaaccacatgctgaatgagaaggtgaaggagatgtctgactacagcctgctgaaggaggagaagctggagctgctggcccagaacaagctgctgaagcagcagctggaggagagcagaaatgaaaacctgcggctgctgaaccggctggcccagcctgcccctgagctggccgtgttccagaaggagctgaggaaggccgagaaggccatcgtggtggagcacgaggagtttgagagctgccggcaggccctgcacaagcagctgcaggatgaaattgagcacagcgcccagctgaaggcccagatcctgggctacaaggcctctgtgaagagcctgaccacccaggtggccgacctgaagctgcagctgaagcagacccagacagccctggagaatgaggtgtactgcaaccccaagcagagcgtcatcgacagatctgtgaatggcctcatcaatggaaatgtggtgccctgcaatggagagatcagcggggacttcctgaacaaccccttcaagcaggagaatgtgctggccaggatggtggccagccgcatcaccaactaccccacagcctgggtggagggcagcagcccagacagcgacctggagtttgtggccaacaccaaggcccgggtgaaggagctgcagcaggaggccgagcggctggagaaggccttccgcagctaccaccggcgggtcatcaagaacagcgccaagagccccctggccgccaagagcccccccagcctgcacctgctggaggccttcaagaacatcaccagcagcagccctgagcggcacatctttggagaggacagagtggtgtctgagcagccccaggtgggcaccctggaggagagaaatgatgtggtggaggccctgaccggcagcgctgccagccggctgcggggcggcaccagcagccggcggctgagcagcacccccctgcccaaggccaagaggagcctggagagcgagatgtacctggagggcctgggccgcagccacatcgccagccccagcccctgcccagacaggatgcccctgcccagccccacagagagccgccacagcctgagcatcccccctgtgagcagccccccagagcagaaggtgggcctgtaccgccggcagacagagctgcaggacaagtctgagttcagtgatgtggacaagctggccttcaaggacaatgaggagtttgagagcagctttgagagcgctggcaacatgccccggcagctggagatgggcggcctgagccctgctggggacatgagccacgtggatgctgctgctgctgctgtgcccctgagctaccagcaccccagcgtggaccagaagcagatcgaggagcagaaggaggaggagaagatccgggagcagcaggtgaaggagcggcggcagcgggaggagcggcggcagagcaacctgcaggaggtgctggagcgggagcggcgggagctggagaagctgtaccaggagaggaagatgattgaggagagcctgaagatcaagatcaagaaggagctggagatggagaatgagctggagatgagcaaccaggagatcaaggacaagagcgcccacagcgagaaccccctggagaagtacatgaagatcatccagcaggagcaggaccaggagagcgctgacaagagcagcaagaagatggtgcaggagggcagcctggtggacaccctgcagagcagtgacaaggtggagagcctgaccggcttcagccatgaggagctggatgacagctggtag

SEQ ID NO: 162795 - DNA, 2919 bp, synthetic construct
  misc_feature 1..2919: note = Description of Artificial Sequence: Synthetic coding sequence
  source 1..2919: mol_type = other DNA
atgatggcccagagcaacatgttcaccgtggctgatgtgctgagccaggatgagctgaggaagaagctgtaccagaccttcaaggaccggggcatcctggacaccctgaagacccagctgaggaaccagctgatccacgagctgatgcaccctgtgctgagcggggagctgcagcccaggagcatctctgtggagggcagcagcctgctgattggagccagcaacagcctggtggccgaccacctgcagagatgtggctatgagtacagcctgagcgtcttcttccctgagagcggcctggccaaggagaaggtgttcaccatgcaggacctgctgcagctgatcaagatcaaccccaccagcagcctgtacaagagcctggtgtctggcagtgacaaggagaaccagaagggcttcctgatgcacttcctgaaggagctggccgagtaccaccaggccaaggagagctgcaacatggagacccagaccagcagcaccttcaacagagacagcctggccgagaagctgcagctgattgatgaccagtttgctgatgcctacccccagaggatcaagtttgagagcctggagatcaagctgaatgagtacaagcgggagattgaggagcagctgcgggcagagatgtgccagaagctgaagttcttcaaggacacagaaattgccaagatcaagatggaggccaagaagaagtatgagaaggagctgaccatgttccagaatgactttgagaaggcctgccaggccaagtctgaggccctggtgctgcgggagaagagcaccctggagcgcatccacaagcaccaggagattgagaccaaggagatctatgcccagaggcagctgctgctgaaggacatggacctgctgcggggccgggaggccgagctgaagcagagggtggaggcctttgagctgtaccagctggagctgaaggatgactacatcatccgcaccaaccggctgattgaagatgagaggaagaacaaggagaaggctgtgcacctgcaggaggagctgattgccatcaacagcaagaaggaggagctgaaccagagcgtgaacagagtgaaggagctggagctggagctggagagcgtgaaggcccagagcctggccatcaccaagcagaaccacatgctgaatgagaaggtgaaggagatgtctgactacagcctgctgaaggaggagaagctggagctgctggcccagaacaagctgctgaagcagcagctggaggagagcagaaatgaaaacctgcggctgctgaaccggctggcccagcctgcccctgagctggccgtgttccagaaggagctgaggaaggccgagaaggccatcgtggtggagcacgaggagtttgagagctgccggcaggccctgcacaagcagctgcaggatgaaattgagcacagcgcccagctgaaggcccagatcctgggctacaaggcctctgtgaagagcctgaccacccaggtggccgacctgaagctgcagctgaagcagacccagacagccctggagaatgaggtgtactgcaaccccaagcagagcgtcatcgacagatctgtgaatggcctcatcaatggaaatgtggtgccctgcaatggagagatcagcggggacttcctgaacaaccccttcaagcaggagaatgtgctggccaggatggtggccagccgcatcaccaactaccccacagcctgggtggagggcagcagcccagacagcgacctggagtttgtggccaacaccaaggcccgggtgaaggagctgcagcaggaggccgagcggctggagaaggccttccgcagctaccaccggcgggtcatcaagaacagcgccaagagccccctggccgccaagagcccccccagcctgcacctgctggaggccttcaagaacatcaccagcagcagccctgagcggcacatctttggagaggacagagtggtgtctgagcagccccaggtgggcaccctggaggagagaaatgatgtggtggaggccctgaccggcagcgctgccagccggctgcggggcggcaccagcagccggcggctgagcagcacccccctgcccaaggccaagaggagcctggagagcgagatgtacctggagggcctgggccgcagccacatcgccagccccagcccctgcccagacaggatgcccctgcccagccccacagagagccgccacagcctgagcatcccccctgtgagcagccccccagagcagaaggtgggcctgtaccgccggcagacagagctgcaggacaagtctgagttcagtgatgtggacaagctggccttcaaggacaatgaggagtttgagagcagctttgagagcgctggcaacatgccccggcagctggagatgggcggcctgagccctgctggggacatgagccacgtggatgctgctgctgctgctgtgcccctgagctaccagcaccccagcgtggaccagaagcagatcgaggagcagaaggaggaggagaagatccgggagcagcaggtgaaggagcggcggcagcgggaggagcggcggcagagcaacctgcaggaggtgctggagcgggagcggcgggagctggagaagctgtaccaggagaggaagatgattgaggagagcctgaagatcaagatcaagaaggagctggagatggagaatgagctggagatgagcaaccaggagatcaaggacaagagcgcccacagcgagaaccccctggagaagtacatgaagatcatccagcaggagcaggaccaggagagcgctgacaagagcagcaagaagatggtgcaggagggcagcctggtggacaccctgcagagcagtgacaaggtggagagcctgaccggcttcagccatgaggagctggatgacagctggtag

SEQ ID NO: 162796 - DNA, 2619 bp, synthetic construct
  misc_feature 1..2619: note = Description of Artificial Sequence: Synthetic coding sequence
  source 1..2619: mol_type = other DNA
atgcacttcctgaaggagctggccgagtaccaccaggccaaggagagctgcaacatggagacccagaccagcagcaccttcaacagagacagcctggccgagaagctgcagctgattgatgaccagtttgctgatgcctacccccagaggatcaagtttgagagcctggagatcaagctgaatgagtacaagcgggagattgaggagcagctgcgggcagagatgtgccagaagctgaagttcttcaaggacacagaaattgccaagatcaagatggaggccaagaagaagtatgagaaggagctgaccatgttccagaatgactttgagaaggcctgccaggccaagtctgaggccctggtgctgcgggagaagagcaccctggagcgcatccacaagcaccaggagattgagaccaaggagatctatgcccagaggcagctgctgctgaaggacatggacctgctgcggggccgggaggccgagctgaagcagagggtggaggcctttgagctgaaccagaagctgcaggaggagaagcacaagagcatcacagaggccctgcggcggcaggagcagaacatcaagagctttgaggagacctatgacaggaagctgaagaatgagctgctgaagtaccagctggagctgaaggatgactacatcatccgcaccaaccggctgattgaagatgagaggaagaacaaggagaaggctgtgcacctgcaggaggagctgattgccatcaacagcaagaaggaggagctgaaccagagcgtgaacagagtgaaggagctggagctggagctggagagcgtgaaggcccagagcctggccatcaccaagcagaaccacatgctgaatgagaaggtgaaggagatgtctgactacagcctgctgaaggaggagaagctggagctgctggcccagaacaagctgctgaagcagcagctggaggagagcagaaatgaaaacctgcggctgctgaaccggctggcccagcctgcccctgagctggccgtgttccagaaggagctgaggaaggccgagaaggccatcgtggtggagcacgaggagtttgagagctgccggcaggccctgcacaagcagctgcaggatgaaattgagcacagcgcccagctgaaggcccagatcctgggctacaaggcctctgtgaagagcctgaccacccaggtggccgacctgaagctgcagctgaagcagacccagacagccctggagaatgaggtgtactgcaaccccaagcagagcgtcatcgacagatctgtgaatggcctcatcaatggaaatgtggtgccctgcaatggagagatcagcggggacttcctgaacaaccccttcaagcaggagaatgtgctggccaggatggtggccagccgcatcaccaactaccccacagcctgggtggagggcagcagcccagacagcgacctggagtttgtggccaacaccaaggcccgggtgaaggagctgcagcaggaggccgagcggctggagaaggccttccgcagctaccaccggcgggtcatcaagaacagcgccaagagccccctggccgccaagagcccccccagcctgcacctgctggaggccttcaagaacatcaccagcagcagccctgagcggcacatctttggagaggacagagtggtgtctgagcagccccaggtgggcaccctggaggagagaaatgatgtggtggaggccctgaccggcagcgctgccagccggctgcggggcggcaccagcagccggcggctgagcagcacccccctgcccaaggccaagaggagcctggagagcgagatgtacctggagggcctgggccgcagccacatcgccagccccagcccctgcccagacaggatgcccctgcccagccccacagagagccgccacagcctgagcatcccccctgtgagcagccccccagagcagaaggtgggcctgtaccgccggcagacagagctgcaggacaagtctgagttcagtgatgtggacaagctggccttcaaggacaatgaggagtttgagagcagctttgagagcgctggcaacatgccccggcagctggagatgggcggcctgagccctgctggggacatgagccacgtggatgctgctgctgctgctgtgcccctgagctaccagcaccccagcgtggaccagaagcagatcgaggagcagaaggaggaggagaagatccgggagcagcaggtgaaggagcggcggcagcgggaggagcggcggcagagcaacctgcaggaggtgctggagcgggagcggcgggagctggagaagctgtaccaggagaggaagatgattgaggagagcctgaagatcaagatcaagaaggagctggagatggagaatgagctggagatgagcaaccaggagatcaaggacaagagcgcccacagcgagaaccccctggagaagtacatgaagatcatccagcaggagcaggaccaggagagcgctgacaagagcagcaagaagatggtgcaggagggcagcctggtggacaccctgcagagcagtgacaaggtggagagcctgaccggcttcagccatgaggagctggatgacagctggtag

SEQ ID NO: 162797 - DNA, 1104 bp, synthetic construct
  misc_feature 1..1104: note = Description of Artificial Sequence: Synthetic coding sequence
  source 1..1104: mol_type = other DNA
atgatggcccagagcaacatgttcaccgtggctgatgtgctgagccaggatgagctgaggaagaagctgtaccagaccttcaaggaccggggcatcctggacaccctgaagacccagctgaggaaccagctgatccacgagctgatgcaccctgtgctgagcggggagctgcagcccaggagcatctctgtggagggcagcagcctgctgattggagccagcaacagcctggtggccgaccacctgcagagatgtggctatgagtacagcctgagcgtcttcttccctgagagcggcctggccaaggagaaggtgttcaccatgcaggacctgctgcagctgatcaagatcaaccccaccagcagcctgtacaagagcctggtgtctggcagtgacaaggagaaccagaagggcttcctgatgcacttcctgaaggagctggccgagtaccaccaggccaaggagagctgcaacatggagacccagaccagcagcaccttcaacagagacagcctggccgagaagctgcagctgattgatgaccagtttgctgatgcctacccccagaggatcaagtttgagagcctggagatcaagctgaatgagtacaagcgggagattgaggagcagctgcgggcagagatgtgccagaagctgaagttcttcaaggacacagaaattgccaagatcaagatggaggccaagaagaagtatgagaaggagctgaccatgttccagaatgactttgagaaggcctgccaggccaagtctgaggccctggtgctgcgggagaagagcaccctggagcgcatccacaagcaccaggagattgagaccaaggagatctatgcccagaggcagctgctgctgaaggacatggacctgctgcggggccgggaggccgagctgaagcagagggtggaggcctttgagctgaaccagaagctgcaggaggagaagcacaagagcatcacagaggccctgcggcggcaggagcagaacatcaagagctttgaggagacctatgacaggaagctgaagaatgagctgctgaacttccaccggctgcatggagtgtgcctggccctgggcatcctgatctag

SEQ ID NO: 162798 - DNA, 1017 bp, synthetic construct
  misc_feature 1..1017: note = Description of Artificial Sequence: Synthetic coding sequence
  source 1..1017: mol_type = other DNA
atggtgttcctgtgcatcttcaaggagctggccgagtaccaccaggccaaggagagctgcaacatggagacccagaccagcagcaccttcaacagagacagcctggccgagaagctgcagctgattgatgaccagtttgctgatgcctacccccagaggatcaagtttgagagcctggagatcaagctgaatgagtacaagcgggagattgaggagcagctgcgggcagagatgtgccagaagctgaagttcttcaaggacacagagatcgccaagatcaagatggaggccaagaagaagtatgagaaggagctgaccatgttccagaatgactttgagaaggcctgccaggccaagtctgaggccctggtgctgcgggagaagagcaccctggagcgcatccacaagcaccaggagattgagaccaaggagatctatgcccagaggcagctgctgctgaaggacatggacctgctgcggggccgggaggccgagctgaagcagagggtggaggcctttgagctgtaccagctggagctgaaggatgactacatcatccgcaccaaccggctgattgaagatgagaggaagaacaaggagaaggctgtgcacctgcaggaggagctgattgccatcaacagcaagaaggaggagctgaaccagagcgtgaacagagtgaaggagctggagctggagctggagagcgtgaaggcccagagcctggccatcaccaagcagaaccacatgctgaatgagaaggtgaaggagatgtctgactacagcctgctgaaggaggagaagctggagctgctggcccagaacaagctgctgaagcagcagctggaggagagcagaaatgaaaacctgcggctgctgaaccggctggcccagcctgcccctgagctggccgtgttccagaaggagctgaggaaggccgagaaggccatcgtggtggagcacgaggagtttgagagctgccggcaggccctgcacaagcagctgcaggatgagccctag

SEQ ID NO: 162799 - DNA, 2586 bp, synthetic construct
  misc_feature 1..2586: note = Description of Artificial Sequence: Synthetic coding sequence
  source 1..2586: mol_type = other DNA
atggcccactaccccacccggctgaagaccaggaagacctacagctgggtgggccggcccctgctggacaggaagctgcactaccagacctaccgggagatgtgtgtgaagacagagggctgcagcacagagatccacatccagatcggccagtttgtgctgattgaaggagatgatgatgagaacccctacgtggccaagctgctggagctgtttgaagatgacagcgaccccccacccaagaagagggcccgggtgcagtggtttgtgcgcttctgtgaggtgcctgcctgcaagaggcacctgctgggcaggaagccaggggcccaggagatcttctggtatgactacccagcctgtgacagcaacatcaatgctgagaccatcatcggcctggtgcgggtcatccccctggcccccaaggatgtggtgcccaccaacctgaagaatgagaagaccctgtttgtgaagctgtcctggaatgagaagaagttccggcccctgagcagcgagctgtttgctgagctgaacaagccccaggagagcgctgccaagtgccagaagcctgtgcgggccaagagcaagtctgctgagagccccagctggaccccagctgagcacgtggccaagagaattgagagccgccacagcgccagcaagagccggcagacccccacccaccccctgaccccccgggccaggaagaggctggagctgggcaacctgggcaacccccagatgagccagcagaccagctgtgccagcctggacagccctggccgcatcaagaggaaggtggccttcagcgagatcaccagccccagcaagaggagccagcctgacaagctgcagaccctgagccctgccctgaaggcccctgagaagacccgggagaccggcctgagctacacagaagatgacaagaaggccagccctgagcaccgcatcatcctgcggaccagaattgctgccagcaagaccatcgacatccgggaggagaggaccctgacccccatcagcggcggccagaggagctctgtggtgcccagcgtcatcctgaagccagagaacatcaagaagagagatgccaaggaggccaaggcccagaatgaggccaccagcaccccccaccgcatccggaggaagagctctgtgctgaccatgaaccgcatccggcagcagctgcgcttcctgggcaacagcaagagtgaccaggaggagaaggagatcctgcctgctgctgagatcagtgacagcagcagtgatgaggaggaggccagcaccccacccctgccccggcgggcccccaggacagtgtccaggaacctgcggagcagcctgaagagcagcctgcacaccctgaccaaggtgcccaagaagagcctgaagcccaggaccccccgctgtgccgccccccagatccgcagccgcagcctggccgcccaggagcccgcctctgtgctggaggaggcccggctgcggctgcacgtgtctgctgtgcctgagagcctgccctgccgggagcaggagttccaggacatctacaactttgtggagagcaagctgctggaccacactggaggctgcatgtacatctctggagtgcccggcaccgggaagacagccaccgtgcatgaagtcatccgctgcctgcagcaggccgcccaggccaatgatgtgccccccttccagtacatcgaggtgaatggcatgaagctgacagagccccaccaggtgtatgtgcagatcctgcagaagctgaccggccagaaggccacagccaaccacgccgctgagctgctggccaagcagttctgcacccggggcagcccccaggagaccaccgtgctgctggtggatgagctggacctgctgtggacccacaagcaggacatcatgtacaacctgtttgactggcccacccacaaggaggcccggctggtggtgctggccatcgccaacaccatggacctgcctgagcgcatcatgatgaacagagtgagcagccggctgggcctgaccaggatgtgcttccagccctacacctacagccagctgcagcagatcctgcggagccggctgaagcacctgaaggcctttgaagatgatgccatccagctggtggccaggaaggtggccgccctgtctggagatgcccggcgctgcctggacatctgcagaagagccacagagatctgtgagttcagccagcagaagccagacagccctggcctggtgaccatcgcccacagcatggaggccgtggatgagatgttcagcagcagctacatcacagccatcaagaacagctctgtgctggagcagagcttcctgcgggccatcctggccgagttccgccgcagcggcctggaggaggccaccttccagcagatctacagccagcacgtggccctgtgcaggatggagggcctgccctaccccaccatgtctgagaccatggctgtgtgcagccacctgggcagctgccgcctgctgctggtggagcccagcagaaatgacctgctgctgcgggtgcggctgaatgtgtcccaggatgatgtgctgtatgccctgaaggatgaatag

SEQ ID NO: 162800 - DNA, 2586 bp, synthetic construct; identical to SEQ ID NO: 162799
  misc_feature 1..2586: note = Description of Artificial Sequence: Synthetic coding sequence
  source 1..2586: mol_type = other DNA

SEQ ID NO: 162801 - DNA, 1599 bp, synthetic construct
  misc_feature 1..1599: note = Description of Artificial Sequence: Synthetic coding sequence
  source 1..1599: mol_type = other DNA
atggagaagagcaatgagaccaacggctacctggacagcgcccaggccggccctgctgctggccctggggcccctggaacagctgctggccgggcccggcgctgtgccggcttcctgcggcggcaggccctggtgctgctgactgtgtctggagtgctggccggggccggcctgggcgccgccctgcggggcctgagcctgagcaggacccaggtgacctacctggccttccctggagagatgctgctgaggatgctgaggatgatcatcctgcccctggtggtgtgcagcctggtgtctggggccgccagcctggatgccagctgcctgggccgcctgggcggcattgctgtggcctacttcggcctgaccaccctgagcgccagcgccctggccgtggccctggccttcatcatcaagccaggcagcggggcccagaccctgcagagcagtgacctgggcctggaggacagcggccccccacctgtgcccaaggagaccgtggacagcttcctggacctggccaggaacctcttccccagcaacctggtggtggccgccttccgcacctacgccacagactacaaggtggtgacccagaacagcagcagtggaaatgtgacccatgagaagatccccatcggcacagaaattgagggcatgaacatcctgggcctggtgctgtttgccctggtgctgggcgtggccctgaagaagctgggctctgaaggagaagatctcatccgcttcttcaacagcctgaatgaggccaccatggtgctggtgtcctggatcatgtggtacgtgcctgtgggcatcatgttcctggtgggcagcaagatcgtggagatgaaggacatcatcgtgctggtgaccagcctgggcaagtacatctttgccagcatcctgggccacgtgatccacggcggcatcgtgctgcccctcatctactttgtgttcaccaggaagaaccccttccgcttcctgctgggcctgctggccccctttgccacagcctttgccacctgcagcagcagcgccaccctgcccagcatgatgaagtgcatcgaggagaacaacggggtggacaagaggatcagccgcttcatcctgcccatcggggccaccgtgaacatggatggagctgccatcttccagtgtgtggccgctgtgttcatcgcccagctgaacaacgtggagctgaatgccggccagatcttcaccatcctggtgacagccacagccagctctgtgggcgctgctggggtgcctgctggaggagtgctgaccatcgccatcatcctggaggccatcggcctgcccacccatgacctgcccctcatcctggccgtggactggatcgtggacaggaccaccaccgtggtgaatgtggagggagatgccctgggcgccggcatcctgcaccacctgaaccagaaggccaccaagaagggggagcaggagctggccgaggtgaaggtggaggccatccccaactgcaagtctgaggaggagaccagccccctggtgacccaccagaacccagctggccctgtggccagcgcccctgagctggagagcaaggagagcgtgctgtag

SEQ ID NO: 162802 - DNA, 330 bp, synthetic construct
  misc_feature 1..330: note = Description of Artificial Sequence: Synthetic coding sequence
  source 1..330: mol_type = other DNA
atgagcaagccagagctgaaggaggacaagatgctggaggtgcactttgtgggagatgatgatgtgctgaaccacatcctggaccgggagggcggggccaagctgaagaaggagcgggcccagctgctggtgaaccccaagaagatcatcaagaagccagaatatgacctggaggaggatgaccaggaggtgctgaaggaccagaactacgtggagatcatgggcagagatgtgcaggagagcctgaagaatggcagcgccaccggcggcggcaacaaggtgtacagcttccagaacaggaagcacagcgagaagatggccaagctgtag

SEQ ID NO: 162803 - DNA, 219 bp, synthetic construct
  misc_feature 1..219: note = Description of Artificial Sequence: Synthetic coding sequence
  source 1..219: mol_type = other DNA
atgagcaagccagagctgaaggaggacaagatgctggaggtgcactttgtgggagatgatgatgtgctgaaccacatcctggaccgggagggcggggccaagctgaagaaggagcgggcccagctgctggtgaaccccaagaagatcatcaagaagccagaatatgacctggaggaggatgaccaggaggtgctgaaggaccagaactacgtggagtag

SEQ ID NO: 162804 - DNA, 2139 bp, synthetic construct
  misc_feature 1..2139: note = Description of Artificial Sequence: Synthetic coding sequence
  source 1..2139: mol_type = other DNA
atggccaccagctccatgagcaagggctgctttgtgttcaagcccaacagcaagaagaggaagatcagcctgcccatcgaggactacttcaacaagggcaagaatgaacctgaggacagcaagctgcgctttgagacctaccagctgatctggcagcagatgaagtcagaaaatgaaaggctgcaggaggagctgaacaagaacctgtttgacaacctgattgagttcctgcagaagagccacagcggcttccagaagaacagccgggacctgggcggccagatcaagctgcgggagatccccacagctgccctggtgctgggcgtgaatgtgacagaccatgacctgaccttcggcagcctgacagaggccctgcagaacaacgtgaccccctacgtggtgtccctgcaggccaaggactgcccagacatgaagcacttcctgcagaagctgatcagccagctgatggactgctgcgtggacatcaagagcaaggaggaggagagcgtgcacgtgacccagaggaagacccactacagcatggacagcctgagctcctggtacatgacagtgacccagaagacagaccccaagatgctgagcaagaagaggaccaccagcagccagtggcagagcccccctgtggtggtgatcctgaaggacatggagagctttgccaccaaggtgctgcaggacttcatcatcatcagcagccagcacctgcacgagttccccctcatcctgatcttcggcatcgccaccagccccatcatcatccaccggctgctgccccatgctgtgagcagcctgctgtgcatcgagctgttccagagcctgagctgcaaggagcacctgaccaccgtgctggacaagctgctgctgaccacccagttccccttcaagatcaatgagaaggtgctgcaggtgctgaccaacatcttcctgtaccatgacttctctgtgcagaacttcatcaagggcctgcagctgagcctgctggagcacttctacagccagcccctgtctgtgctgtgctgcaacctgcctgaggccaagaggcgcatcaacttcctgagcaacaaccagtgtgagaacatccggcggctgcccagcttcagaagatatgtggagaagcaggccagcgagaagcaggtggccctgctgaccaatgaaagatacctgaaggaggagacccagctgctgctggagaacctgcacgtgtaccacatgaactacttcctggtgctgcgctgcctgcacaagttcaccagcagcctgcccaagtaccccctgggccggcagatccgggagctgtactgcacctgcctggagaagaacatctgggacagcgaggagtatgcctctgtgctgcagctgctgaggatgctggccaaggatgagctgatgaccatcctggagaagtgcttcaaggtgttcaagagctactgtgagaaccacctgggcagcacagccaagagaattgaggagttcctggcccagttccagagcctggatgctgagaccaaggaggaggaggatgccagcggcagccagcccaagggcctgcagaagacagacctgtaccacctgcagaagagcctgctggagatgaaggagctgcggcgcagcaagaagcagaccaagtttgaggtgctgcgggagaatgtggtgaacttcatcgactgcctggtgcgggagtacctgctgcccccagagacccagcccctgcacgaggtggtgtacttctctgctgcccacgccctgcgggagcacctgaatgctgccccccgcatcgccctgcacacagccctgaacaacccctactactacctgaagaatgaggccctgaagtctgaggagggctgcatccccaacatcgccccagacatctgcatcgcctacaagctgcacctggagtgcagccgcctcatcaacctggtggactggagcgaggcctttgccaccgtggtgacagctgctgagaagatggatgccaacagcgccaccagcgaggagatgaatgagatcatccacgcccgcttcatccgggctgtgtctgagctggagctgctgggcttcatcaagcccaccaagcagaagacagaccacgtggcccggctgacctggggcggctgctag

SEQ ID NO: 162805 - DNA, 2136 bp, synthetic construct
  misc_feature 1..2136: note = Description of Artificial Sequence: Synthetic coding sequence
  source 1..2136: mol_type = other DNA
atggccaccagctccatgagcaagggctgctttgtgttcaagcccaacagcaagaagaggaagatcagcctgcccatcgaggactacttcaacaagggcaagaatgaacctgaggacagcaagctgcgctttgagacctaccagctgatctggcagcagatgaagtcagaaaatgaaaggctgcaggaggagctgaacaagaacctgtttgacaacctgattgagttcctgcagaagagccacagcggcttccagaagaacagccgggacctgggcggccagatcaagctgcgggagatccccacagctgccctggtgctgggcgtgaatgtgacagaccatgacctgaccttcggcagcctgacagaggccctgcagaacaacgtgaccccctacgtggtgtccctgcaggccaaggactgcccagacatgaagcacttcctgcagaagctgatcagccagctgatggactgctgcgtggacatcaagagcaaggaggaggagagcgtgcacgtgacccagaggaagacccactacagcatggacagcctgagctcctggtacatgacagtgacccagaagacagaccccaagatgctgagcaagaagaggaccaccagcagccagtggcagagcccccctgtggtggtgatcctgaaggacatggagagctttgccaccaaggtgctgcaggacttcatcatcatcagcagccagcacctgcacgagttccccctcatcctgatcttcggcatcgccaccagccccatcatcatccaccggctgctgccccatgctgtgagcagcctgctgtgcatcgagctgttccagagcctgagctgcaaggagcacctgaccaccgtgctggacaagctgctgctgaccacccagttccccttcaagatcaatgagaaggtgctgcaggtgctgaccaacatcttcctgtaccatgacttctctgtgcagaacttcatcaagggcctgcagctgagcctgctggagcacttctacagccagcccctgtctgtgctgtgctgcaacctgcctgaggccaagaggcgcatcaacttcctgagcaacaaccagtgtgagaacatccggcggctgcccagcttcagaagatatgtggagaagcaggccagcgagaagcaggtggccctgctgaccaatgaaagatacctgaaggaggagacccagctgctgctggagaacctgcacgtgtaccacatgaactacttcctggtgctgcgctgcctgcacaagttcaccagcagcctgcccaagtaccccctgggccggcagatccgggagctgtactgcacctgcctggagaagaacatctgggacagcgaggagtatgcctctgtgctgcagctgctgaggatgctggccaaggatgagctgatgaccatcctggagaagtgcttcaaggtgttcaagagctactgtgagaaccacctgggcagcacagccaagagaattgaggagttcctggcccagttccagagcctggatgagaccaaggaggaggaggatgccagcggcagccagcccaagggcctgcagaagacagacctgtaccacctgcagaagagcctgctggagatgaaggagctgcggcgcagcaagaagcagaccaagtttgaggtgctgagagaaaatgtggtgaacttcatcgactgcctggtgcgggagtacctgctgcccccagagacccagcccctgcacgaggtggtgtacttctctgctgcccacgccctgcgggagcacctgaatgctgcccccagaattgccctgcacacagccctgaacaacccctactactacctgaagaatgaggccctgaagtctgaggagggctgcatccccaacatcgccccagacatctgcatcgcctacaagctgcacctggagtgcagccgcctcatcaacctggtggactggagcgaggcctttgccaccgtggtgacagctgctgagaagatggatgccaacagcgccaccagcgaggagatgaatgagatcatccacgcccgcttcatccgggctgtgtctgagctggagctgctgggcttcatcaagcccaccaagcagaagacagaccacgtggcccggctgacctggggcggctgctag

SEQ ID NO: 162806 - DNA, 1335 bp, synthetic construct
  misc_feature 1..1335: note = Description of Artificial Sequence: Synthetic coding sequence
  source 1..1335: mol_type = other DNA
atgaagtcagaaaatgaaaggctgcaggaggagctgaacaagaacctgtttgacaacctgattgagttcctgcagaagagccacagcggcttccagaagaacagccgggacctgggcggccagatcaagctgcgggagatccccacagctgccctggtgctgggcgtgaatgtgacagaccatgacctgaccttcggcagcctgacagaggccctgcagaacaacgtgaccccctacgtggtgtccctgcaggccaaggactgcccagacatgaagcacttcctgcagaagctgatcagccagctgatggactgctgcgtggacatcaagagcaaggaggaggagagcgtgcacgtgacccagaggaagacccactacagcatggacagcctgagctcctggtacatgacagtgacccagaagacagaccccaagatgctgagcaagaagaggaccaccagcagccagtggcagagcccccctgtggtggtgatcctgaaggacatggagagctttgccaccaaggtgctgcaggacttcatcatcatcagcagccagcacctgcacgagttccccctcatcctgatctttggaattgccaccagccccatcatcatccaccggctgctgccccatgctgtgagcagcctgctgtgcatcgagctgttccagagcctgagctgcaaggagcacctgaccaccgtgctggacaagctgctgctgaccacccagttccccttcaagatcaatgagaaggtgctgcaggtgctgaccaacatcttcctgtaccatgacttctctgtgcagaacttcatcaagggcctgcagctgagcctgctggagcacttctacagccagcccctgtctgtgctgtgctgcaacctgcctgaggccaagaggcgcatcaacttcctgagcaacaaccagtgtgagaacatccggcggctgcccagcttccgccgctacgtggagaagcaggccagcgagaagcaggtggccctgctgaccaatgaaagatacctgaaggaggagacccagctgctgctggagaacctgcacgtgtaccacatgaactacttcctggtgctgcgctgcctgcacaagttcaccagcagcctgcccaagtaccccctgggccggcagatccgggagctgtactgcacctgcctggagaagaacatctgggacagcgaggagtatgcctctgtgctgcagctgctgcggctgggcctggccttcctggacatccagctgtttggagcccagagcggccaggagctgctgctgcccctgtcctgggaggccaaccccagccacgccgccaacctgggctag

SEQ ID NO: 162807 - DNA, 1707 bp, synthetic construct
  misc_feature 1..1707: note = Description of Artificial Sequence: Synthetic coding sequence
  source 1..1707: mol_type = other DNA
atgaagcacttcctgcagaagctgatcagccagctgatggactgctgcgtggacatcaagagcaaggaggaggagagcgtgcacgtgacccagaggaagacccactacagcatggacagcctgagctcctggtacatgacagtgacccagaagacagaccccaagatgctgagcaagaagaggaccaccagcagccagtggcagagcccccctgtggtggtgatcctgaaggacatggagagctttgccaccaaggtgctgcaggacttcatcatcatcagcagccagcacctgcacgagttccccctcatcctgatctttggaattgccaccagccccatcatcatccaccggctgctgccccatgctgtgagcagcctgctgtgcatcgagctgttccagagcctgagctgcaaggagcacctgaccaccgtgctggacaagctgctgctgaccacccagttccccttcaagatcaatgagaaggtgctgcaggtgctgaccaacatcttcctgtaccatgacttctctgtgcagaacttcatcaagggcctgcagctgagcctgctggagcacttctacagccagcccctgtctgtgctgtgctgcaacctgcctgaggccaagaggcgcatcaacttcctgagcaacaaccagtgtgagaacatccggcggctgcccagcttccgccgctacgtggagaagcaggccagcgagaagcaggtggccctgctgaccaatgaaagatacctgaaggaggagacccagctgctgctggagaacctgcacgtgtaccacatgaactacttcctggtgctgcgctgcctgcacaagttcaccagcagcctgcccaagtaccccctgggccggcagatccgggagctgtactgcacctgcctggagaagaacatctgggacagcgaggagtatgcctctgtgctgcagctgctgaggatgctggccaaggatgagctgatgaccatcctggagaagtgcttcaaggtgttcaagagctactgtgagaaccacctgggcagcacagccaagagaattgaggagttcctggcccagttccagagcctggatgagaccaaggaggaggaggatgccagcggcagccagcccaagggcctgcagaagacagacctgtaccacctgcagaagagcctgctggagatgaaggagctgcggcgcagcaagaagcagaccaagtttgaggtgctgcgggagaatgtggtgaacttcatcgactgcctggtgcgggagtacctgctgcccccagagacccagcccctgcacgaggtggtgtacttctctgctgcccacgccctgcgggagcacctgaatgctgccccccgcatcgccctgcacacagccctgaacaacccctactactacctgaagaatgaggccctgaagtctgaggagggctgcatccccaacatcgccccagacatctgcatcgcctacaagctgcacctggagtgcagccgcctcatcaacctggtggactggagcgaggcctttgccaccgtggtgacagctgctgagaagatggatgccaacagcgccaccagcgaggagatgaatgagatcatccacgcccgcttcatccgggctgtgtctgagctggagctgctgggcttcatcaagcccaccaagcagaagacagaccacgtggcccggctgacctggggcggctgctag

SEQ ID NO: 162808 - DNA, 1311 bp, synthetic construct
  misc_feature 1..1311: note = Description of Artificial Sequence: Synthetic coding sequence
  source 1..1311: mol_type = other DNA
atgagcagcaggaagagcaagagcaacagcctcatccacacagaatgtctgagccaggtgcagaggatcctgcgggagcgcttctgccggcagagcccccacagcaacctgtttggagtgcaggtgcagtacaagcacctgtctgagctgctgaagaggacagccctgcatggagagagcaacagcgtgctgatcatcggcccccggggcagcggcaagaccatgctgatcaaccacgccctgaaggagctgatggagattgaggaggtgtctgaaaatgtgctgcaggtgcacctgaatggcctgctgcagatcaatgacaagatcgccctgaaggagatcacccggcagctgaacctggagaatgtggtgggggacaaggtgtttggcagctttgctgagaacctgtccttcctgctggaggccctgaagaagggggacaggaccagcagctgccctgtgatcttcatcctggatgaatttgacctgtttgcccaccacaagaaccagaccctgctgtacaacctgtttgacatcagccagagcgcccagacccccatcgccgtcatcggcctgacctgccgcctggacatcctggagctgctggagaagagggtgaagagccgcttcagccaccggcagatccacctgatgaacagctttggcttcccccagtatgtgaagatcttcaaggagcagctgagcctgcctgctgagttcccagacaaggtgtttgctgagaagtggaatgaaaatgtgcagtacctgtctgaggacagatctgtgcaggaggtgctgcagaagcacttcaacatcagcaagaacctgcggagcctgcacatgctgctgatgctggccctgaacagagtgacagccagccaccccttcatgacagctgtggacctgatggaggccagccagctgtgcagcatggacagcaaggccaacatcgtgcacggcctgtctgtgctggagatctgcctgatcatcgccatgaagcacctgaatgacatctatgaggaggagcccttcaacttccagatggtgtacaatgagttccagaagtttgtgcagaggaaggcccacagcgtgtacaactttgagaagcctgtggtgatgaaggcctttgagcacctgcagcagctggagctgatcaagcccatggagaggaccagcggcaacagccagcgggagtaccagctgatgaagctgctgctggacaacacccagatcatgaatgccctgcagaagtaccccaactgccccacagatgtgcggcagtgggccaccagcagcctgtcctggctgtag

SEQ ID NO: 162809 - DNA, 1311 bp, synthetic construct; identical to SEQ ID NO: 162808
  misc_feature 1..1311: note = Description of Artificial Sequence: Synthetic coding sequence
  source 1..1311: mol_type = other DNA

SEQ ID NO: 162810 - DNA, 1311 bp, synthetic construct; identical to SEQ ID NO: 162808
  misc_feature 1..1311: note = Description of Artificial Sequence: Synthetic coding sequence
  source 1..1311: mol_type = other DNA

SEQ ID NO: 162811 - DNA, 438 bp, synthetic construct
  misc_feature 1..438: note = Description of Artificial Sequence: Synthetic coding sequence
  source 1..438: mol_type = other DNA
atgagcagcaggaagagcaagagcaacagcctcatccacacagaatgtctgagccaggtgcagaggatcctgcgggagcgcttctgccggcagagcccccacagcaacctgtttggagtgcaggtgcagtacaagcacctgtctgagctgctgaagaggacagccctgcatggagagagcaacagcgtgctgatcatcggcccccggggcagcggcaagaccatgctgatcaaccacgccctgaaggagctgatggagattgaggaggtgtctgaaaatgtgctgcaggtgcacctgaatggcctgctgcagatcaatgacaagatcgccctgaaggagatcacccggcagctgaacctggagaatgtggtgggggacaaggtgtttggcagctttgctgagaacctgtccttcctgctggaggccctgaagaagtag

SEQ ID NO: 162812 - DNA, 384 bp, synthetic construct
  misc_feature 1..384: note = Description of Artificial Sequence: Synthetic coding sequence
  source 1..384: mol_type = other DNA
atgagcagcaggaagagcaagagcaacagcctcatccacacagaatgtctgagccaggtgcagaggatcctgcgggagcgcttctgccggcagagcccccacagcaacctgtttggagtgcaggtgcagtacaagcacctgtctgagctgctgaagaggacagccctgcatggagagagcaacagcgtgctgatcatcggcccccggggcagcggcaagaccatgctgatcaaccacgccctgaaggagctgatggagattgaggaggtgtctgaaaatgtgctgcaggtgcacctgaatggcctgctgcagatcaatgacaagatcgccctgaaggagatcacccggcagctgaacctggagaatgtggtgggggacaagtag

SEQ ID NO: 162813 - DNA, 387 bp, synthetic construct
  misc_feature 1..387: note = Description of Artificial Sequence: Synthetic coding sequence
  source 1..387: mol_type = other DNA
atgagcagcaggaagagcaagagcaacagcctcatccacacagaatgtctgagccaggtgcagaggatcctgcgggagcgcttctgccggcagagcccccacagcaacctgtttggagtgcaggtgcagtacaagcacctgtctgagctgctgaagaggacagccctgcatggagagagcaacagcgtgctgatcatcggcccccggggcagcggcaagaccatgctgatcaaccacgccctgaaggagctgatggagattgaggaggtgtctgaaaatgtgctgcaggtgcacctgaatggcctgctgcagatcaatgacaagatcgccctgaaggagatcacccggcagctgaacctggagaatgtggtgggggacaaggtgtag

SEQ ID NO: 162814 - DNA, 1311 bp, synthetic construct; identical to SEQ ID NO: 162808
  misc_feature 1..1311: note = Description of Artificial Sequence: Synthetic coding sequence
  source 1..1311: mol_type = other DNA

SEQ ID NO: 162815 - DNA, 1059 bp, synthetic construct
  misc_feature 1..1059: note = Description of Artificial Sequence: Synthetic coding sequence
  source 1..1059: mol_type = other DNA
atggagattgaggaggtgtctgaaaatgtgctgcaggtgcacctgaatggcctgctgcagatcaatgacaagatcgccctgaaggagatcacccggcagctgaacctggagaatgtggtgggggacaaggtgtttggcagctttgctgagaacctgtccttcctgctggaggccctgaagaagggggacaggaccagcagctgccctgtgatcttcatcctggatgaatttgacctgtttgcccaccacaagaaccagaccctgctgtacaacctgtttgacatcagccagagcgcccagacccccatcgccgtcatcggcctgacctgccgcctggacatcctggagctgctggagaagagggtgaagagccgcttcagccaccggcagatccacctgatgaacagctttggcttcccccagtatgtgaagatcttcaaggagcagctgagcctgcctgctgagttcccagacaaggtgtttgctgagaagtggaatgaaaatgtgcagtacctgtctgaggacagatctgtgcaggaggtgctgcagaagcacttcaacatcagcaagaacctgcggagcctgcacatgctgctgatgctggccctgaacagagtgacagccagccaccccttcatgacagctgtggacctgatggaggccagccagctgtgcagcatggacagcaaggccaacatcgtgcacggcctgtctgtgctggagatctgcctgatcatcgccatgaagcacctgaatgacatctatgaggaggagcccttcaacttccagatggtgtacaatgagttccagaagtttgtgcagaggaaggcccacagcgtgtacaactttgagaagcctgtggtgatgaaggcctttgagcacctgcagcagctggagctgatcaagcccatggagaggaccagcggcaacagccagcgggagtaccagctgatgaagctgctgctggacaacacccagatcatgaatgccctgcagaagtaccccaactgccccacagatgtgcggcagtgggccaccagcagcctgtcctggctgtag

SEQ ID NO: 162816 - DNA, 1089 bp, synthetic construct
  misc_feature 1..1089: note = Description of Artificial Sequence: Synthetic coding sequence
  source 1..1089: mol_type = other DNA
atgctgatcaaccacgccctgaaggagctgatggagattgaggaggtgtctgaaaatgtgctgcaggtgcacctgaatggcctgctgcagatcaatgacaagatcgccctgaaggagatcacccggcagctgaacctggagaatgtggtgggggacaaggtgtttggcagctttgctgagaacctgtccttcctgctggaggccctgaagaagggggacaggaccagcagctgccctgtgatcttcatcctggatgaatttgacctgtttgcccaccacaagaaccagaccctgctgtacaacctgtttgacatcagccagagcgcccagacccccatcgccgtcatcggcctgacctgccgcctggacatcctggagctgctggagaagagggtgaagagccgcttcagccaccggcagatccacctgatgaacagctttggcttcccccagtatgtgaagatcttcaaggagcagctgagcctgcctgctgagttcccagacaaggtgtttgctgagaagtggaatgaaaatgtgcagtacctgtctgaggacagatctgtgcaggaggtgctgcagaagcacttcaacatcagcaagaacctgcggagcctgcacatgctgctgatgctggccctgaacagagtgacagccagccaccccttcatgacagctgtggacctgatggaggccagccagctgtgcagcatggacagcaaggccaacatcgtgcacggcctgtctgtgctggagatctgcctgatcatcgccatgaagcacctgaatgacatctatgaggaggagcccttcaacttccagatggtgtacaatgagttccagaagtttgtgcagaggaaggcccacagcgtgtacaactttgagaagcctgtggtgatgaaggcctttgagcacctgcagcagctggagctgatcaagcccatggagaggaccagcggcaacagccagcgggagtaccagctgatgaagctgctgctggacaacacccagatcatgaatgccctgcagaagtaccccaactgccccacagatgtgcggcagtgggccaccagcagcctgtcctggctgtag

SEQ ID NO: 162817 - DNA, 660 bp, synthetic construct
  misc_feature 1..660: note = Description of Artificial Sequence: Synthetic coding sequence
  source 1..660: mol_type = other DNA
atgaacagctttggcttcccccagtatgtgaagatcttcaaggagcagctgagcctgcctgctgagttcccagacaaggtgtttgctgagaagtggaatgaaaatgtgcagtacctgtctgaagatagatctgtgcaggaggtgctgcagaagcacttcaacatcagcaagaacctgcggagcctgcacatgctgctgatgctggccctgaacagagtgacagccagccaccccttcatgacagctgtggacctgatggaggccagccagctgtgcagcatggacagcaaggccaacatcgtgcacggcctgtctgtgctggagatctgcctgatcatcgccatgaagcacctgaatgacatctatgaggaggagcccttcaacttccagatggtgtacaatgagttccagaagtttgtgcagaggaaggcccacagcgtgtacaactttgagaagcctgtggtgatgaaggcctttgagcacctgcagcagctggagctgatcaagcccatggagaggaccagcggcaacagccagcgggagtaccagctgatgaagctgctgctggacaacacccagatcatgaatgccctgcagaagtaccccaactgccccacagatgtgcggcagtgggccaccagcagcctgtcctggctgtag

SEQ ID NO: 162818 - DNA, 1308 bp, synthetic construct
  misc_feature 1..1308: note = Description of Artificial Sequence: Synthetic coding sequence
  source 1..1308: mol_type = other DNA
atgccccacctggagaatgtggtgctgtgccgggagagccaggtgtccatcctgcagagcctgtttggagagcggcaccacttctccttccccagcatcttcatctacggccacacagccagcggcaagacctacgtgacccagaccctgctgaagaccctggagctgccccacgtgtttgtgaactgtgtggagtgcttcaccctgcggctgctgctggagcagatcctgaacaagctgaaccacctgagcagcagtgaagatggctgcagcacagagatcacctgtgagaccttcaatgactttgtgcggctcttcaagcaggtgaccacagctgagaacctgaaggaccagacagtgtacatcgtgctggacaaggccgagtacctgcgggacatggaggccaacctgctgcccggcttcctgcggctgcaggagctggccgacagaaatgtgacagtgctcttcctgtctgagatcgtgtgggagaagttccggcccaacacaggctgctttgagccctttgtgctgtacttcccagactacagcatcggcaacctgcagaagatcctgagccatgaccaccccccagagtacagcgctgacttctatgctgcctacatcaacatcctgctgggcgtcttctacacagtgtgccgggacctgaaggagctgcggcacctggccgtgctgaacttccccaagtactgtgagcctgtggtgaagggggaggccagcgagcgggacaccaggaagctgtggagaaatattgagccccacctgaagaaggccatgcagacagtgtacctgcgggagatcagcagcagccagtgggagaagctgcagaaggatgacacagaccccggccagctgaagggcctgagcgcccacacccacgtggagctgccctactacagcaagttcatcctgattgctgcctacctggccagctacaacccagccaggacagacaagcgcttcttcctgaagcaccacggcaagatcaagaagaccaacttcctgaagaagcatgagaagaccagcaaccacctgctgggccccaagcccttccccctggaccggctgctggccatcctgtacagcatcgtggacagccgggtggcccccacagccaacatcttcagccagatcaccagcctggtgaccctgcagctgctgaccctggtgggccatgatgaccagctggatggccccaagtacaagtgcaccgtgtccctggacttcatccgggccatcgccaggacagtgaactttgacatcatcaagtacctgtatgacttcctgtag

SEQ ID NO: 162819 - DNA, 975 bp, synthetic construct
  misc_feature 1..975: note = Description of Artificial Sequence: Synthetic coding sequence
  source 1..975: mol_type = other DNA
atgccccacctggagaatgtggtgctgtgccgggagagccaggtgtccatcctgcagagcctgtttggagagcggcaccacttctccttccccagcatcttcatctacggccacacagccagcggcaagacctacgtgacccagaccctgctgaagaccctggagctgccccacgtgtttgtgaactgtgtggagtgcttcaccctgcggctgctgctggagcagatcctgaacaagctgaaccacctgagcagcagtgaagatggctgcagcacagagatcacctgtgagaccttcaatgactttgtgcggctcttcaagcaggtgaccacagctgagaacctgaaggaccagacagtgtacatcgtgctggacaaggccgagtacctgcgggacatggaggccaacctgctgcccggcttcctgcggctgcaggagctggccgacagaaatgtgacagtgctcttcctgtctgagatcgtgtgggagaagttccggcccaacacaggctgctttgagccctttgtgctgtacttcccagactacagcatcggcaacctgcagaagatcctgagccatgaccaccccccagagtacagcgctgacttctatgctgcctacatcaacatcctgctgggcgtcttctacacagtgtgccgggacctgaaggagctgcggcacctggccgtgctgaacttccccaagtactgtgagcctgtggtgaagggggaggccagcgagcgggacaccaggaagctgtggagaaatattgagccccacctgaagaaggccatgcagacagtgtacctgcgggagatcagcagcagccagtgggagaagctgcagaaggatgacacagaccccggccagctgaagggcatccggggcagcattgagaccgtgactggagacaccagcagcgccaactaccaggacaccaaggtgaacaccaaggagcacagcgtgaggaagtag

SEQ ID NO: 162820 - DNA, 912 bp, synthetic construct
  misc_feature 1..912: note = Description of Artificial Sequence: Synthetic coding sequence
  source 1..912: mol_type = other DNA
atggaggccaacctgctgcccggcttcctgcggctgcaggagctggccgacagaaatgtgacagtgctcttcctgtctgagatcgtgtgggagaagttccggcccaacacaggctgctttgagccctttgtgctgtacttcccagactacagcatcggcaacctgcagaagatcctgagccatgaccaccccccagagtacagcgctgacttctatgctgcctacatcaacatcctgctgggcgtcttctacacagtgtgccgggacctgaaggagctgcggcacctggccgtgctgaacttccccaagtactgtgagcctgtggtgaagggggaggccagcgagcgggacaccaggaagctgtggagaaatattgagccccacctgaagaaggccatgcagacagtgtacctgcgggagatcagcagcagccagtgggagaagctgcagaaggatgacacagaccccggccagctgaagggcctgagcgcccacacccacgtggagctgccctactacagcaagttcatcctgattgctgcctacctggccagctacaacccagccaggacagacaagcgcttcttcctgaagcaccacggcaagatcaagaagaccaacttcctgaagaagcatgagaagaccagcaaccacctgctgggccccaagcccttccccctggaccggctgctggccatcctgtacagcatcgtggacagccgggtggcccccacagccaacatcttcagccagatcaccagcctggtgaccctgcagctgctgaccctggtgggccatgatgaccagctggatggccccaagtacaagtgcaccgtgtccctggacttcatccgggccatcgccaggacagtgaactttgacatcatcaagtacctgtatgacttcctgtag

SEQ ID NO: 162821 - DNA, 1665 bp, synthetic construct
  misc_feature 1..1665: note = Description of Artificial Sequence: Synthetic coding sequence
  source 1..1665: mol_type = other DNA
atgtctgcagatggcggcggcatccaggacacccaggacaaggagaccccacctgaggtgcctgaccggggccacccccaccaggagatgcccagcaagctgggggaggccgtgcccagcggggacacccaggagagcctgcacatcaagatggagcctgaggagccccacagcgagggcgccagccaggaggatggagcccagggcgcctggggctgggcccccctgagccacggcagcaaggagaaggccctcttcctgcccggcggggccctgcccagcccccgcatccctgtgctgagccgggagggccgcacccgggaccggcagatggctgctgccctgctgacagcctggagccagatgcctgtgacctttgaagatgtggccctgtacctgagccgggaggagtggggccgcctggaccacacccagcagaacttctacagagatgtgctgcagaagaagaatggcctgagcctgggcttccccttcagccggcccttctgggccccccaggcccatggaaaaggagaggccagcggcagcagccggcaggccggagatgagaaggagtggaggggggcctgcaccggggctgtggaggtgggccagagggtgcagaccagctctgtggccgccctgggcaatgtgaagcccttccgcaccagggctggccgggtgcagtggggcgtgccccagtgtgcccaggaggccgcctgtggccgcagcagcggccctgccaaggacagcggccagcctgctgagccagacaggaccccagatgctgcccccccagaccccagccccacagagccccaggagtacagagtgcctgagaagcccaatgaggaggagaagggggcccctgagagcggggaggagggcctggccccagattctgaggtgggcaggaagagctaccgctgtgagcagtgtgggaagggcttctcctggcacagccacctggtgacccacaggaggacccacactggagagaagccctatgcctgcacagactgtgggaagagatttggccgcagcagccacctgatccagcaccagatcatccacactggagagaagccctacacctgcccagcctgcaggaagagcttcagccaccacagcaccctcatccagcaccagaggatccacactggagagaagccctacgtgtgtgacagatgtgccaagcgcttcaccaggagaagtgacctggtgacccaccagggcacccacactggagccaagccccacaagtgccccatctgtgccaagtgcttcacccagagcagcgccctggtgacccaccagaggacccacactggagtgaagccctacccctgcccagaatgtgggaagtgcttcagccagaggagcaacctgattgcccacaacagaacccacactggagagaagccctaccactgcctggactgtgggaagagcttcagccacagcagccacctgacagcccaccagaggacccaccggggcgtgcggccctatgcctgccccctgtgtgggaagagcttcagcagaagaagcaacctgcacagacatgagaagatccacaccaccggccccaaggccctggccatgctgatgctgggcgctgctgctgctggggccctggccaccccacctccagcccccacctag

SEQ ID NO: 162822 - DNA, 462 bp, synthetic construct
  misc_feature 1..462: note = Description of Artificial Sequence: Synthetic coding sequence
  source 1..462: mol_type = other DNA
atgaatgtgggcgtggcccacagcgaggtgaaccccaacaccagggtgatgaacagccggggcatgtggctgacctacgccctgggcgtgggcctgctgcacatcgtgctgctgagcatccccttcttctctgtgcctgtggcctggaccctgaccaacatcatccacaacctgggcatgtatgtgttcctgcatgctgtgaagggcaccccatttgagaccccagaccagggcaaggcccggctgctgacccactgggagcagctggactatggagtgcagttcaccagcagcaggaagttcttcaccatcagccccatcatcctgtacttcctggccagcttctacaccaagtatgaccccacccacttcatcctgaacacagccagcctgctgtctgtgctgatccccaagatgccccagctgcatggagtgcgcatcttcggcatcaacaagtactag

SEQ ID NO: 162823 - DNA, 462 bp, synthetic construct; identical to SEQ ID NO: 162822
  misc_feature 1..462: note = Description of Artificial Sequence: Synthetic coding sequence
  source 1..462: mol_type = other DNA

SEQ ID NO: 162824 - DNA, 462 bp, synthetic construct; identical to SEQ ID NO: 162822
  misc_feature 1..462: note = Description of Artificial Sequence: Synthetic coding sequence
  source 1..462: mol_type = other DNA

SEQ ID NO: 162825 - DNA, 330 bp, synthetic construct
  misc_feature 1..330: note = Description of Artificial Sequence: Synthetic coding sequence
  source 1..330: mol_type = other DNA
atgaatgtgggcgtggcccacagcgaggtgaaccccaacaccagggtgatgaacagccggggcatgtggctgacctacgccctgggcgtgggcctgctgcacatcgtgctgctgagcatccccttcttctctgtgcctgtggcctggaccctgaccaacatcatccacaacctgggcatgtatgtgttcctgcatgctgtgaagggcaccccatttgagaccccagaccagggcaaggcccggctgctgacccactgggagcagctggactatggagtgcagttcaccagcagcaggaagttcttcaccatcagccccatcatcctgtag

SEQ ID NO: 162826 - DNA, 330 bp, synthetic construct; identical to SEQ ID NO: 162825
  misc_feature 1..330: note = Description of Artificial Sequence: Synthetic coding sequence
  source 1..330: mol_type = other DNA

SEQ ID NO: 162827 - DNA, 462 bp, synthetic construct
  misc_feature 1..462: note = Description of Artificial Sequence: Synthetic coding sequence
  source 1..462: mol_type = other DNA
atgaatgtgggcgtggcccacagcgaggtgaaccccaacaccagggtgatgaacagccggggcatctggctggcctacatcatcctggtgggcctgctgcacatggtgctgctgagcatccccttcttcagcatccctgtggtgtggaccctgaccaacgtcatccacaacctggccacctacgtgttcctgcacacagtgaagggcaccccatttgagaccccagaccagggcaaggcccggctgctgacccactgggagcagatggactatggcctgcagttcaccagcagcaggaagttcctgagcatcagccccatcgtgctgtacctgctggccagcttctacaccaagtatgatgctgcccacttcctgatcaacacagccagcctgctgtctgtgctgctgcccaagctgccccagttccatggagtgcgggtgtttggcatcaacaagtactag

SEQ ID NO: 162828 - DNA, 462 bp, synthetic construct; identical to SEQ ID NO: 162827
  misc_feature 1..462: note = Description of Artificial Sequence: Synthetic coding sequence
  source 1..462: mol_type = other DNA

SEQ ID NO: 162829 - DNA, 462 bp, synthetic construct
  misc_feature 1..462: note = Description of Artificial Sequence: Synthetic coding sequence
  source 1..462: mol_type = other DNA
atgaatgtgggcacagcccacagcgaggtgaaccccaacaccagggtgatgaacagccggggcatctggctgtcctatgtgctggccatcggcctgctgcacatcgtgctgctgagcatcccctttgtgtctgtgcctgtggtgtggaccctgaccaacctgatccacaacatgggcatgtacatcttcctgcacacagtgaagggcaccccatttgagaccccagaccagggcaaggcccggctgctgacccactgggagcagatggactatggagtgcagttcaccgccagcaggaagttcctgaccatcacccccatcgtgctgtacttcctgaccagcttctacaccaagtatgaccagatccactttgtgctgaacacagtgtccctgatgtctgtgctgatccccaagctgccccagctgcatggagtgcgcatcttcggcatcaacaagtactag

SEQ ID NO: 162830 - DNA, 462 bp, synthetic construct; identical to SEQ ID NO: 162829
  misc_feature 1..462: note = Description of Artificial Sequence: Synthetic coding sequence
  source 1..462: mol_type = other DNA

SEQ ID NO: 162831 - DNA, 1320 bp, synthetic construct
  misc_feature 1..1320: note = Description of Artificial Sequence: Synthetic coding sequence
  source 1..1320: mol_type = other DNA
atgttcagcaagctggcccacctgcagagatttgctgtgctgagcagaggagtgcacagctctgtggccagcgccacctctgtggccaccaagaagacagtgcagggcccccccaccagtgatgacatctttgagcgggagtacaagtacggggcccacaactaccaccccctgcctgtggccctggagcggggcaagggcatctacctgtgggatgtggagggcaggaagtactttgacttcctgagcagctacagcgctgtgaaccagggccactgccaccccaagatcgtgaatgccctgaagagccaggtggacaagctgaccctgaccagccgggccttctacaacaacgtgctgggggagtatgaggagtacatcaccaagctgttcaactaccacaaggtgctgcccatgaacacaggagtggaggccggggagacagcctgcaagctggccaggaagtggggctacacagtgaagggcatccagaagtacaaggccaagatcgtgtttgctgctggcaacttctggggccgcaccctgagcgccatcagcagcagcacagaccccaccagctatgatggcttcggccccttcatgcctggctttgacatcatcccctacaatgacctgcctgccctggagcgggccctgcaggaccccaacgtggccgccttcatggtggagcccatccagggcgaggccggcgtggtggtgcctgaccccggctacctgatgggcgtgcgggagctgtgcaccaggcaccaggtgctcttcatcgcagatgagatccagacaggcctggccaggacaggccgctggctggccgtggactatgaaaatgtgcggccagacatcgtgctgctgggcaaggccctgagcggcggcctgtaccctgtgtctgctgtgctgtgtgatgatgacatcatgctgaccatcaagccaggagaacatggcagcacctatggaggcaaccccctgggctgccgggtggccatcgccgccctggaggtgctggaggaggagaacctggctgaaaatgctgacaagctgggcatcatcctgagaaatgagctgatgaagctgcccagtgatgtggtgacagctgtgcggggcaagggcctgctgaatgccatcgtcatcaaggagaccaaggactgggatgcctggaaggtgtgcctgcggctgcgggacaatggcctgctggccaagcccacccacggggacatcatccgctttgccccacccctggtgatcaaggaggatgagctgcgggagagcattgagatcatcaacaagaccatcctgtccttctag

SEQ ID NO: 162832 - DNA, 906 bp, synthetic construct
  misc_feature 1..906: note = Description of Artificial Sequence: Synthetic coding sequence
  source 1..906: mol_type = other DNA
atgaacacaggagtggaggccggggagacagcctgcaagctggccaggaagtggggctacacagtgaagggcatccagaagtacaaggccaagatcgtgtttgctgctggcaacttctggggccgcaccctgagcgccatcagcagcagcacagaccccaccagctatgatggcttcggccccttcatgcctggctttgacatcatcccctacaatgacctgcctgccctggagcgggccctgcaggaccccaacgtggccgccttcatggtggagcccatccagggcgaggccggcgtggtggtgcctgaccccggctacctgatgggcgtgcgggagctgtgcaccaggcaccaggtgctcttcatcgcagatgagatccagacaggcctggccaggacaggccgctggctggccgtggactatgaaaatgtgcggccagacatcgtgctgctgggcaaggccctgagcggcggcctgtaccctgtgtctgctgtgctgtgtgatgatgacatcatgctgaccatcaagccaggagaacatggcagcacctatggaggcaaccccctgggctgccgggtggccatcgccgccctggaggtgctggaggaggagaacctggctgaaaatgctgacaagctgggcatcatcctgagaaatgagctgatgaagctgcccagtgatgtggtgacagctgtgcggggcaagggcctgctgaatgccatcgtcatcaaggagaccaaggactgggatgcctggaaggtgtgcctgcggctgcgggacaatggcctgctggccaagcccacccacggggacatcatccgctttgccccacccctggtgatcaaggaggatgagctgcgggagagcattgagatcatcaacaagaccatcctgtccttctag

SEQ ID NO: 162833 - DNA, 405 bp, synthetic construct; identical to SEQ ID NO: 155947
  misc_feature 1..405: note = Description of Artificial Sequence: Synthetic coding sequence
  source 1..405: mol_type = other DNA

SEQ ID NO: 162834 - DNA, 1386 bp, synthetic construct
  misc_feature 1..1386: note = Description of Artificial Sequence: Synthetic coding sequence
  source 1..1386: mol_type = other DNA
atgaacaactttggaaatgaggagtttgactgccacttcctggatgagggcttcaccgccaaggacatcctggaccagaagatcaatgaggtgagcagcagtgatgacaaggatgccttctacgtggccgacctgggggacatcctgaagaagcacctgcgctggctgaaggccctgccccgggtgacccccttctatgctgtgaagtgcaatgacagcaaggccatcgtgaagaccctggccgccactggaactggatttgactgtgccagcaagacagagatccagctggtgcagagcctgggcgtgcccccagagcgcatcatctatgccaacccctgcaagcaggtgtcccagatcaagtatgctgccaacaacggggtgcagatgatgacctttgattctgaggtggagctgatgaaggtggcccgggcccaccccaaggccaagctggtgctgagaattgccacagatgacagcaaggctgtgtgccgcctgtctgtgaagtttggagccaccctgcggaccagccggctgctgctggagcgggccaaggagctgaacattgatgtggtgggcgtgtccttccacgtgggcagcggctgcacagatcctgagacctttgtgcaggccatcagtgatgcccgctgtgtgtttgacatgggcgctgaggtgggcttctccatgtacctgctggacatcggcggcggcttccctggctctgaagatgtgaagctgaagtttgaggagatcaccggggtcatcaacccagccctggacaagtacttccccagcgacagcggcgtgcgcatcatcgccgagcccggccgctactacgtggccagcgccttcaccctggccgtgaacatcatcgccaagaagatcgtgctgaaggagcagacaggcagtgatgatgaagatgagagcagcgagcagaccttcatgtactacgtgaatgatggagtgtatggcagcttcaactgcatcctgtatgaccacgcccacgtgaagcccctgctgcagaagaggcccaagccagatgagaagtactacagcagcagcatctggggccccacctgtgatggcctggaccgcatcgtggagcgctgtgacctgcctgagatgcacgtgggggactggatgctgtttgagaacatgggcgcctacacagtggccgccgccagcaccttcaacggcttccagaggcccaccatctactacgtgatgagcggccctgcctggcagctgatgcagcagttccagaacccagacttccccccagaggtggaggagcaggatgccagcaccctgcctgtgtcctgtgcctgggagagcggcatgaagaggcaccgggccgcctgtgccagcgccagcatcaacgtgtag

SEQ ID NO: 162835 - DNA, 207 bp, synthetic construct
  misc_feature 1..207: note = Description of Artificial Sequence: Synthetic coding sequence
  source 1..207: mol_type = other DNA
atgaacaactttggaaatgaggagtttgactgccacttcctggatgagggcttcaccgccaaggacatcctggaccagaagatcaatgaggtgagcagcagtgatgacaaggatgccttctacgtggccgacctgggggacatcctgaagaagcacctgcgctggctgaaggccctgccccgggtgacccccttctatgctgtgtag

SEQ ID NO: 162836 - DNA, 927 bp, synthetic construct
  misc_feature 1..927: note = Description of Artificial Sequence: Synthetic coding sequence
  source 1..927: mol_type = other DNA
atgatgacctttgacagcgaggtggagctgatgaaggtggcccgggcccaccccaaggccaagctggtgctgcgcatcgccacagatgacagcaaggctgtgtgccgcctgtctgtgaagtttggagccaccctgcggaccagccggctgctgctggagcgggccaaggagctgaacattgatgtggtgggcgtgtccttccacgtgggcagcggctgcacagatcctgagacctttgtgcaggccatcagtgatgcccgctgtgtgtttgacatgggcgctgaggtgggcttctccatgtacctgctggacattggaggcggcttccctggctctgaagatgtgaagctgaagtttgaggagatcactggagtcatcaacccagccctggacaagtacttccccagcgacagcggcgtgcgcatcatcgccgagcccggccgctactacgtggccagcgccttcaccctggccgtgaacatcatcgccaagaagatcgtgctgaaggagcagacaggcagtgatgatgaagatgagagcagcgagcagaccttcatgtactacgtgaatgatggagtgtatggcagcttcaactgcatcctgtatgaccacgcccacgtgaagcccctgctgcagaagaggcccaagccagatgagaagtactacagcagcagcatctggggccccacctgtgatggcctggacagaattgtggagcgctgtgacctgcctgagatgcacgtgggggactggatgctgtttgagaacatgggcgcctacacagtggccgccgccagcaccttcaacggcttccagaggcccaccatctactacgtgatgagcggccctgcctggcagctgatgcagcagttccagaacccagacttccccccctgcctgtgcctggtgcccggccgggtgggctag

SEQ ID NO: 162837 - DNA, 684 bp, synthetic construct
  misc_feature 1..684: note = Description of Artificial Sequence: Synthetic coding sequence
  source 1..684: mol_type = other DNA
atggtgaagagcagcctgcagaggatcctgaacagccactgctttgcccgggagaaggagggggacaagcccagcgccaccatccacgccagcaggaccatgcccctgctgagcctgcacagcagaggaggcagcagcagcgagagcagccgggtgtccctgcactgctgcagcaaccctggccctggcccccgctggtgtgatgccccccacccccccctgaagatccctgggggccggggcaacagccagagggaccacaacctgagcgccaacctcttctacagtgatgaccggctgaatgtgacagaggagctgaccagcaatgacaagacccgcatcctgaatgtgcagagccggctgacagatgccaagaggatcaactggaggacagtgctgagcggcggcagcctgtacatcgagatccctggaggagccctgcctgagggcagcaaggacagctttgctgtgctgctggagtttgctgaggagcagctgcgggctgaccacgtgttcatctgcttccacaagaaccgggaggacagagctgccctgctgcggaccttctccttcctgggctttgagatcgtgcggcccggccaccccctggtgcccaagaggccagatgcctgcttcatggcctacacctttgagcgggagagcagcggggaggaggaggagtag

SEQ ID NO: 162838 - DNA, 831 bp, synthetic construct
  misc_feature 1..831: note = Description of Artificial Sequence: Synthetic coding sequence
  source 1..831: mol_type = other DNA
atgtggatcaccagcctcatcaccatgaaggatgaggacatctttgacctggccggggacccccaggacagcctcatccctggccccagccccacccccaagcagaaccctgtgtgcaatgaggccttcttcggccaccagaccttcagcctgcgggagaccggcctgaagtctgtgcactgccagggccaggaggccgagaacatggagcgggagaagttccagcagaaggccctgaagcagaccaagcagaagaagagcaagtctgctgagttcctgatggtgaaggaggaccgggaggccacagagggcactggaaatcctgccttcaacatgagcagcccagacctgagcgcctgccagacagctgagaagaaggtgatcagacatgacatgccagacaggaccctggccgcccaccagcagaagttccggctgcctgccagcgctgagcccaagggaaatgaatatggaagaaactactttgaccccctgatggatgaggagatcaacccccggcagtgtgccacagaggtgtcccgggaggatgaaagtggccgggaggagaccctgaacagcgaggcccctggcagcagcaacaagagccatgagatccacaaggaggccagcgaggccaccacagcccacctggaggagttccagaggagccagaagaccatcatcctgctgggcagcagccccctggagcaggagatccgcagcaccagcctgcactgcatggaggatgagatgagccacccctggatcctgctgctgaaggtgacagctgtgatccgcagccgccgctactaccgggagcagcgcttctag

SEQ ID NO: 162839 - DNA, 1443 bp, synthetic construct
  misc_feature 1..1443: note = Description of Artificial Sequence: Synthetic coding sequence
  source 1..1443: mol_type = other DNA
atggagcgggagaagttccagcagaaggccctgaagcagaccaagcagaagaagagcaagtctgctgagttcctgatggtgaaggaggaccgggaggccacagagggcactggaaatcctgccttcaacatgagcagcccagacctgagcgcctgccagacagctgagaagaaggtgatcagacatgacatgccagacaggaccctggccgcccaccagcagaagttccggctgcctgccagcgctgagcccaagggaaatgaatatggaagaaactactttgaccccctgatggatgaggagatcaacccccggcagtgtgccacagaggtgtcccgggaggtgtgcctgatggccaagggggagaaggccgagagcggcgtggacaacacagctggcctgtctgagaaggagacccagaagaacccccgggcccccatggatgaagcagatgtgaagtctgctgcccacagcagccagggcagcatccccaagaagattggcccctgcagcatggactatgaccccaacctgctggaggaggatgatgagctgcacagccagggcgacagcctgacagaccacagcgtgaagggcaagagcacagtgtggagaattggagaggccgaggactacagccaggacatctcctacctggaggagctggaggagcaccgcttctctgtgtgctgcagctctgtggccgacagccgctatggagacttcttcaagcacctgcactttgtgctggtgtctgccagcagcgagctgcagctgagccagtggcagagccagggcttctggtacatcatcctgctgatgttcttcctgtggttcctgcggctgtacctgcactacctgggccagtggctgttcctgcaggccatcagcacccctgtgaccaagttccacttcagcctgcacatcgtggagctgtgctaccccaccagcagcctgcacatcggggaggagctgcctgtggtggtgatgggccccctgatgctgaatgccatcctgctgctgctggtgctgatccgctggggctgccagctgctgtttgccagctgcccagatgtgctgagcaagctgatcatcaccatgggcctgtggaccatcctggaccccctggccgtgttcatcctggacaccctgctgggccgcctgacagacaatgaggagacccctgtggctgatgctgccaagctgtactggatgtttgtgaggacagtgcagcccggcatcctgggcgtggtgatcaccgtgctgctgtacatcctgctcttcgtcatcagcagcctcatcctgtacctgtactgcctgcggctgcacaatgacagctggatcctggatgccttccagaggatccacagcgaggagaccaagttcttcatcccctatgacctggagatcagcaaccaggagctgagctacatcgtgaagtag

SEQ ID NO: 162840 - DNA, 606 bp, synthetic construct
  misc_feature 1..606: note = Description of Artificial Sequence: Synthetic coding sequence
  source 1..606: mol_type = other DNA
atggccctgtcctgggtgctgactgtgctgagcctgctgcccctgctggaggcccagatccccctgtgtgccaacctggtgcctgtgcccatcaccaatgccaccctggaccgcatcaccgggaagtggttctacatcgccagcgccttcagaaatgaggagtacaacaagtctgtgcaggagatccaggccaccttcttctacttcacccccaacaagacagaggacaccatcttcctgcgggagtaccagacccggcaggaccagtgcatctacaacaccacctacctgaatgtgcagcgggagaatggcaccatcagccgctacgtgggcggccaggagcactttgcccacctgctgatcctgcgggacaccaagacctacatgctggcctttgatgtgaatgatgagaagaactggggcctgtctgtgtatgctgacaagccagagaccaccaaggagcagctgggggagttctatgaggccctggactgcctgcgcatccccaagagtgatgtggtgtacacagactggaagaaggacaagtgtgagcccctggagaagcagcacgagaaggagaggaagcaggaggagggggagagctag

SEQ ID NO: 162841 - DNA, 585 bp, synthetic construct
  misc_feature 1..585: note = Description of Artificial Sequence: Synthetic coding sequence
  source 1..585: mol_type = other DNA
atggccctgtcctgggtgctgactgtgctgagcctgctgcccctgctggaggcccagatccccctgtgtgccaacctggtgcctgtgcccatcaccaatgccaccctggacagagtgtctgcctgggccagccctgtgctgagcacctgggccgccgccagcctgctgtgggccagcctgagcctgctggccgtggtgggcccccccctgcctgccctgcccttcagcctgctgggcccccagggcgagatcctgaccagccctggggacagcggcggcaccccctgcctgcagacccagaagccccactgccgggtgctgcacggcggccgcttctgtgccggccctgggggcgccgcctggggcgccatgacagacccccagggcgagctgctgcacgcccactgccccccaggggccagcagcccccacctgcagaaccagggcgagatctgcctgagcctgctgcctgctgacagccagcgcttcagcatcaagccacccagccctgcccccaccttctccccagaccactggcaggtggtgctgtaccgcatcggcctgagcaagaggggcgtgcagtag

SEQ ID NO: 162842 - DNA, 585 bp, synthetic construct
  misc_feature 1..585: note = Description of Artificial Sequence: Synthetic coding sequence
  source 1..585: mol_type = other DNA
atggccctgtcctgggtgctgactgtgctgagcctgctgcccctgctggaggcccagatccccctgtgtgccaacctggtgcctgtgcccatcaccaatgccaccctggacagagtgtctgcctgggccagccctgtgctgagcacctgggccgccgccagcctgctgtgggccagcctgtacctgctggccgtggtggccccacccctgcctgccctgcccttcagcctgctgggcccccagggcgagatcctgaccagccctggggacagcggcggcaccccctgcctgcagacccagaagccccactgccgggtgctgcacggcggccgcttctgtgccggccctgggggcgccgcctggggcgccatgacagacccccagggcgagctgctgcacgcccactgccccccaggggccagcagcccccacctgcagaaccagggcgagatctgcctgagcctgctgcctgctgacagccagcgcttcagcatcaagccacccagccctgccccacccttctccccagaccactggcaggtggtgctgtaccgcatcggcctgagcaagaggggcgtgcagtag

SEQ ID NO: 162843 - DNA, 606 bp, synthetic construct
  misc_feature 1..606: note = Description of Artificial Sequence: Synthetic coding sequence
  source 1..606: mol_type = other DNA
atggccctgtcctgggtgctgactgtgctgagcctgctgcccctgctggaggcccagatccccctgtgtgccaacctggtgcctgtgcccatcaccaatgccaccctggaccgcatcaccgggaagtggttctacatcgccagcgccttcagaaatgaggagtacaacaagtctgtgcaggagatccaggccaccttcttctacttcacccccaacaagacagaggacaccatcttcctgcgggagtaccagacccggcagaaccagtgcttctacaacagcagctacctgaatgtgcagcgggagaatggaacagtgagccgctatgaaggaggccgggagcacgtggcccacctgctcttcctgcgggacaccaagaccctgatgtttggcagctacctggatgatgagaagaactggggcctgtccttctacgccgacaagccagagaccaccaaggagcagctgggggagttctatgaggccctggactgcctgtgcatccccaggagtgatgtgatgtacacagactggaagaaggacaagtgtgagcccctggagaagcagcacgagaaggagaggaagcaggaggagggggagagctag

SEQ ID NO: 162844 - DNA, 1065 bp, synthetic construct
  misc_feature 1..1065: note = Description of Artificial Sequence: Synthetic coding sequence
  source 1..1065: mol_type = other DNA
atgatgagctacctgaagcagcccccctacggcatgaatggcctgggcctggccggccctgccatggacctgctgcaccccagcgtgggctacccagccacccccaggaagcagaggcgggagaggaccaccttcaccaggagccagctggatgtgctggaggccctgtttgccaagacccgctacccagacatcttcatgagggaggaggtggccctgaagatcaacctgcctgagagccgggtgcaggtgtggttcaagaacagaagagccaagtgccggcagcagcagcagagcggcagcggcaccaagagcaggcctgccaagaagaagagcagccctgtgcgggagagcagcggcagcgagagcagcggccagttcaccccacctgctgtgagcagcagcgccagcagcagcagcagcgccagcagcagcagcgccaacccagctgctgctgctgctgctggcctgggcggcaaccctgtggccgccgccagcagcctgagcaccccagctgccagcagcatctggagccctgccagcatcagccctggcagcgccccagcctctgtgtctgtgcctgagcccctggccgcccccagcaacaccagctgcatgcagaggtctgtggccgccggggccgccacagctgctgccagctaccccatgtcctatggccagggcggcagctatggccagggctaccccacccccagcagcagctactttggaggagtggactgcagcagctacctggcccccatgcacagccaccaccacccccaccagctgagccccatggcccccagctccatggccggccaccaccaccaccacccccacgcccaccaccccctgagccagagcagcggccaccaccaccaccaccaccaccaccaccaccagggctacggcggcagcggcctggccttcaacagcgctgactgcctggactacaaggagcccggggctgctgctgccagcagcgcctggaagctgaacttcaacagcccagactgcctggactacaaggaccaggcctcctggaggttccaggtgctgtag

SEQ ID NO: 162845 - DNA, 1065 bp, synthetic construct; identical to SEQ ID NO: 162844
  misc_feature 1..1065: note = Description of Artificial Sequence: Synthetic coding sequence
  source 1..1065: mol_type = other DNA

SEQ ID NO: 162846 - DNA, 894 bp, synthetic construct
  misc_feature 1..894: note = Description of Artificial Sequence: Synthetic coding sequence
  source 1..894: mol_type = other DNA
atgatgagctacctgaagcagcccccctatgctgtgaatggcctgagcctgaccaccagcggcatggacctgctgcaccccagcgtgggctacccaggcccctgggccagctgcccagctgccacccccaggaagcagaggcgggagaggaccaccttcacccgggcccagctggatgtgctggaggccctgtttgccaagacccgctacccagacatcttcatgagggaggaggtggccctgaagatcaacctgcctgagagccgggtgcaggtgtggttcaagaacagaagagccaagtgccggcagcagcagcagcagcagcagaatggaggccagaacaaggtgcggcctgccaagaagaagaccagccctgcccgggaggtgtcctctgagagcggcaccagcggccagttcaccccacccagcagcacctctgtgcccaccatcgccagcagcagcgcccctgtgtccatctggagccctgccagcatcagccccctgagtgaccccctgagcaccagcagcagctgcatgcagaggagctaccccatgacctacacccaggccagcggctacagccagggctacgccggcagcaccagctactttggaggcatggactgtggcagctacctgacccccatgcaccaccagctgcccggccctggggccaccctgagccccatgggcaccaatgctgtgaccagccacctgaaccagagccctgccagcctgagcacccagggctatggagccagcagcctgggcttcaacagcaccacagactgcctggactacaaggaccagacagcctcctggaagctgaacttcaatgctgactgcctggactacaaggaccagaccagctcctggaagttccaggtgctgtag

SEQ ID NO: 162847 - DNA, 870 bp, synthetic construct
  misc_feature 1..870: note = Description of Artificial Sequence: Synthetic coding sequence
  source 1..870: mol_type = other DNA
atgatgagctacctgaagcagcccccctatgctgtgaatggcctgagcctgaccaccagcggcatggacctgctgcaccccagcgtgggctacccagccacccccaggaagcagaggcgggagaggaccaccttcacccgggcccagctggatgtgctggaggccctgtttgccaagacccgctacccagacatcttcatgagggaggaggtggccctgaagatcaacctgcctgagagccgggtgcaggtgtggttcaagaacagaagagccaagtgccggcagcagcagcagcagcagcagaatggaggccagaacaaggtgcggcctgccaagaagaagaccagccctgcccgggaggtgtcctctgagagcggcaccagcggccagttcaccccacccagcagcacctctgtgcccaccatcgccagcagcagcgcccctgtgtccatctggagccctgccagcatcagccccctgagtgaccccctgagcaccagcagcagctgcatgcagaggagctaccccatgacctacacccaggccagcggctacagccagggctacgccggcagcaccagctactttggaggcatggactgtggcagctacctgacccccatgcaccaccagctgcccggccctggggccaccctgagccccatgggcaccaatgctgtgaccagccacctgaaccagagccctgccagcctgagcacccagggctatggagccagcagcctgggcttcaacagcaccacagactgcctggactacaaggaccagacagcctcctggaagctgaacttcaatgctgactgcctggactacaaggaccagaccagctcctggaagttccaggtgctgtag

SEQ ID NO: 162848 - DNA, 720 bp, synthetic construct
  misc_feature 1..720: note = Description of Artificial Sequence: Synthetic coding sequence
  source 1..720: mol_type = other DNA
atgatgagctacctgaagcagcccccctatgctgtgaatggcctgagcctgaccaccagcggcatggacctgctgcaccccagcgtgggctacccaggcccctgggccagctgcccagctgccacccccaggaagcagaggcgggagaggaccaccttcacccgggcccagctggatgtgctggaggccctgtttgccaagacccgctacccagacatcttcatgagggaggaggtggccctgaagatcaacctgcctgagagccgggtgcaggtgtggttcaagaacagaagagccaagtgccggcagcagcagcagcagcagcagaatggaggccagaacaaggtgcggcctgccaagaagaagaccagccctgcccgggaggtgtcctctgagagcggcaccagcggccagttcaccccacccagcagcacctctgtgcccaccatcgccagcagcagcgcccctgtgtccatctggagccctgccagcatcagccccctgagtgaccccctgagcaccagcagcagctgcatgcagaggagctaccccatgacctacacccaggccagcggctacagccagggctacgccggcagcaccagctactttggaggcatggactgtggcagctacctgacccccatgcaccaccagctgcccggccctggggccaccctgagccccatgggcaccaatgctgtgaccagccacctgtag

SEQ ID NO: 162849 - DNA, 870 bp, synthetic construct; identical to SEQ ID NO: 162847
  misc_feature 1..870: note = Description of Artificial Sequence: Synthetic coding sequence
  source 1..870: mol_type = other DNA

SEQ ID NO: 162850 - DNA, 492 bp, synthetic construct
  misc_feature 1..492: note = Description of Artificial Sequence: Synthetic coding sequence
  source 1..492: mol_type = other DNA
atgatgagctacctgaagcagcccccctatgctgtgaatggcctgagcctgaccaccagcggcatggacctgctgcaccccagcgtgggctacccagccacccccaggaagcagaggcgggagaggaccaccttcacccgggcccagctggatgtgctggaggccctgtttgccaagacccgctacccagacatcttcatgagggaggaggtggccctgaagatcaacctgcctgagagccgggtgcaggtgtggttcaagaacagaagagccaagtgccggcagcagcagcagcagcagcagaatggaggccagaacaaggtgcggcctgccaagaagaagaccagccctgcccgggaggtgtcctctgagagcggcaccagcggccagttcaccccacccagcagcacctctgtgcccaccatcgccagcagcagcgcccctgtgtccatctggagccctgccagcatcagccccctgagtgacccctag

SEQ ID NO: 162851 - DNA, 978 bp, synthetic construct
  misc_feature 1..978: note = Description of Artificial Sequence: Synthetic coding sequence
  source 1..978: mol_type = other DNA
atgctgagccatgctgacctgctggatgcccggctgggcatgaaggatgctgctgagctgctgggccaccgggaggccgtgaagtgccgcctgggcgtgggcggcagtgaccccggcggccaccctggggacctggcccccaacagcgaccctgtggagggcgccaccctgctgcctggagaggacatcaccaccgtgggcagcaccccagccagcctggccgtgtctgccaaggaccctgacaagcagcccggcccccagggcggccccaaccccagccaggccggccagcagcagggccagcagaagcagaagaggcacaggacccgcttcaccccagcccagctgaatgagctggagaggagctttgccaagacccactacccagacatcttcatgagggaggagctggccctgagaattggcctgacagagagccgggtgcaggtgtggttccagaacagaagagccaagtggaagaagaggaagaagaccaccaacgtgttccgggcccctggcaccctgctgcccaccccaggcctgccccagttccccagcgctgctgctgctgctgctgctgccatgggagacagcctgtgcagcttccacgccaatgacacccgctgggccgccgccgccatgcctggggtgtcccagctgcccctgcccccagccctgggccggcagcaggccatggcccagagcctgagccagtgcagcctggccgccggccccccacccaacagcatgggcctgagcaacagcctggccggcagcaatggagctggcctgcagagccacctgtaccagcctgccttccctggcatggtgcctgccagcctgcccggccccagcaatgtgtctggcagcccccagctgtgcagcagcccagacagcagtgatgtgtggaggggcaccagcatcgccagcctgcggaggaaggccctggagcacacagtgtccatgtccttcacctag

SEQ ID NO: 162852 - DNA, 912 bp, synthetic construct
  misc_feature 1..912: note = Description of Artificial Sequence: Synthetic coding sequence
  source 1..912: mol_type = other DNA
atgggcatcgtgcagatctgcaagggggagtacttctggctggagcccaagaatgcctttgagaacttccaggagccagacatcggcctggtggccctggccttcctgcagggcagctttgcctacggcggctggaacttcctgaactacgtgacagaggagctggtggacccctacaagaacctgccccgggccatcttcatcagcatccccctggtgacctttgtgtatgtgtttgccaacgtggcctacgtgacagccatgagcccccaggagctgctggccagcaatgctgtggccgtgacctttggagagaagctgctgggcgtgatggcctggatcatgcccatctctgtggccctgagcaccttcggcggcgtgaatggcagcctcttcaccagcagccgcctcttctttgctggggcccgggagggccacctgcccagcgtgctggccatgattcatgtgaagcgctgcacccccatcccagccctgctcttcacctgcatcagcaccctgctgatgctggtgaccagtgacatgtacaccctcatcaactacgtgggcttcatcaactacctgttctacggcgtgacagtggccggccagatcgtgctgcgctggaagaagccagacatcccccggcccatcaagatcaacctgctcttccccatcatctacctgctcttctgggccttcctgctggtgttcagcctgtggagcgagcctgtggtgtgtggcatcggcctggccatcatgctgactggagtgcctgtgtacttcctgggcgtgtactggcagcacaagcccaagtgcttcagtgacttcatcgagctgctgaccctggtgtcccagaagatgtgtgtggtggtgtacccagaggtggagggcctgcgggaccggggcggctag

SEQ ID NO: 162853 - DNA, 861 bp, synthetic construct
  misc_feature 1..861: note = Description of Artificial Sequence: Synthetic coding sequence
  source 1..861: mol_type = other DNA
atggccctggtgctgatcctgcagctgctgaccctgtggcccctgtgccacacagacatcaccccatctgtggccatcatcgtgcccccagccagctaccaccccaagccctggctgggcgcccagcctgccaccgtggtgaccccaggagtgaatgtgaccctgcgctgccgggccccccagcctgcctggaggtttggcctcttcaagccaggagagatcgcccccctgctcttcagagatgtgagcagcgagctggccgagttcttcctggaggaggtgaccccagcccagggcggcatctaccgctgctgctacagaagaccagactggggccctggggtgtggagccagcccagtgatgtgctggagctgctggtgacagaggagctgccccggcccagcctggtggccctgcccggccctgtggtgggccctggggccaacgtgtccctgcgctgtgccggccgcctgaggaacatgagctttgtgctgtaccgggagggcgtggccgcccccctgcagtaccgccacagcgcccagccctgggccgacttcaccctgctgggcgcccgggcccctggcacctacagctgctactaccacaccccatctgccccctacgtgctgagccagaggtctgaggtgctggtgatctcctgggagggggagggccctgaggcccggcctgccagcagcgcccctggcatgcaggcccctggccccccacccagcgaccccggggcccaggcccccagcctgagcagcttccggccccggggcctggtgctgcagcccctgctgccccagacccaggacagctgggaccctgcccccccacccagcgaccccggggtgtag

SEQ ID NO: 162854 - DNA, 849 bp, synthetic construct
  misc_feature 1..849: note = Description of Artificial Sequence: Synthetic coding sequence
  source 1..849: mol_type = other DNA
atggccctggtgctgatcctgcagctgctgaccctgtggcccctgtgccacacagacatcaccccatctgtgcccccagccagctaccaccccaagccctggctgggcgcccagcctgccaccgtggtgaccccaggagtgaatgtgaccctgcgctgccgggccccccagcctgcctggaggtttggcctcttcaagccaggagagatcgcccccctgctcttcagagatgtgagcagcgagctggccgagttcttcctggaggaggtgaccccagcccagggcggcatctaccgctgctgctacagaagaccagactggggccctggggtgtggagccagcccagtgatgtgctggagctgctggtgacagaggagctgccccggcccagcctggtggccctgcccggccctgtggtgggccctggggccaacgtgtccctgcgctgtgccggccgcctgaggaacatgagctttgtgctgtaccgggagggcgtggccgcccccctgcagtaccgccacagcgcccagccctgggccgacttcaccctgctgggcgcccgggcccctggcacctacagctgctactaccacaccccatctgccccctacgtgctgagccagaggtctgaggtgctggtgatctcctgggagggggagggccctgaggcccggcctgccagcagcgcccctggcatgcaggcccctggccccccacccagcgaccccggggcccaggcccccagcctgagcagcttccggccccggggcctggtgctgcagcccctgctgccccagacccaggacagctgggaccctgcccccccacccagcgaccccggggtgtag

SEQ ID NO: 162855 - DNA, 759 bp, synthetic construct
  misc_feature 1..759: note = Description of Artificial Sequence: Synthetic coding sequence
  source 1..759: mol_type = other DNA
atggccctggtgctgatcctgcagctgctgaccctcttccccccagccagctaccaccccaagccctggctgggcgcccagcctgccaccgtggtgaccccaggagtgaatgtgaccctgcgctgccgggccccccagcctgcctggaggtttggcctcttcaagccaggagaaattgcccccctgctcttcagagatgtgtcctctgagctggccgagttcttcctggaggaggtgaccccagcccagggcggcatctaccgctgctgctacagaagaccagactggggccctggggtgtggagccagcccagtgatgtgctggagctgctggtgacagaggagctgccccggcccagcctggtggccctgcccggccctgtggtgggccctggggccaacgtgtccctgcgctgtgccggccgcctgaggaacatgagctttgtgctgtaccgggagggcgtggccgcccccctgcagtaccgccacagcgcccagccctgggccgacttcaccctgctgggcgcccgggcccctggcacctacagctgctactaccacacccccagcgccccctacgtgctgagccagaggtctgaggtgctggtgatctcctgggaggacagcggcagcagtgactacacccggggcaacctggtgcggctgggcctggccggcctggtgctgatcagcctgggcgccctggtgacctttgactggaggagccagaacagagccccagctggcatccggccctag

SEQ ID NO: 162856 - DNA, 804 bp, synthetic construct
  misc_feature 1..804: note = Description of Artificial Sequence: Synthetic coding sequence
  source 1..804: mol_type = other DNA
atggccctggtgctgatcctgcagctgctgaccctgtggcccctgtgccacacagacatcaccccatctgtggccatcatcgtgcccccagccagctaccaccccaagccctggctgggcgcccagcctgccaccgtggtgaccccaggagtgaatgtgaccctgcgctgccgggccccccagcctgcctggaggtttggcctcttcaagccaggagagatcgcccccctgctcttcagagatgtgagcagcgagctggccgagttcttcctggaggaggtgaccccagcccagggcggcatctaccgctgctgctacagaagaccagactggggccctggggtgtggagccagcccagtgatgtgctggagctgctggtgacagaggagctgccccggcccagcctggtggccctgcccggccctgtggtgggccctggggccaacgtgtccctgcgctgtgccggccgcctgaggaacatgagctttgtgctgtaccgggagggcgtggccgcccccctgcagtaccgccacagcgcccagccctgggccgacttcaccctgctgggcgcccgggcccctggcacctacagctgctactaccacaccccatctgccccctacgtgctgagccagaggtctgaggtgctggtgatctcctgggaggacagcggcagcagtgactacacccggggcaacctggtgcggctgggcctggccggcctggtgctgatcagcctgggcgccctggtgacctttgactggaggagccagaacagagccccagctggcatccggccctag

SEQ ID NO: 162857 - DNA, 792 bp, synthetic construct
  misc_feature 1..792: note = Description of Artificial Sequence: Synthetic coding sequence
  source 1..792: mol_type = other DNA
atggccctggtgctgatcctgcagctgctgaccctgtggcccctgtgccacacagacatcaccccatctgtgcccccagccagctaccaccccaagccctggctgggcgcccagcctgccaccgtggtgaccccaggagtgaatgtgaccctgcgctgccgggccccccagcctgcctggaggtttggcctcttcaagccaggagagatcgcccccctgctcttcagagatgtgagcagcgagctggccgagttcttcctggaggaggtgaccccagcccagggcggcatctaccgctgctgctacagaagaccagactggggccctggggtgtggagccagcccagtgatgtgctggagctgctggtgacagaggagctgccccggcccagcctggtggccctgcccggccctgtggtgggccctggggccaacgtgtccctgcgctgtgccggccgcctgaggaacatgagctttgtgctgtaccgggagggcgtggccgcccccctgcagtaccgccacagcgcccagccctgggccgacttcaccctgctgggcgcccgggcccctggcacctacagctgctactaccacaccccatctgccccctacgtgctgagccagaggtctgaggtgctggtgatctcctgggaggacagcggcagcagtgactacacccggggcaacctggtgcggctgggcctggccggcctggtgctgatcagcctgggcgccctggtgacctttgactggaggagccagaacagagccccagctggcatccggccctag

SEQ ID NO: 162858 - DNA, 645 bp, synthetic construct
  misc_feature 1..645: note = Description of Artificial Sequence: Synthetic coding sequence
  source 1..645: mol_type = other DNA
atgagcaagcccccacccaagcctgtgaagccaggccaggtgaaggtgttccgggccctgtacacctttgagcccaggaccccagatgagctgtactttgaggagggggacatcatctacatcacagacatgtctgacaccaactggtggaagggcaccagcaaaggaagaacaggcctcatccccagcaactacgtggccgagcaggccgagagcattgacaaccccctgcacgaggccgccaagaggggcaacctgtcctggctgagagaatgtctggacaacagagtgggcgtgaatggcctggacaaggccggcagcacagccctgtactgggcctgccacggcggccacaaggacatcgtggagatgctgttcacccagcccaacatcgagctgaaccagcagaacaagctgggggacacagccctgcacgccgccgcctggaagggctatgctgacatcgtgcagctgctgctggccaagggggccaggacagacctgagaaatattgagaagaagctggcctttgacatggccaccaatgctgcctgtgccagcctgctgaagaagaagcagggcacagatgctgtgaggaccctgagcaatgctgaggactacctggatgatgaagattctgactag

SEQ ID NO: 162859 - DNA, 897 bp, synthetic construct
  misc_feature 1..897: note = Description of Artificial Sequence: Synthetic coding sequence
  source 1..897: mol_type = other DNA
atgaagaccctgcagagcaccctgctgctgctgctgctggtgcccctcatcaagccagccccacccacccagcaggacagccgcatcatctatgactatggaacagacaactttgaggagagcatcttcagccaggactatgaggacaagtacctggatggcaagaacatcaaggagaaggagaccgtcatcatccccaatgagaagagcctgcagctgcagaaggatgaggccatcacccccctgccccccaagaaggaaaatgatgagatgcccacctgcctgctgtgtgtgtgcctgagcggctctgtgtactgtgaggaggtggacattgatgctgtgccccccctgcccaaggagagcgcctacctgtatgcccgcttcaacaagatcaagaagctgacagccaaggactttgctgacatccccaacctgcggcggctggacttcaccggcaacctgattgaggacattgaagatggcaccttcagcaagctgagcctgctggaggagctgagcctggccgagaaccagctgctgaagctgcctgtgctgccccccaagctgaccctcttcaatgccaagtacaacaagatcaagagccggggcatcaaggccaatgccttcaagaagctgaacaacctgaccttcctgtacctggaccacaatgccctggagagcgtgcccctgaacctgcctgagagcctgcgggtcatccacctgcagttcaacaacatcgccagcatcacagatgacaccttctgcaaggccaatgacaccagctacatccgggacagaattgaggagatccggctggagggcaaccccatcgtgctgggcaagcaccccaacagcttcatctgcctgaagaggctgcccatcggcagctacttctag

SEQ ID NO: 162860 - DNA, 897 bp, synthetic construct; identical to SEQ ID NO: 162859
  misc_feature 1..897: note = Description of Artificial Sequence: Synthetic coding sequence
  source 1..897: mol_type = other DNA

SEQ ID NO: 162861 - DNA, 807 bp, synthetic construct
  misc_feature 1..807: note = Description of Artificial Sequence: Synthetic coding sequence
  source 1..807: mol_type = other DNA
atgctggccaagatcagcaccacctggaagctgttcctgaagctgctgggccctgagatcctgctgagcagcctgaagagccgccacagcttcagccacagccccagccacctgggcctgatgcacagacatgagcacctgctgaggaagaccaccaagaacttcaagacagccaccaccaccctgcagagcaccctgctgctgctgctgctggtgcccctcatcaagccagccccacccacccagcaggacagccgcatcatctatgactatggaacagacaactttgaggagagcatcttcagccaggactatgaggacaagtacctggatggcaagaacatcaaggagaaggagaccgtcatcatccccaatgagaagagcctgcagctgcagaaggatgaggccatcacccccctgccccccaagaaggaaaatgatgagatgcccacctgcctgctgtgtgtgtgcctgagcggctctgtgtactgtgaggaggtggacattgatgctgtgccccccctgcccaaggagagcgcctacctgtatgcccgcttcaacaagatcaagaagctgacagccaaggactttgctgacatccccaacctgcggcggctggacttcaccggcaacctgattgaggacattgaagatggcaccttcagcaagctgagcctgctggaggagctgagcctggccgagaaccagctgctgaagctgcctgtgctgccccccaagctgaccctcttcaatgccaagtacaacaagatcaagagccggggcatcaaggccaatgccttcaagtag

SEQ ID NO: 162862 - DNA, 1842 bp, synthetic construct
  misc_feature 1..1842: note = Description of Artificial Sequence: Synthetic coding sequence
  source 1..1842: mol_type = other DNA
atggctgctgagaccctgctgagcagcctgctgggcctgctgctgctgggcctgctgctgcctgccagcctgactggaggagtgggcagcctgaacctggaggagctgtctgagatgagatatggaattgagatcctgcccctgcctgtgatgggcggccagagccagagcagtgatgtggtgattgtgagcagcaagtacaagcagagatatgagtgccgcctgcctgctggggccatccacttccagcgggagcgggaggaggagaccccagcctaccagggccctggcatccctgagctgctgagccccatgagagatgccccctgcctgctgaagaccaaggactggtggacctatgagttctgctacggccgccacatccagcagtaccacatggaggacagcgagatcaagggggaggtgctgtacctgggctactaccagagcgcctttgactgggatgatgaaacagccaaggccagcaagcagcaccggctgaagcgctaccacagccagacctatggaaatggcagcaaatgtgacctgaatggccggccccgggaggccgaggtgcgcttcctgtgtgatgaaggagctggcatcagcggggactacatcgacagagtggatgagcccctgagctgcagctatgtgctgaccatccgcaccccccggctgtgcccccaccccctgctgcggcccccacccagcgctgccccccaggccatcctgtgccaccccagcctgcagcctgaggagtacatggcctacgtgcagaggcaggccgtggacagcaagcagtatggagacaagatcatcgaggagctgcaggacctgggcccccaggtgtggagcgagaccaagagcggcgtggccccccagaagatggccggggccagccccaccaaggatgacagcaaggacagcgacttctggaagatgctgaatgaacctgaggaccaggcccctggaggagaggaggtgcctgctgaggagcaggaccccagccctgaggccgctgacagcgccagcggggccccaaatgacttccagaacaacgtgcaggtgaaggtgatccgcagccctgctgacctgatccgcttcatcgaggagctgaagggcggcaccaagaagggcaagcccaacatcggccaggagcagcctgtggatgatgctgctgaggtgccccagcgggagcctgagaaggagcggggggaccctgagcggcagcgggagatggaggaggaggaggatgaagatgaagatgaagatgaagatgaagatgagcggcagctgctgggggagtttgagaaggagctggagggcatcctgctgcccagcgaccgggaccggctgcggtctgaggtgaaggccggcatggagcgggagctggagaacatcatccaggagacagagaaggagctggaccctgatggcctgaagaaggagagcgagcgggaccgggccatgctggccctgaccagcaccctgaacaagctgatcaagaggctggaggagaagcagagccctgagctggtgaagaagcacaagaagaagagggtggtgcccaagaagcccccacccagcccccagcccaccgggaagattgagatcaagatcgtgcggccctgggccgagggcacagaggagggcgcccgctggctgacagatgaggacaccaggaacctgaaggagatcttcttcaacatcctggtgcctggagctgaggaggcccagaaggagcggcagaggcagaaggagctggagagcaactaccgccgggtgtggggcagccctggaggagagggcactggagacctggatgaatttgacttctag

SEQ ID NO: 162863 - DNA, 1959 bp, synthetic construct
  misc_feature 1..1959: note = Description of Artificial Sequence: Synthetic coding sequence
  source 1..1959: mol_type = other DNA
atggctgctgagaccctgctgagcagcctgctgggcctgctgctgctgggcctgctgctgcctgccagcctgactggaggagtgggcagcctgaacctggaggagctgtctgagatgagatatggaattgagatcctgcccctgcctgtgatgggcggccagagccagagcagtgatgtggtgattgtgagcagcaagtacaagcagagatatgagtgccgcctgcctgctggggccatccacttccagcgggagcgggaggaggagaccccagcctaccagggccctggcatccctgagctgctgagccccatgagagatgccccctgcctgctgaagaccaaggactggtggacctatgagttctgctacggccgccacatccagcagtaccacatggaggacagcgagatcaagggggaggtgctgtacctgggctactaccagagcgcctttgactgggatgatgaaacagccaaggccagcaagcagcaccggctgaagcgctaccacagccagacctatggaaatggcagcaaatgtgacctgaatggccggccccgggaggccgaggtgcgcttcctgtgtgatgaaggagctggcatcagcggggactacatcgacagagtggatgagcccctgagctgcagctatgtgctgaccatccgcaccccccggctgtgcccccaccccctgctgcggcccccacccagcgctgccccccaggccatcctgtgccaccccagcctgcagcctgaggagtacatggcctacgtgcagaggcaggccgacagcaagcagtacggggacaagatcatcgaggagctgcaggacctgggcccccaggtgtggagcgagaccaagtctggagtggccccccagaagatggccggggccagccccaccaaggatgacagcaaggacagcgacttctggaagatgctgaatgaacctgaggaccaggcccctggaggagaggaggtgcctgctgaggagcaggaccccagccctgaggccgctgacagcgccagcggggccccaaatgacttccagaacaacgtgcaggtgaaggtgatccgcagccctgctgacctgatccgcttcatcgaggagctgaagggcggcaccaagaagggcaagcccaacatcggccaggagcagcctgtggatgatgctgctgaggtgccccagcgggagcctgagaaggagcggggggaccctgagcggcagcgggagatggaggaggaggaggatgaagatgaagatgaagatgaagatgaagatgagcggcagctgctgggggagtttgagaaggagctggagggcatcctgctgcccagcgaccgggaccggctgcggagtgaaacagagaaggagctggaccctgatggcctgaagaaggagagcgagcgggaccgggccatgctggccctgaccagcaccctgaacaagctgatcaagaggctggaggagaagcagagccctgagctggtgaagaagcacaagaagaagagggtggtgcccaagaagcccccacccagcccccagcccacagaggaggaccctgagcaccgggtgcgggtgcgggtgaccaagctgcggctgggcggccccaaccaggacctgactgtgctggagatgaagcgggagaacccccagctgaagcagatcgagggcctggtgaaggagctgctggagcgggagggcctgacagctgctgggaagattgagatcaagatcgtgcggccctgggccgagggcacagaggagggcgcccgctggctgacagatgaggacaccaggaacctgaaggagatcttcttcaacatcctggtgcctggagctgaggaggcccagaaggagcggcagaggcagaaggagctggagagcaactacagaagagtgtggggcagccctggaggagagggcaccggggacctggatgaatttgacttctag

SEQ ID NO: 162864 - DNA, 1683 bp, synthetic construct
  misc_feature 1..1683: note = Description of Artificial Sequence: Synthetic coding sequence
  source 1..1683: mol_type = other DNA
atggctgctgagaccctgctgagcagcctgctgggcctgctgctgctgggcctgctgctgcctgccagcctgactggaggagtgggcagcctgaacctggaggagctgtctgagatgagatatggaattgagatcctgcccctgcctgtgatgggcggccagagccagagcagtgatgtggtgattgtgagcagcaagtacaagcagagatatgagtgccgcctgcctgctggggccatccacttccagcgggagcgggaggaggagaccccagcctaccagggccctggcatccctgagctgctgagccccatgagagatgccccctgcctgctgaagaccaaggactggtggacctatgagttctgctacggccgccacatccagcagtaccacatggaggacagcgagatcaagggggagttcctgtgtgatgaaggagctggcatcagcggggactacatcgacagagtggatgagcccctgagctgcagctatgtgctgaccatccgcaccccccggctgtgcccccaccccctgctgcggcccccacccagcgctgccccccaggccatcctgtgccaccccagcctgcagcctgaggagtacatggcctacgtgcagaggcaggccgacagcaagcagtacggggacaagatcatcgaggagctgcaggacctgggcccccaggtgtggagcgagaccaagtctggagtggccccccagaagatggccggggccagccccaccaaggatgacagcaaggacagcgacttctggaagatgctgaatgaacctgaggaccaggcccctggaggagaggaggtgcctgctgaggagcaggaccccagccctgaggccgctgacagcgccagcggggccccaaatgacttccagaacaacgtgcaggtgaaggtgatccgcagccctgctgacctgatccgcttcatcgaggagctgaagggcggcaccaagaagggcaagcccaacatcggccaggagcagcctgtggatgatgctgctgaggtgccccagcgggagcctgagaaggagcggggggaccctgagcggcagcgggagatggaggaggaggaggatgaagatgaagatgaagatgaagatgaagatgagcggcagctgctgggggagtttgagaaggagctggagggcatcctgctgcccagcgaccgggaccggctgcggtctgaggtgaaggccggcatggagcgggagctggagaacatcatccaggagacagagaaggagctggaccctgatggcctgaagaaggagagcgagcgggaccgggccatgctggccctgaccagcaccctgaacaagctgatcaagaggctggaggagaagcagagccctgagctggtgaagaagcacaagaagaagagggtggtgcccaagaagcccccacccagcccccagcccaccgggaagattgagatcaagatcgtgcggccctgggccgagggcacagaggagggcgcccgctggctgacagatgaggacaccaggaacctgaaggagatcttcttcaacatcctggtgcctggagctgaggaggcccagaaggagcggcagaggcagaaggagctggagagcaactacagaagagtgtggggcagccctggaggagagggcaccggggacctggatgaatttgacttctag

SEQ ID NO: 162865 - DNA, 1743 bp, synthetic construct
  misc_feature 1..1743: note = Description of Artificial Sequence: Synthetic coding sequence
  source 1..1743: mol_type = other DNA
atggctgctgagaccctgctgagcagcctgctgggcctgctgctgctgggcctgctgctgcctgccagcctgactggaggagtgggcagcctgaacctggaggagctgtctgagatgagatatggaattgagatcctgcccctgcctgtgatgggcggccagagccagagcagtgatgtggtgattgtgagcagcaagtacaagcagagatatgagtgccgcctgcctgctggggccatccacttccagcgggagcgggaggaggagaccccagcctaccagggccctggcatccctgagctgctgagccccatgagagatgccccctgcctgctgaagaccaaggactggtggacctatgagttctgctacggccgccacatccagcagtaccacatggaggacagcgagatcaagggggaggtgctgtacctgggctactaccagagcgcctttgactgggatgatgaaacagccaagttcctgtgtgatgagggcgccggcatcagcggggactacatcgacagagtggatgagcccctgagctgcagctatgtgctgaccatccgcaccccccggctgtgcccccaccccctgctgcggcccccaccttctgctgccccccaggccatcctgtgccaccccagcctgcagcctgaggagtacatggcctacgtgcagaggcaggccgtggacagcaagcagtacggggacaagatcatcgaggagctgcaggacctgggcccccaggtgtggagcgagaccaagtctggagtggccccccagaagatggccggggccagccccaccaaggatgacagcaaggacagcgacttctggaagatgctgaatgaacctgaggaccaggcccctggaggagaggaggtgcctgctgaggagcaggaccccagccctgaggccgctgacagcgccagcggggccccaaatgacttccagaacaacgtgcaggtgaaggtgatccgcagccctgctgacctgatccgcttcatcgaggagctgaagggcggcaccaagaagggcaagcccaacatcggccaggagcagcctgtggatgatgctgctgaggtgccccagcgggagcctgagaaggagcggggggaccctgagcggcagcgggagatggaggaggaggaggatgaagatgaagatgaagatgaagatgaagatgagcggcagctgctgggggagtttgagaaggagctggagggcatcctgctgcccagcgaccgggaccggctgcggtctgaggtgaaggccggcatggagcgggagctggagaacatcatccaggagacagagaaggagctggaccctgatggcctgaagaaggagagcgagcgggaccgggccatgctggccctgaccagcaccctgaacaagctgatcaagaggctggaggagaagcagagccctgagctggtgaagaagcacaagaagaagagggtggtgcccaagaagcccccacccagcccccagcccaccgggaagattgagatcaagatcgtgcggccctgggccgagggcacagaggagggcgcccgctggctgacagatgaggacaccaggaacctgaaggagatcttcttcaacatcctggtgcctggagctgaggaggcccagaaggagcggcagaggcagaaggagctggagagcaactacagaagagtgtggggcagccctggaggagagggcaccggggacctggatgaatttgacttctag

SEQ ID NO: 162866 - DNA, 2004 bp, synthetic construct
  misc_feature 1..2004: note = Description of Artificial Sequence: Synthetic coding sequence
  source 1..2004: mol_type = other DNA
atggctgctgagaccctgctgagcagcctgctgggcctgctgctgctgggcctgctgctgcctgccagcctgactggaggagtgggcagcctgaacctggaggagctgtctgagatgagatatggaattgagatcctgcccctgcctgtgatgggcggccagagccagagcagtgatgtggtgattgtgagcagcaagtacaagcagagatatgagtgccgcctgcctgctggggccatccacttccagcgggagcgggaggaggagaccccagcctaccagggccctggcatccctgagctgctgagccccatgagagatgccccctgcctgctgaagaccaaggactggtggacctatgagttctgctacggccgccacatccagcagtaccacatggaggacagcgagatcaagggggaggtgctgtacctgggctactaccagagcgcctttgactgggatgatgaaacagccaaggccagcaagcagcaccggctgaagcgctaccacagccagacctatggaaatggcagcaaatgtgacctgaatggccggccccgggaggccgaggtgcgcttcctgtgtgatgaaggagctggcatcagcggggactacatcgacagagtggatgagcccctgagctgcagctatgtgctgaccatccgcaccccccggctgtgcccccaccccctgctgcggcccccacccagcgctgccccccaggccatcctgtgccaccccagcctgcagcctgaggagtacatggcctacgtgcagaggcaggccgacagcaagcagtacggggacaagatcatcgaggagctgcaggacctgggcccccaggtgtggagcgagaccaagtctggagtggccccccagaagatggccggggccagccccaccaaggatgacagcaaggacagcgacttctggaagatgctgaatgaacctgaggaccaggcccctggaggagaggaggtgcctgctgaggagcaggaccccagccctgaggccgctgacagcgccagcggggccccaaatgacttccagaacaacgtgcaggtgaaggtgatccgcagccctgctgacctgatccgcttcatcgaggagctgaagggcggcaccaagaagggcaagcccaacatcggccaggagcagcctgtggatgatgctgctgaggtgccccagcgggagcctgagaaggagcggggggaccctgagcggcagcgggagatggaggaggaggaggatgaagatgaagatgaagatgaagatgaagatgagcggcagctgctgggggagtttgagaaggagctggagggcatcctgctgcccagcgaccgggaccggctgcggtctgaggtgaaggccggcatggagcgggagctggagaacatcatccaggagacagagaaggagctggaccctgatggcctgaagaaggagagcgagcgggaccgggccatgctggccctgaccagcaccctgaacaagctgatcaagaggctggaggagaagcagagccctgagctggtgaagaagcacaagaagaagagggtggtgcccaagaagcccccacccagcccccagcccacagaagaagatcctgagcaccgggtgcgggtgcgggtgaccaagctgcggctgggcggccccaaccaggacctgactgtgctggagatgaagcgggagaacccccagctgaagcagatcgagggcctggtgaaggagctgctggagcgggagggcctgacagctgctgggaagattgagatcaagatcgtgcggccctgggccgagggcacagaggagggcgcccgctggctgacagatgaggacaccaggaacctgaaggagatcttcttcaacatcctggtgcctggagctgaggaggcccagaaggagcggcagaggcagaaggagctggagagcaactaccgccgggtgtggggcagccctggaggagagggcactggagacctggatgaatttgacttctag

SEQ ID NO: 162867 - DNA, 1794 bp, synthetic construct
  misc_feature 1..1794: note = Description of Artificial Sequence: Synthetic coding sequence
  source 1..1794: mol_type = other DNA
atggctgctgagaccctgctgagcagcctgctgggcctgctgctgctgggcctgctgctgcctgccagcctgactggaggagtgggcagcctgaacctggaggagctgtctgagatgagatatggaattgagatcctgcccctgcctgtgatgggcggccagagccagagcagtgatgtggtgattgtgagcagcaagtacaagcagagatatgagtgccgcctgcctgctggggccatccacttccagcgggagcgggaggaggagaccccagcctaccagggccctggcatccctgagctgctgagccccatgagagatgccccctgcctgctgaagaccaaggactggtggacctatgagttctgctacggccgccacatccagcagtaccacatggaggacagcgagatcaagggggaggtgctgtacctgggctactaccagagcgcctttgactgggatgatgaaacagccaaggccagcaagcagcaccggctgaagcgctaccacagccagacctatggaaatggcagcaaatgtgacctgaatggccggccccgggaggccgaggtgcgcttcctgtgtgatgaaggagctggcatcagcggggactacatcgacagagtggatgagcccctgagctgcagctatgtgctgaccatccgcaccccccggctgtgcccccaccccctgctgcggcccccacccagcgctgccccccaggccatcctgtgccaccccagcctgcagcctgaggagtacatggcctacgtgcagaggcaggccgacagcaagcagtacggggacaagatcatcgaggagctgcaggacctgggcccccaggtgtggagcgagaccaagtctggagtggccccccagaagatggccggggccagccccaccaaggatgacagcaaggacagcgacttctggaagatgctgaatgaacctgaggaccaggcccctggaggagaggaggtgcctgctgaggagcaggaccccagccctgaggccgctgacagcgccagcggggccccaaatgacttccagaacaacgtgcaggtgaaggtgatccgcagccctgctgacctgatccgcttcatcgaggagctgaagggcggcaccaagaagggcaagcccaacatcggccaggagcagcctgtggatgatgctgctgaggtgccccagcgggagcctgagaaggagcggggggaccctgagcggcagcgggagatggaggaggaggaggatgaagatgaagatgaagatgaagatgaagatgagcggcagctgctgggggagtttgagaaggagctggagggcatcctgctgcccagcgaccgggaccggctgcggagtgaaacagagaaggagctggaccctgatggcctgaagaaggagagcgagcgggaccgggccatgctggccctgaccagcaccctgaacaagctgatcaagaggctggaggagaagcagagccctgagctggtgaagaagcacaagaagaagagggtggtgcccaagaagcccccacccagcccccagcccaccgggaagattgagatcaagatcgtgcggccctgggccgagggcacagaggagggcgcccgctggctgacagatgaggacaccaggaacctgaaggagatcttcttcaacatcctggtgcctggagctgaggaggcccagaaggagcggcagaggcagaaggagctggagagcaactaccgccgggtgtggggcagccctggaggagagggcactggagacctggatgaatttgacttctag

SEQ ID NO: 162868 - DNA, 1839 bp, synthetic construct
  misc_feature 1..1839: note = Description of Artificial Sequence: Synthetic coding sequence
  source 1..1839: mol_type = other DNA
atggctgctgagaccctgctgagcagcctgctgggcctgctgctgctgggcctgctgctgcctgccagcctgactggaggagtgggcagcctgaacctggaggagctgtctgagatgagatatggaattgagatcctgcccctgcctgtgatgggcggccagagccagagcagtgatgtggtgattgtgagcagcaagtacaagcagagatatgagtgccgcctgcctgctggggccatccacttccagcgggagcgggaggaggagaccccagcctaccagggccctggcatccctgagctgctgagccccatgagagatgccccctgcctgctgaagaccaaggactggtggacctatgagttctgctacggccgccacatccagcagtaccacatggaggacagcgagatcaagggggaggtgctgtacctgggctactaccagagcgcctttgactgggatgatgaaacagccaaggccagcaagcagcaccggctgaagcgctaccacagccagacctatggaaatggcagcaaatgtgacctgaatggccggccccgggaggccgaggtgcgcttcctgtgtgatgaaggagctggcatcagcggggactacatcgacagagtggatgagcccctgagctgcagctatgtgctgaccatccgcaccccccggctgtgcccccaccccctgctgcggcccccacccagcgctgccccccaggccatcctgtgccaccccagcctgcagcctgaggagtacatggcctacgtgcagaggcaggccgacagcaagcagtacggggacaagatcatcgaggagctgcaggacctgggcccccaggtgtggagcgagaccaagtctggagtggccccccagaagatggccggggccagccccaccaaggatgacagcaaggacagcgacttctggaagatgctgaatgaacctgaggaccaggcccctggaggagaggaggtgcctgctgaggagcaggaccccagccctgaggccgctgacagcgccagcggggccccaaatgacttccagaacaacgtgcaggtgaaggtgatccgcagccctgctgacctgatccgcttcatcgaggagctgaagggcggcaccaagaagggcaagcccaacatcggccaggagcagcctgtggatgatgctgctgaggtgccccagcgggagcctgagaaggagcggggggaccctgagcggcagcgggagatggaggaggaggaggatgaagatgaagatgaagatgaagatgaagatgagcggcagctgctgggggagtttgagaaggagctggagggcatcctgctgcccagcgaccgggaccggctgcggtctgaggtgaaggccggcatggagcgggagctggagaacatcatccaggagacagagaaggagctggaccctgatggcctgaagaaggagagcgagcgggaccgggccatgctggccctgaccagcaccctgaacaagctgatcaagaggctggaggagaagcagagccctgagctggtgaagaagcacaagaagaagagggtggtgcccaagaagcccccacccagcccccagcccaccgggaagattgagatcaagatcgtgcggccctgggccgagggcacagaggagggcgcccgctggctgacagatgaggacaccaggaacctgaaggagatcttcttcaacatcctggtgcctggagctgaggaggcccagaaggagcggcagaggcagaaggagctggagagcaactacagaagagtgtggggcagccctggaggagagggcaccggggacctggatgaatttgacttctag

SEQ ID NO: 162869 - DNA, 3462 bp, synthetic construct
  misc_feature 1..3462: note = Description of Artificial Sequence: Synthetic coding sequence
  source 1..3462: mol_type = other DNA
atgagccaggagcccaccacctacagcctcttcctgttcctgttcctgagccacggcgtgagcagctacacagtgcccaacagccggcaggacctgcaccccctgctgcagaacatggccgaggagatcattgatggcagctacctgaatgccctgctggacctgatccagttccagagcagccacgtgtggacagatgacctgagccaccgggtgctggcctacctgaacagcagaaatgtggccttcaccatccccagcctgcaggccgctgtggagaaccacctggagcagaggctgcaccagccccagaagctgctggaggacctgaggaagacagatgcccagcagttcagaacagccatgaagtgcctgctggaggacaagaaggatggcctggacctgaaggacatcatcatcgacctgggggagatccgggagcgggccctgcagagccctggggtgaacagaagcctcttcctgatcaccctggagcgctgcttccagatgctgaacagcctggagtgtgtggagatcctgggcaaggtgctgcggggcagcagcggcagcttcctgcagcctgacatcacagagcggctgccccgggacctgcgggaggatgccttcaagaacctgtctgctgtgttcaaggacctgtatgacaagaccagcgcccacagccagagggccctgtacagctggatgacaggcatcctgcagaccagcagcaatgccacagatgattctgcctcctgggtgtctgctgagcacctgtgggtgctgggccgctacatggtgcacctgagctttgaggagatcaccaagatcagccccattgaaattggcctcttcatctcctatgacaatgccaccaagcagctggacatggtgtatgacatcaccccagagctggcccaggccttcctggagcgcatcagcagcagcaacttcaacatgaggaacaccagcaccatccaccggcaggcccacgagctgtgggccctggagcccttccccaagatgctgggcctgctggtgtgcttctacaatgacctggagctgctggatgccaccgtggcccaggtgctgctgtaccagatgatcaagtgcagccacctgcggggcttccaggccggcgtgcagaagctgaaggccgagctgctggacatcgccatggagaaccagaccctgaatgagaccctgggcagcctgagtgatgctgtggtgggcctgacctacagccagctggagagcctgagccctgaggccgtgcatggagccatcagcaccctgaaccaggtgtctggctgggccaagagccaggtgatcatcctgagcgccaagtacctggcccacgagaaggtgctgtccttctacaacgtgtcccagatgggcgccctgctggccggcgtgtccacccaggccttctgcagcatgaagaggaaggacatcagccaggtgctgcggtctgctgtgtcccagtatgtgtctgacctgagccctgcccagcagcagggcatcctgagcaagatggtgcaggccgaggacacagcccctggcatcgtggagatccagggcgccttcttcaaggaggtgtccctgtttgacctgcggcggcagcccggcttcaacagcacagtgctgaaggacaaggagctgggccgcagccaggccctcttcctgtatgagctgctgctgaagaccacccggcggcctgaggagctgctgtctgctggccagctggtgaagggcgtgacctgcagccacattgatgccatgagcacagacttcttcctggcccacttccaggacttccagaacaactttgccctgctgagcccctaccaggtgaactgcctggcctggaagtactgggaggtgtcccggctgtccatgccacccttcctgctggccgccctgcctgcccgctacctggcctctgtgcctgccagccagtgtgtgcccttcctgatcagcctgggcaagtcctggctggacagcctggtgctggacagccacaagaagacctctgtgctgaggaaggtgcagcagtgcctggatgacagcattgctgatgagtacacagtggacatcatgggcaacctgctgtgccacctgcctgctgccatcatcgaccggggcatcagcccccgggcctgggccacagccctgcacggcctgcgggactgcccagacctgaaccctgagcagaaggctgctgtgcggctgaagctgctgggccagtatggcctgccccagcactggacagctgagaccaccaaggacctgggccccttcctggtgctcttctctggagatgagctgagcagcatcgccaccaagtttcctgagatcctgctgcaggccgccagcaagatggcccggaccctgcccaccaaggagttcctgtgggccgtgttccagagcgtgaggaacagcagtgacaagatccccagctatgaccccatgcctggctgccacggcgtggtggcccccagcagtgatgacatcttcaagctggccgaggccaatgcctgctgggccctggaggacctgcgctgcatggaggaggacaccttcatcagaacagtggagctgctgggcgctgtgcagggcttcagccggccccagctgatgaccctgaaggagaaggccatccaggtgtgggacatgcccagctactggagggagcaccacatcgtgtccctgggccgcatcgccctggccctgaatgaaagtgagctggagcagctggacctgagcagcattgacacagtggccagcctgtcctggcagacagagtggaccccaggccaggccgagagcatcctgcagggctacctggatgattctggctacagcatccaggacctgaagagcttccacctggtgggcctgggcgccaccctgtgtgccatcaacatcacagagatccccctcatcaagatcagcgagttccgggtggtggtggccagaattggcaccctgctgtgcagcacccacgtgctggccgagttcaagaggaaggccgaggtggtgtttggagaccccacagagtggaccagctctgtgctgcaggagctgggcaccatcgctgctggcctgaccaaggccgagctgaggatgctggacaaggacctgatgccctacttccagcccagcgccatcaagtgcctgcctgatgagatcttcaaggagctgtctgctgagcagatcgccagcctgggcccagaaaatgctgctgctgtgacccacgcccagaggcggcggctgagccccctgcagctgcagagcctgcagcaggccctggatggagccaagacccacagctggcaggatgccccagccagcgctggccccaccaggaccagcagcagccgcagccctgctggggccctgcagagctggggcctgtggctgggctgccccctgctggtgctgatggccaagctgctgtggtag

SEQ ID NO: 162870 - DNA, 1647 bp, synthetic construct
  misc_feature 1..1647: note = Description of Artificial Sequence: Synthetic coding sequence
  source 1..1647: mol_type = other DNA
cccagggctgtgtgggtggaggcccggggcggggcccagcaccccaccatgagaagaacagcccccctgcaccggggcacctggagcaagatgagcatcatcctgcgggcccgctacctggcctctgtgcctgccagccagtgtgtgcccttcctgatcagcctgggcaagtcctggctggacagcctggtgctggacagccacaagaagacctctgtgctgaggaaggtgcagcagtgcctggatgacagcattgctgatgagtacacagtggacatcatgggcaacctgctgtgccacctgcctgctgccatcatcgaccggggcatcagcccccgggcctgggccacagccctgcacggcctgcgggactgcccagacctgaaccctgagcagaaggctgctgtgcggctgaagctgctgggccagtatggcctgccccagcactggacagctgagaccaccaaggacctgggccccttcctggtgctcttctctggagatgagctgagcagcatcgccaccaagtttcctgagatcctgctgcaggccgccagcaagatggcccggaccctgcccaccaaggagttcctgtgggccgtgttccagagcgtgaggaacagcagtgacaagatccccagctatgaccccatgcctggctgccacggcgtggtggcccccagcagtgatgacatcttcaagctggccgaggccaatgcctgctgggccctggaggacctgcgctgcatggaggaggacaccttcatcagaacagtggagctgctgggcgctgtgcagggcttcagccggccccagctgatgaccctgaaggagaaggccatccaggtgtgggacatgcccagctactggagggagcaccacatcgtgtccctgggcagaattgccctggccctgaatgaaagtgagctggagcagctggacctgagcagcattgacacagtggccagcctgtcctggcagacagagtggaccccaggccaggccgagagcatcctgcagggctacctggatgacagcggctacagcatccaggacctgaagagcttccacctggtgggcctgggcgccaccctgtgtgccatcaacatcacagagatccccctcatcaagatcagcgagttccgggtggtggtggcccgcatcggcaccctgctgtgcagcacccacgtgctggccgagttcaagaggaaggccgaggtggtgtttggagaccccacagagtggaccagctctgtgctgcaggagctgggcaccatcgccgccggcctgaccaaggccgagctgaggatgctggacaaggacctgatgccctacttccagcccagcgccatcaagtgcctgcctgatgagatcttcaaggagctgtctgctgagcagatcgccagcctgggcccagaaaatgctgctgctgtgacccacgcccagaggcggcggctgagccccctgcagctgcagagcctgcagcaggccctggatggagccaagacccacagctggcaggatgccccagccagcgctggccccaccaggaccagcagcagccgcagccctgctggggccctgcagagctggggcctgtggctgggctgccccctgctggtgctgatggccaagctgctgtggtag

SEQ ID NO: 162871 - DNA, 3183 bp, synthetic construct
  misc_feature 1..3183: note = Description of Artificial Sequence: Synthetic coding sequence
  source 1..3183: mol_type = other DNA
atgggcaacagcatcacctacagagaccaggccgctgtggagaaccacctggagcagaggctgcaccagccccagaagctgctggaggacctgaggaagacagatgcccagcagttcagaacagccatgaagtgcctgctggaggacaagaaggatggcctggacctgaaggacatcatcatcgacctgggggagatccgggagcgggccctgcagagccctggggtgaacagaagcctcttcctgatcaccctggagcgctgcttccagatgctgaacagcctggagtgtgtggagatcctgggcaaggtgctgcggggcagcagcggcagcttcctgcagcctgacatcacagagcggctgccccgggacctgagagaagatgccttcaagaacctgtctgctgtgttcaaggacctgtatgacaagaccagcgcccacagccagagggccctgtacagctggatgacaggcatcctgcagaccagcagcaatgccacagatgacagcgcctcctgggtgtctgctgagcacctgtgggtgctgggccgctacatggtgcacctgagctttgaggagatcaccaagatcagccccatcgagatcggcctcttcatctcctatgacaatgccaccaagcagctggacatggtgtatgacatcaccccagagctggcccaggccttcctggagcgcatcagcagcagcaacttcaacatgaggaacaccagcaccatccaccggctgggcctgctggtgtgcttctacaatgacctggagctgctggatgccaccgtggcccaggtgctgctgtaccagatgatcaagtgcagccacctgcggggcttccaggccggcgtgcagaagctgaaggccgagctgctggacatcgccatggagaaccagaccctgaatgagaccctgggcagcctgagtgatgctgtggtgggcctgacctacagccagctggagagcctgagccctgaggccgtgcacggggccatcagcaccctgaaccaggtgtctggctgggccaagagccaggtgatcatcctgagcgccaagtacctggcccacgagaaggtgctgtccttctacaacgtgtcccagatgggcgccctgctggccggcgtgtccacccaggccttctgcagcatgaagaggaaggacatcagccaggtgctgcggtctgctgtgtcccagtatgtgtctgacctgagccctgcccagcagcagggcatcctgagcaagatggtgcaggccgaggacacagcccctggcatcgtggagatccagggcgccttcttcaaggaggtgtccctgtttgacctgcggcggcagcccggcttcaacagcacagtgctgaaggacaaggagctgggccgcagccaggccctcttcctgtatgagctgctgctgaagaccaccaggaggcctgaggagctgctgtctgctggccagctggtgaagggcgtgacctgcagccacattgatgccatgagcacagacttcttcctggcccacttccaggacttccagaacaactttgccctgctgagcccctaccaggtgaactgcctggcctggaagtactgggaggtgtcccggctgtccatgccacccttcctgctggccgccctgcctgcccgctacctggcctctgtgcctgccagccagtgtgtgcccttcctgatcagcctgggcaagtcctggctggacagcctggtgctggacagccacaagaagacctctgtgctgaggaaggtgcagcagtgcctggatgacagcattgctgatgagtacacagtggacatcatgggcaacctgctgtgccacctgcctgctgccatcatcgaccggggcatcagcccccgggcctgggccacagccctgcacggcctgcgggactgcccagacctgaaccctgagcagaaggctgctgtgcggctgaagctgctgggccagtatggcctgccccagcactggacagctgagaccaccaaggacctgggccccttcctggtgctcttctctggagatgagctgagcagcatcgccaccaagtttcctgagatcctgctgcaggccgccagcaagatggcccggaccctgcccaccaaggagttcctgtgggccgtgttccagagcgtgaggaacagcagtgacaagatccccagctatgaccccatgcctggctgccacggcgtggtggcccccagcagtgatgacatcttcaagctggccgaggccaatgcctgctgggccctggaggacctgcgctgcatggaggaggacaccttcatcagaacagtggagctgctgggcgctgtgcagggcttcagccggccccagctgatgaccctgaaggagaaggccatccaggtgtgggacatgcccagctactggagggagcaccacatcgtgtccctgggcagaattgccctggccctgaatgaaagtgagctggagcagctggacctgagcagcattgacacagtggccagcctgtcctggcagacagagtggaccccaggccaggccgagagcatcctgcagggctacctggatgacagcggctacagcatccaggacctgaagagcttccacctggtgggcctgggcgccaccctgtgtgccatcaacatcacagagatccccctcatcaagatcagcgagttccgggtggtggtggcccgcatcggcaccctgctgtgcagcacccacgtgctggccgagttcaagaggaaggccgaggtggtgtttggagaccccacagagtggaccagctctgtgctgcaggagctgggcaccatcgccgccggcctgaccaaggccgagctgaggatgctggacaaggacctgatgccctacttccagcccagcgccatcaagtgcctgcctgatgagatcttcaaggagctgtctgctgagcagatcgccagcctgggcccagaaaatgctgctgctgtgacccacgcccagaggcggcggctgagccccctgcagctgcagagcctgcagcaggccctggatggagccaagacccacagctggcaggatgccccagccagcgctggccccaccaggaccagcagcagccgcagccctgctggggccctgcagagctggggcctgtggctgggctgccccctgctggtgctgatggccaagctgctgtggtag

SEQ ID NO: 162872 - DNA, 2448 bp, synthetic construct
  misc_feature 1..2448: note = Description of Artificial Sequence: Synthetic coding sequence
  source 1..2448: mol_type = other DNA
atgttccggctgggcctgctggtgtgcttctacaatgacctggagctgctggatgccaccgtggcccaggtgctgctgtaccagatgatcaagtgcagccacctgcggggcttccaggccggcgtgcagaagctgaaggccgagctgctggacatcgccatggagaaccagaccctgaatgagaccctgggcagcctgagtgatgctgtggtgggcctgacctacagccagctggagagcctgagccctgaggccgtgcatggagccatcagcaccctgaaccaggtgtctggctgggccaagagccaggtgatcatcctgagcgccaagtacctggcccacgagaaggtgctgtccttctacaacgtgtcccagatgggcgccctgctggccggcgtgtccacccaggccttctgcagcatgaagaggaaggacatcagccaggtgctgcggtctgctgtgtcccagtatgtgtctgacctgagccctgcccagcagcagggcatcctgagcaagatggtgcaggccgaggacacagcccctggcatcgtggagatccagggcgccttcttcaaggaggtgtccctgtttgacctgcggcggcagcccggcttcaacagcacagtgctgaaggacaaggagctgggccgcagccaggccctcttcctgtatgagctgctgctgaagaccacccggcggcctgaggagctgctgtctgctggccagctggtgaagggcgtgacctgcagccacattgatgccatgagcacagacttcttcctggcccacttccaggacttccagaacaactttgccctgctgagcccctaccaggtgaactgcctggcctggaagtactgggaggtgtcccggctgtccatgccacccttcctgctggccgccctgcctgcccgctacctggcctctgtgcctgccagccagtgtgtgcccttcctgatcagcctgggcaagtcctggctggacagcctggtgctggacagccacaagaagacctctgtgctgaggaaggtgcagcagtgcctggatgacagcattgctgatgagtacacagtggacatcatgggcaacctgctgtgccacctgcctgctgccatcatcgaccggggcatcagcccccgggcctgggccacagccctgcacggcctgcgggactgcccagacctgaaccctgagcagaaggctgctgtgcggctgaagctgctgggccagtatggcctgccccagcactggacagctgagaccaccaaggacctgggccccttcctggtgctcttctctggagatgagctgagcagcatcgccaccaagtttcctgagatcctgctgcaggccgccagcaagatggcccggaccctgcccaccaaggagttcctgtgggccgtgttccagagcgtgaggaacagcagtgacaagatccccagctatgaccccatgcctggctgccacggcgtggtggcccccagcagtgatgacatcttcaagctggccgaggccaatgcctgctgggccctggaggacctgcgctgcatggaggaggacaccttcatcagaacagtggagctgctgggcgctgtgcagggcttcagccggccccagctgatgaccctgaaggagaaggccatccaggtgtgggacatgcccagctactggagggagcaccacatcgtgtccctgggccgcatcgccctggccctgaatgaaagtgagctggagcagctggacctgagcagcattgacacagtggccagcctgtcctggcagacagagtggaccccaggccaggccgagagcatcctgcagggctacctggatgattctggctacagcatccaggacctgaagagcttccacctggtgggcctgggcgccaccctgtgtgccatcaacatcacagagatccccctcatcaagatcagcgagttccgggtggtggtggccagaattggcaccctgctgtgcagcacccacgtgctggccgagttcaagaggaaggccgaggtggtgtttggagaccccacagagtggaccagctctgtgctgcaggagctgggcaccatcgctgctggcctgaccaaggccgagctgaggatgctggacaaggacctgatgccctacttccagcccagcgccatcaagtgcctgcctgatgagatcttcaaggagctgtctgctgagcagatcgccagcctgggcccagaaaatgctgctgctgtgacccacgcccagaggcggcggctgagccccctgcagctgcagagcctgcagcaggccctggatggagccaagacccacagctggcaggatgccccagccagcgctggccccaccaggaccagcagcagccgcagccctgctggggccctgcagagctggggcctgtggctgggctgccccctgctggtgctgatggccaagctgctgtggtag

SEQ ID NO: 162873 - DNA, 3420 bp, synthetic construct
  misc_feature 1..3420: note = Description of Artificial Sequence: Synthetic coding sequence
  source 1..3420: mol_type = other DNA
atgagccaggagcccaccacctacagcctcttcctgttcctgttcctgagccacggcgtgagcagctacacagtgcccaacagccggcaggacctgcaccccctgctgcagaacatggccgaggagatcattgatggcagctacctgaatgccctgctggacctgatccagttccagagcagccacgtgtggacagatgacctgagccaccgggtgctggcctacctgaacagcagaaatgtggccttcaccatccccagcctgcaggccgctgtggagaaccacctggagcagaggctgcaccagccccagaagctgctggaggacctgaggaagacagatgcccagcagttcagaacagccatgaagtgcctgctggaggacaagaaggatggcctggacctgaaggacatcatcatcgacctgggggagatccgggagcgggccctgcagagccctggggtgaacagaagcctcttcctgatcaccctggagcgctgcttccagatgctgaacagcctggagtgtgtggagatcctgggcaaggtgctgcggggcagcagcggcagcttcctgcagcctgacatcacagagcggctgccccgggacctgcgggaggatgccttcaagaacctgtctgctgtgttcaaggacctgtatgacaagaccagcgcccacagccagagggccctgtacagctggatgacaggcatcctgcagaccagcagcaatgccacagatgattctgcctcctgggtgtctgctgagcacctgtgggtgctgggccgctacatggtgcacctgagctttgaggagatcaccaagatcagccccattgaaattggcctcttcatctcctatgacaatgccaccaagcagctggacatggtgtatgacatcaccccagagctggcccaggccttcctggagcgcatcagcagcagcaacttcaacatgaggaacaccagcaccatccaccggctgggcctgctggtgtgcttctacaatgacctggagctgctggatgccaccgtggcccaggtgctgctgtaccagatgatcaagtgcagccacctgcggggcttccaggccggcgtgcagaagctgaaggccgagctgctggacatcgccatggagaaccagaccctgaatgagaccctgggcagcctgagtgatgctgtggtgggcctgacctacagccagctggagagcctgagccctgaggccgtgcatggagccatcagcaccctgaaccaggtgtctggctgggccaagagccaggtgatcatcctgagcgccaagtacctggcccacgagaaggtgctgtccttctacaacgtgtcccagatgggcgccctgctggccggcgtgtccacccaggccttctgcagcatgaagaggaaggacatcagccaggtgctgcggtctgctgtgtcccagtatgtgtctgacctgagccctgcccagcagcagggcatcctgagcaagatggtgcaggccgaggacacagcccctggcatcgtggagatccagggcgccttcttcaaggaggtgtccctgtttgacctgcggcggcagcccggcttcaacagcacagtgctgaaggacaaggagctgggccgcagccaggccctcttcctgtatgagctgctgctgaagaccacccggcggcctgaggagctgctgtctgctggccagctggtgaagggcgtgacctgcagccacattgatgccatgagcacagacttcttcctggcccacttccaggacttccagaacaactttgccctgctgagcccctaccaggtgaactgcctggcctggaagtactgggaggtgtcccggctgtccatgccacccttcctgctggccgccctgcctgcccgctacctggcctctgtgcctgccagccagtgtgtgcccttcctgatcagcctgggcaagtcctggctggacagcctggtgctggacagccacaagaagacctctgtgctgaggaaggtgcagcagtgcctggatgacagcattgctgatgagtacacagtggacatcatgggcaacctgctgtgccacctgcctgctgccatcatcgaccggggcatcagcccccgggcctgggccacagccctgcacggcctgcgggactgcccagacctgaaccctgagcagaaggctgctgtgcggctgaagctgctgggccagtatggcctgccccagcactggacagctgagaccaccaaggacctgggccccttcctggtgctcttctctggagatgagctgagcagcatcgccaccaagtttcctgagatcctgctgcaggccgccagcaagatggcccggaccctgcccaccaaggagttcctgtgggccgtgttccagagcgtgaggaacagcagtgacaagatccccagctatgaccccatgcctggctgccacggcgtggtggcccccagcagtgatgacatcttcaagctggccgaggccaatgcctgctgggccctggaggacctgcgctgcatggaggaggacaccttcatcagaacagtggagctgctgggcgctgtgcagggcttcagccggccccagctgatgaccctgaaggagaaggccatccaggtgtgggacatgcccagctactggagggagcaccacatcgtgtccctgggccgcatcgccctggccctgaatgaaagtgagctggagcagctggacctgagcagcattgacacagtggccagcctgtcctggcagacagagtggaccccaggccaggccgagagcatcctgcagggctacctggatgattctggctacagcatccaggacctgaagagcttccacctggtgggcctgggcgccaccctgtgtgccatcaacatcacagagatccccctcatcaagatcagcgagttccgggtggtggtggccagaattggcaccctgctgtgcagcacccacgtgctggccgagttcaagaggaaggccgaggtggtgtttggagaccccacagagtggaccagctctgtgctgcaggagctgggcaccatcgctgctggcctgaccaaggccgagctgaggatgctggacaaggacctgatgccctacttccagcccagcgccatcaagtgcctgcctgatgagatcttcaaggagctgtctgctgagcagatcgccagcctgggcccagaaaatgctgctgctgtgacccacgcccagaggcggcggctgagccccctgcagctgcagagcctgcagcaggccctggatggagccaagacccacagctggcaggatgccccagccagcgctggccccaccaggaccagcagcagccgcagccctgctggggccctgcagagctggggcctgtggctgggctgccccctgctggtgctgatggccaagctgctgtggtag

SEQ ID NO: 162874 - DNA, 1434 bp, synthetic construct
  misc_feature 1..1434: note = Description of Artificial Sequence: Synthetic coding sequence
  source 1..1434: mol_type = other DNA
atgattgccttcctgctgacctctgtgctgatgatcccccatgctgggggccaccccctggacaccccccacctgccccaggagctgcccccaggcctgcccaacaacatcaacatcaccttcttcagcggcatgttcaagaatgtggagagcgtggccgagatctttgactgcctgggcccccacttcacctggctgcaggccgtgttcaccaacttccctgtgctgatccagtttgtgaatggcatgaagtgtgtggccggcctgtgcccccgggactttgaagattatggctgcacctgccgctttgagatggagggcctgcctgtggatgaaagtgacagctgctgcttccagcaccggcgctgctatgaggaggccgctgagatggactgcctgcaggaccctgccaagctgagcacagaggtgaactgtgtgtccaagaagatcatctgtgagagcaaggacaactgtgagcacctgctgtgcacctgtgacaaggccgccattgaatgtctggcccggagcagcctgaacagcagcctgaacctgctggacaccagcttctgcctggcccagaccccagagaccaccatcaaggaggacctgaccaccctgctgccccgggtggtgcctgtggagcccacagacaccagcctgacagccctgagcggggaggaggccggccatgaccaggagggcgtgggcgccgcccgggccaccagccccccaggcagcgctgagatcgtggccaccagggtgacagccaagatcgtgaccctggtgcctgctggcatcaagagcctgggcctggccgtgtcctctgtggagaatgaccctgaggagaccacagagaaggcctgtgaccgcttcaccttcctgcacctgggcagcggggacaacatgcaggtgatgccccagctgggggagatgctgttctgcctgaccagccgctgcccagaggagtttgagagctatggctgctactgcggccaggagggccgcggggagcccagagatgacctggaccgctgctgcctgagccaccactgctgcctggagcaggtgcggcggctgggctgcctgctggagcggctgccctggagccctgtggtgtgtgtggaccacacccccaagtgtggcggccagagcctgtgtgagaagctgctgtgtgcctgtgaccagacagctgctgagtgcatgaccagcgccagcttcaaccagagcctgaagagccccagccggctgggctgccccggccagcctgctgcctgtgaggacagcctgcaccctgtgcctgctgcccccaccctgggcagcagcagcgaggaggacagcgaggaggaccccccccaggaggacctgggccgggccaagcgcttcctgaggaagagcctgggccccctgggcatcggccccctgcatggaagatag

SEQ ID NO: 162875 - DNA, 1482 bp, synthetic construct
  misc_feature 1..1482: note = Description of Artificial Sequence: Synthetic coding sequence
  source 1..1482: mol_type = other DNA
atgattgccttcctgctgacctctgtgctgatgatcccccatgctgggggccaccccctggacaccccccacctgccccaggagctgcccccaggcctgcccaacaacatcaacatcaccttcttcagcggcatgttcaagaatgtggagagcgtggccgagatctttgactgcctgggcccccacttcacctggctgcaggccgtgttcaccaacttccctgtgctgatccagtttgtgaatggcatgaagtgtgtggccggcctgtgcccccgggactttgaagattatggctgcacctgccgctttgagatggagggcctgcctgtggatgaaagtgacagctgctgcttccagcaccggcgctgctatgaggaggccgctgagatggactgcctgcaggaccctgccaagctgagcacagaggtgaactgtgtgtccaagaagatcatctgtgagagcaaggacaactgtgagcacctgctgtgcacctgtgacaaggccgccattgaatgtctggcccggagcagcctgaacagcagcctgaacctgctggacaccagcttctgcctggcccagaccccagagaccaccatcaaggaggacctgaccaccctgctgccccgggtggtgcctgtggagcccacagacaccagcctgacagccctgagcggggaggtggccgctgagacagaagctgacaggctcatcaccctgagcaagaagaaggccggccatgaccaggagggcgtgggcgccgcccgggccaccagccccccaggcagcgctgagatcgtggccaccagggtgacagccaagatcgtgaccctggtgcctgctggcatcaagagcctgggcctggccgtgtcctctgtggagaatgaccctgaggagaccacagagaaggcctgtgaccgcttcaccttcctgcacctgggcagcggggacaacatgcaggtgatgccccagctgggggagatgctgttctgcctgaccagccgctgcccagaggagtttgagagctatggctgctactgcggccaggagggccgcggggagcccagagatgacctggaccgctgctgcctgagccaccactgctgcctggagcaggtgcggcggctgggctgcctgctggagcggctgccctggagccctgtggtgtgtgtggaccacacccccaagtgtggcggccagagcctgtgtgagaagctgctgtgtgcctgtgaccagacagctgctgagtgcatgaccagcgccagcttcaaccagagcctgaagagccccagccggctgggctgccccggccagcctgctgcctgtgaggacagcctgcaccctgtgcctgctgcccccaccctgggcagcagcagcgaggaggacagcgaggaggaccccccccaggaggacctgggccgggccaagcgcttcctgaggaagagcctgggccccctgggcatcggccccctgcatggaagatag

SEQ ID NO: 162876 - DNA, 5994 bp, synthetic construct
  misc_feature 1..5994: note = Description of Artificial Sequence: Synthetic coding sequence
  source 1..5994: mol_type = other DNA
atggccctgctgatccacctgaagacagtgtctgagctgcggggccgcggggaccgcatcgccaaggtgaccttccggggccagagcttctacagccgggtgctggagaactgtgaagatgtggccgactttgatgagaccttccgctggcctgtggccagcagcattgacagaaatgagatgctggagatccaggtgttcaactacagcaaggtgttcagcaacaagctgattggcaccttcaggatggtgctgcagaaggtggtggaggagagccacgtggaggtgacagacaccctgattgatgacaacaatgccatcatcaagaccagcctgtgtgtggaggtgcgctaccaggccacagatggcaccgtgggctcctgggatgatggagacttcctgggagatgagagcctgcaggaggaggagaaggacagccaggagacagatggcctgctgcccggcagccggcccagcagccggcccccaggagagaagagcttcagaagagctggccgcagcgtcttcagcgccatgaagctgggcaagaacagaagccacaaggaggagccccagaggccagatgagcctgctgtgctggagatggaggacctggaccacctggccatccggctgggagatggcctggaccctgacagcgtgtccctggcctctgtgacagccctgaccaccaacgtgagcaacaagaggagcaagccagacatcaagatggagcccagcgctggccggcccatggactaccaggtgtccatcaccgtgattgaggcccggcagctggtgggcctgaacatggaccctgtggtgtgtgtggaggtgggagatgacaagaagtacacctccatgaaggagagcaccaactgcccctactacaatgagtactttgtgtttgacttccacgtgtccccagatgtgatgtttgacaagatcatcaagatcagcgtcatccacagcaagaacctgctgcggagcggcaccctggtgggcagcttcaagatggatgtgggcaccgtgtacagccagcctgagcaccagttccaccacaagtgggccatcctgagtgaccctgatgacatcagcagcggcctgaagggctacgtgaagtgtgatgtggccgtggtgggcaagggggacaacatcaagaccccccacaaggccaatgaaacagatgaagatgacatcgagggcaacctgctgctgcctgagggcgtgcccccagagcggcagtgggcccgcttctacgtgaagatctacagagctgagggcctgcccaggatgaacaccagcctgatggccaacgtgaagaaggccttcatcggggagaacaaggacctggtggacccctacgtgcaggtgttctttgctggccagaagggcaagacctctgtgcagaagagcagctatgagcccctgtggaatgagcaggtggtgttcacagacctcttcccccccctgtgcaagaggatgaaggtgcagatccgggacagcgacaaggtgaatgatgtggccatcggcacccacttcatcgacctgaggaagatcagcaatgatggagacaagggcttcctgcccaccctgggccctgcctgggtgaacatgtatggcagcaccaggaactacaccctgctggatgagcaccaggacctgaatgaaggcctgggggagggcgtgtccttccgggcccggctgctgctgggcctggccgtggagatcgtggacaccagcaaccctgagctgaccagcagcacagaggtgcaggtggagcaggccacccccatcagcgagagctgtgccggcaagatggaggagttcttcctgtttggagccttcctggaggcctccatgattgacagaagaaatggagacaagcccatcacctttgaggtgaccatcggcaactatggaaatgaggtggatggcctgagccggccccagaggccccggcccaggaaggagcctggagatgaggaggaggtggacctgatccagaatgccagtgatgatgaggccggagatgctggggacctggcctctgtgagcagcaccccacccatgaggccccaggtgacagacaggaactacttccacctgccctacctggagaggaagccctgcatctacatcaagtcctggtggccagaccagaggagaagactctacaatgccaacatcatggaccacatcgctgacaagctggaggagggcctgaatgacatccaggagatgatcaagacagagaagagctacccagagcggcggctgcggggcgtgctggaggagctgagctgtggctgctgccgcttcctgagcctggccgacaaggaccagggccacagcagcaggacccggctggaccgggagcggctgaagagctgcatgagggagctggagaacatgggccagcaggccaggatgctgcgggcccaggtgaagaggcacacagtgcgggacaagctgcggctgtgccagaacttcctgcagaagctgcgcttcctggctgatgagccccagcacagcatcccagacatcttcatctggatgatgagcaacaacaagagggtggcctatgcccgggtgcccagcaaggacctgctcttcagcatcgtggaggaggagaccgggaaggactgtgccaaggtgaagaccctcttcctgaagctgcccgggaagaggggctttggatctgctggctggacagtgcaggccaaggtggagctgtacctgtggctgggcctgagcaagcagaggaaggagttcctgtgtggcctgccctgtggcttccaggaggtgaaggccgcccagggcctgggcctgcacgccttcccccctgtgtccctggtgtacaccaagaagcaggccttccagctgcgggcccacatgtaccaggcccggagcctgtttgctgctgacagcagcggcctgagtgacccctttgcccgggtcttcttcatcaaccagagccagtgcacagaggtgctgaatgagaccctgtgccccacctgggaccagatgctggtgtttgacaacctggagctgtatggagaggcccacgagctgagagatgatcctcccatcatcgtcatcgagatctatgaccaggacagcatgggcaaggctgacttcatgggccgcacctttgccaagcccctggtgaagatggctgatgaggcctactgccccccacgcttccccccccagctggagtactaccagatctacagaggaaatgccacagctggggacctgctggccgcctttgagctgctgcagatcggccctgctgggaaggctgacctgccccccatcaatggacctgtggatgtggaccggggccccatcatgcctgtgcccatgggcatccggcctgtgctgagcaagtacagagtggaggtgctcttctggggcctgcgggacctgaagagggtgaacctggcccaggtggaccggccccgggtggacattgaatgtgccgggaaaggagtgcagagcagcctcatccacaactacaagaagaaccccaacttcaacaccctggtgaagtggtttgaggtggacctgcctgaaaatgagctgctgcacccccccctgaacatccgggtggtggactgccgggccttcggccgctacaccctggtgggcagccatgctgtgagcagcctgcggcgcttcatctacagacctccagacagaagtgcccccagctggaacaccaccgtgcggctgctgcggcgctgccgggtgctgtgcaatggaggcagcagcagccacagcactggagaggtggtggtgaccatggagcctgaggtgcccatcaagaagctggagaccatggtgaagctggatgccaccagcgaggccgtggtgaaggtggatgtggccgaggaggagaaggagaagaagaagaagaagaagggcacagctgaggagcctgaggaggaggagccagatgagagcatgctggactggtggagcaagtactttgccagcattgacaccatgaaggagcagctgcggcagcaggagcccagcggcatcgacctggaggagaaggaggaggtggacaacacagagggcctgaagggctccatgaagggcaaggagaaggcccgggccgccaaggaggagaagaagaagaagacccagagcagcggcagcggccagggcagcgaggcccctgagaagaagaagcccaagattgatgagctgaaggtgtaccccaaggagctggagagcgagtttgacaactttgaggactggctgcacaccttcaacctgctgcggggcaagacaggagatgatgaagatggcagcacagaggaggagagaattgtgggccgcttcaagggcagcctgtgtgtgtacaaggtgcccctgcctgaagatgtgtcccgggaggccggctatgacagcacctacggcatgttccagggcatccccagcaatgaccccatcaacgtgctggtgcgggtgtatgtggtgcgggccacagacctgcaccctgctgacatcaacgggaaggctgacccctacatcgccatccggctgggcaagacagacatccgggacaaggagaactacatcagcaagcagctgaaccctgtgtttgggaagagctttgatattgaggccagcttccccatggagagcatgctgactgtggccgtgtatgactgggacctggtgggcacagatgacctgattggagagaccaagattgacctggagaaccgcttctacagcaagcaccgggccacctgtggcatcgcccagacctacagcacccacggctacaacatctggagggaccccatgaagcccagccagatcctgacccggctgtgcaaggatggcaaggtggatggcccccacttcggccccccaggccgggtgaaggtggccaacagagtcttcaccggccccagcgagattgaagatgaaaatggccagaggaagcccacagatgagcacgtggccctgctggccctgcggcactgggaggacatccccagggctggctgccgcctggtgcctgagcacgtggagacccggcccctgctgaacccagacaagccaggcatcgagcagggccgcctggagctgtgggtggacatgttccccatggacatgcctgcccctggcacccccctggacatcagccccaggaagcccaagaagtatgagctgcgggtcatcatctggaacacagatgaggtggtgctggaggatgatgacttcttcaccggggagaagagcagtgacatctttgtgcggggctggctgaagggccagcaggaggacaagcaggacacagatgtgcactaccacagcctgaccggggagggcaacttcaactggagatacctgttcccctttgactacctggccgctgaggagaagatcgtcatcagcaagaaggagagcatgttctcctgggatgaaacagagtacaagatcccagcccggctgaccctgcagatctgggatgctgaccacttcagcgcagatgacttcctgggcgccatcgagctggacctgaaccgcttccccaggggggccaagacagccaagcagtgcaccatggagatggccaccggggaggtggatgtgcccctggtgtccatcttcaagcagaagagggtgaagggctggtggcccctgctggccagaaatgaaaatgatgaatttgagctgaccgggaaggtggaggccgagctgcacctgctgacagctgaggaggccgagaagaaccctgtgggcctggccagaaatgaaccagaccccctggagaagcccaacagaccagacaccagcttcatctggttcctgaaccccctgaagagcgcccgctacttcctgtggcacacctaccgctggctgctgctgaagctgctgctgctgctgctgctgctgctgctgctggccctcttcctgtacagcgtgcccggctacctggtgaagaagatcctgggcgcctag

SEQ ID NO: 162877 - DNA, 3693 bp, synthetic construct
  misc_feature 1..3693: note = Description of Artificial Sequence: Synthetic coding sequence
  source 1..3693: mol_type = other DNA
atgatcaagacagagaagagctacccagagcggcggctgcggggcgtgctggaggagctgagctgtggctgctgccgcttcctgagcctggccgacaaggaccagggccacagcagcaggacccggctggaccgggagcggctgaagagctgcatgagggagctggagaacatgggccagcaggccaggatgctgcgggcccaggtgaagaggcacacagtgcgggacaagctgcggctgtgccagaacttcctgcagaagctgcgcttcctggctgatgagccccagcacagcatcccagacatcttcatctggatgatgagcaacaacaagagggtggcctatgcccgggtgcccagcaaggacctgctcttcagcatcgtggaggaggagaccgggaaggactgtgccaaggtgaagaccctcttcctgaagctgcccgggaagaggggcttcggcagcgctggctggacagtgcaggccaaggtggagctgtacctgtggctgggcctgagcaagcagaggaaggagttcctgtgtggcctgccctgtggcttccaggaggtgaaggccgcccagggcctgggcctgcacgccttcccccctgtgtccctggtgtacaccaagaagcaggccttccagctgcgggcccacatgtaccaggcccggagcctgtttgctgctgacagcagcggcctgagtgacccctttgcccgggtcttcttcatcaaccagagccagtgcacagaggtgctgaatgagaccctgtgccccacctgggaccagatgctggtgtttgacaacctggagctgtatggagaggcccacgagctgagagatgacccccccatcatcgtgattgagatctatgaccaggacagcatgggcaaggctgacttcatgggccgcacctttgccaagcccctggtgaagatggctgatgaggcctactgccccccacgcttccccccccagctggagtactaccagatctacagaggaaatgccacagctggggacctgctggccgcctttgagctgctgcagatcggccctgctgggaaggctgacctgccccccatcaatggacctgtggatgtggaccggggccccatcatgcctgtgcccatgggcatccggcctgtgctgagcaagtacagagtggaggtgctcttctggggcctgcgggacctgaagagggtgaacctggcccaggtggaccggccccgggtggacattgaatgtgccggcaagggcgtgcagagcagcctcatccacaactacaagaagaaccccaacttcaacaccctggtgaagtggtttgaggtggacctgcctgaaaatgagctgctgcacccccccctgaacatccgggtggtggactgccgggccttcggccgctacaccctggtgggcagccatgctgtgagcagcctgcggcgcttcatctaccggcccccagacagaagtgcccccagctggaacaccactggagaggtggtggtgaccatggagcctgaggtgcccatcaagaagctggagaccatggtgaagctggatgccaccagcgaggccgtggtgaaggtggatgtggccgaggaggagaaggagaagaagaagaagaagaagggcacagctgaggagcctgaggaggaggagccagatgagagcatgctggactggtggagcaagtactttgccagcattgacaccatgaaggagcagctgcggcagcaggagcccagcggcatcgacctggaggagaaggaggaggtggacaacacagagggcctgaagggctccatgaagggcaaggagaaggcccgggccgccaaggaggagaagaagaagaagacccagagcagcggcagcggccagggcagcgaggcccctgagaagaagaagcccaagattgatgagctgaaggtgtaccccaaggagctggagagcgagtttgacaactttgaggactggctgcacaccttcaacctgctgcggggcaagacaggagatgatgaagatggcagcacagaggaggagcgcatcgtgggccgcttcaagggcagcctgtgtgtgtacaaggtgcccctgcctgaagatgtgtcccgggaggccggctatgacagcacctacggcatgttccagggcatccccagcaatgaccccatcaacgtgctggtgcgggtgtatgtggtgcgggccacagacctgcaccctgctgacatcaatggcaaggctgacccctacatcgccatccggctgggcaagacagacatccgggacaaggagaactacatcagcaagcagctgaaccctgtgtttgggaagagctttgacatcgaggccagcttccccatggagagcatgctgactgtggccgtgtatgactgggacctggtgggcacagatgacctgattggagagaccaagattgacctggagaaccgcttctacagcaagcaccgggccacctgtggcatcgcccagacctacagcacccacggctacaacatctggagggaccccatgaagcccagccagatcctgacccggctgtgcaaggatggcaaggtggatggcccccactttggacctcctggccgggtgaaggtggccaacagagtcttcaccggccccagcgagattgaagatgaaaatggccagaggaagcccacagatgaacatgtggccctgctggccctgcggcactgggaggacatcccccgggccggctgccgcctggtgcctgagcacgtggagacccggcccctgctgaacccagacaagccaggcatcgagcagggccgcctggagctgtgggtggacatgttccccatggacatgcctgcccctggcacccccctggacatcagccccaggaagcccaagaagtatgagctgcgggtcatcatctggaacacagatgaggtggtgctggaggatgatgacttcttcaccggggagaagagcagtgacatctttgtgcggggctggctgaagggccagcaggaggacaagcaggacacagatgtgcactaccacagcctgactggagagggcaacttcaactggagatacctgttcccctttgactacctggccgctgaggagaagatcgtcatcagcaagaaggagagcatgttctcctgggatgaaacagagtacaagatcccagcccggctgaccctgcagatctgggatgctgaccacttcagcgcagatgacttcctgggcgccatcgagctggacctgaaccgcttccccaggggggccaagacagccaagcagtgcaccatggagatggccactggagaggtggatgtgcccctggtgtccatcttcaagcagaagagggtgaagggctggtggcccctgctggccagaaatgaaaatgatgaatttgagctgaccgggaaggtggaggccgagctgcacctgctgacagctgaggaggccgagaagaaccctgtgggcctggccagaaatgaaccagaccccctggagaagcccaacagaccagacaccagcttcatctggttcctgaaccccctgaagagcgcccgctacttcctgtggcacacctaccgctggctgctgctgaagctgctgctgctgctgctgctgctgctgctgctggccctcttcctgtacagcgtgcccggctacctggtgaagaagatcctgggcgcctag

SEQ ID NO: 162878 - DNA, 3693 bp, synthetic construct
  misc_feature 1..3693: note = Description of Artificial Sequence: Synthetic coding sequence
  source 1..3693: mol_type = other DNA
atgatcaagacagagaagagctacccagagcggcggctgcggggcgtgctggaggagctgagctgtggctgctgccgcttcctgagcctggccgacaaggaccagggccacagcagcaggacccggctggaccgggagcggctgaagagctgcatgagggagctggagaacatgggccagcaggccaggatgctgcgggcccaggtgaagaggcacacagtgcgggacaagctgcggctgtgccagaacttcctgcagaagctgcgcttcctggctgatgagccccagcacagcatcccagacatcttcatctggatgatgagcaacaacaagagggtggcctatgcccgggtgcccagcaaggacctgctcttcagcatcgtggaggaggagaccgggaaggactgtgccaaggtgaagaccctcttcctgaagctgcccgggaagaggggcttcggcagcgctggctggacagtgcaggccaaggtggagctgtacctgtggctgggcctgagcaagcagaggaaggagttcctgtgtggcctgccctgtggcttccaggaggtgaaggccgcccagggcctgggcctgcacgccttcccccctgtgtccctggtgtacaccaagaagcaggccttccagctgcgggcccacatgtaccaggcccggagcctgtttgctgctgacagcagcggcctgagtgacccctttgcccgggtcttcttcatcaaccagagccagtgcacagaggtgctgaatgagaccctgtgccccacctgggaccagatgctggtgtttgacaacctggagctgtatggagaggcccacgagctgagagatgacccccccatcatcgtgattgagatctatgaccaggacagcatgggcaaggctgacttcatgggccgcacctttgccaagcccctggtgaagatggctgatgaggcctactgccccccacgcttccccccccagctggagtactaccagatctacagaggaaatgccacagctggggacctgctggccgcctttgagctgctgcagatcggccctgctgggaaggctgacctgccccccatcaatggacctgtggatgtggaccggggccccatcatgcctgtgcccatgggcatccggcctgtgctgagcaagtacagagtggaggtgctcttctggggcctgcgggacctgaagagggtgaacctggcccaggtggaccggccccgggtggacattgaatgtgccggcaagggcgtgcagagcagcctcatccacaactacaagaagaaccccaacttcaacaccctggtgaagtggtttgaggtggacctgcctgaaaatgagctgctgcacccccccctgaacatccgggtggtggactgccgggccttcggccgctacaccctggtgggcagccatgctgtgagcagcctgcggcgcttcatctaccggcccccagacagaagtgcccccagctggaacaccactggagaggtggtggtgaccatggagcctgaggtgcccatcaagaagctggagaccatggtgaagctggatgccaccagcgaggccgtggtgaaggtggatgtggccgaggaggagaaggagaagaagaagaagaagaagggcacagctgaggagcctgaggaggaggagccagatgagagcatgctggactggtggagcaagtactttgccagcattgacaccatgaaggagcagctgcggcagcaggagcccagcggcatcgacctggaggagaaggaggaggtggacaacacagagggcctgaagggctccatgaagggcaaggagaaggcccgggccgccaaggaggagaagaagaagaagacccagagcagcggcagcggccagggcagcgaggcccctgagaagaagaagcccaagattgatgagctgaaggtgtaccccaaggagctggagagcgagtttgacaactttgaggactggctgcacaccttcaacctgctgcggggcaagacaggagatgatgaagatggcagcacagaggaggagcgcatcgtgggccgcttcaagggcagcctgtgtgtgtacaaggtgcccctgcctgaagatgtgtcccgggaggccggctatgacagcacctacggcatgttccagggcatccccagcaatgaccccatcaacgtgctggtgcgggtgtatgtggtgcgggccacagacctgcaccctgctgacatcaatggcaaggctgacccctacatcgccatccggctgggcaagacagacatccgggacaaggagaactacatcagcaagcagctgaaccctgtgtttgggaagagctttgacatcgaggccagcttccccatggagagcatgctgactgtggccgtgtatgactgggacctggtgggcacagatgacctgattggagagaccaagattgacctggagaaccgcttctacagcaagcaccgggccacctgtggcatcgcccagacctacagcacccacggctacaacatctggagggaccccatgaagcccagccagatcctgacccggctgtgcaaggatggcaaggtggatggcccccactttggacctcctggccgggtgaaggtggccaacagagtcttcaccggccccagcgagattgaagatgaaaatggccagaggaagcccacagatgaacatgtggccctgctggccctgcggcactgggaggacatcccccgggccggctgccgcctggtgcctgagcacgtggagacccggcccctgctgaacccagacaagccaggcatcgagcagggccgcctggagctgtgggtggacatgttccccatggacatgcctgcccctggcacccccctggacatcagccccaggaagcccaagaagtatgagctgcgggtcatcatctggaacacagatgaggtggtgctggaggatgatgacttcttcaccggggagaagagcagtgacatctttgtgcggggctggctgaagggccagcaggaggacaagcaggacacagatgtgcactaccacagcctgactggagagggcaacttcaactggagatacctgttcccctttgactacctggccgctgaggagaagatcgtcatcagcaagaaggagagcatgttctcctgggatgaaacagagtacaagatcccagcccggctgaccctgcagatctgggatgctgaccacttcagcgcagatgacttcctgggcgccatcgagctggacctgaaccgcttccccaggggggccaagacagccaagcagtgcaccatggagatggccactggagaggtggatgtgcccctggtgtccatcttcaagcagaagagggtgaagggctggtggcccctgctggccagaaatgaaaatgatgaatttgagctgaccgggaaggtggaggccgagctgcacctgctgacagctgaggaggccgagaagaaccctgtgggcctggccagaaatgaaccagaccccctggagaagcccaacagaccagacacagcctttgtgtggttcctgaaccccctgaagagcatcaagtacctgatctgcacccgctacaagtggctgatcatcaagatcgtgctggccctgctgggcctgctgatgctgggcctcttcctgtacagcctgcccggctacatggtgaagaagctgctgggcgcctag

SEQ ID NO: 162879 - DNA, 234 bp, synthetic construct
  misc_feature 1..234: note = Description of Artificial Sequence: Synthetic coding sequence
  source 1..234: mol_type = other DNA
gaggccgagaagaaccctgtgggcctggccagaaatgaaccagaccccctggagaagcccaacagaccagacacagcctttgtgtggttcctgaaccccctgaagagcatcaagtacctgatctgcacccgctacaagtggctgatcatcaagatcgtgctggccctgggctgcagctgctggggccccctgcagcccccctggctgcacggccagaaggccccctggggctag

SEQ ID NO: 162880 - DNA, 342 bp, synthetic construct
  misc_feature 1..342: note = Description of Artificial Sequence: Synthetic coding sequence
  source 1..342: mol_type = other DNA
gacttcctgggagatgagagcctgcaggaggaggagaaggacagccaggagacagatggcctgctgcccggcagccggcccagcagcaggcctcctggagagaagagcttccgcagcaagggccgggagaagaccaagggcggcagagatgatgagcacaaggccggccgcagcgtcttcagcgccatgaagctgggcaagaacagaagccacaaggaggagccccagaggccagatgagcctgctgtgctggagatggaggacctggaccacctggccatccggctgggagatggcctggaccctgacagcgtgtccctggcctctgtgacagccctgtag

SEQ ID NO: 162881 - DNA, 3924 bp, synthetic construct
  misc_feature 1..3924: note = Description of Artificial Sequence: Synthetic coding sequence
  source 1..3924: mol_type = other DNA
atgatgacagacacccaggacggccccagcgagagcagccagatcatgaggagcctgacccccctcatcaaccgggaggaggcctttggagaggccggggaggccggcctgtggcccagcatcacccacaccccagacagccaggaggagggcctgaatgacatccaggagatgatcaagacagagaagagctacccagagcggcggctgcggggcgtgctggaggagctgagctgtggctgctgccgcttcctgagcctggccgacaaggaccagggccacagcagcaggacccggctggaccgggagcggctgaagagctgcatgagggagctggagaacatgggccagcaggccaggatgctgcgggcccaggtgaagaggcacacagtgcgggacaagctgcggctgtgccagaacttcctgcagaagctgcgcttcctggctgatgagccccagcacagcatcccagacatcttcatctggatgatgagcaacaacaagagggtggcctatgcccgggtgcccagcaaggacctgctcttcagcatcgtggaggaggagaccgggaaggactgtgccaaggtgaagaccctcttcctgaagctgcccgggaagaggggctttggatctgctggctggacagtgcaggccaaggtggagctgtacctgtggctgggcctgagcaagcagaggaaggagttcctgtgtggcctgccctgtggcttccaggaggtgaaggccgcccagggcctgggcctgcacgccttcccccctgtgtccctggtgtacaccaagaagcaggccttccagctgcgggcccacatgtaccaggcccggagcctgtttgctgctgacagcagcggcctgagtgacccctttgcccgggtcttcttcatcaaccagagccagtgcacagaggtgctgaatgagaccctgtgccccacctgggaccagatgctggtgtttgacaacctggagctgtatggagaggcccacgagctgagagatgatcctcccatcatcgtcatcgagatctatgaccaggacagcatgggcaaggctgacttcatgggccgcacctttgccaagcccctggtgaagatggctgatgaggcctactgccccccacgcttccccccccagctggagtactaccagatctacagaggaaatgccacagctggggacctgctggccgcctttgagctgctgcagatcggccctgctgggaaggctgacctgccccccatcaatggacctgtggatgtggaccggggccccatcatgcctgtgcccatgggcatccggcctgtgctgagcaagtacagagtggaggtgctcttctggggcctgcgggacctgaagagggtgaacctggcccaggtggaccggccccgggtggacattgaatgtgccgggaaaggagtgcagagcagcctcatccacaactacaagaagaaccccaacttcaacaccctggtgaagtggtttgaggtggacctgcctgaaaatgagctgctgcacccccccctgaacatccgggtggtggactgccgggccttcggccgctacaccctggtgggcagccatgctgtgagcagcctgcggcgcttcatctacagacctccagacagaagtgcccccagctggaacaccaccgtgcggctgctgcggcgctgccgggtgctgtgcaatggaggcagcagcagccacagcactggagaggtggtggtgaccatggagcctgaggtgcccatcaagaagctggagaccatggtgaagctggatgccaccagcgaggccgtggtgaaggtggatgtggccgaggaggagaaggagaagaagaagaagaagaagggcacagctgaggagcctgaggaggaggagccagatgagagcatgctggactggtggagcaagtactttgccagcattgacaccatgaaggagcagctgcggcagcaggagcccagcggcatcgacctggaggagaaggaggaggtggacaacacagagggcctgaagggctccatgaagggcaaggagaaggcccgggccgccaaggaggagaagaagaagaagacccagagcagcggcagcggccagggcagcgaggcccctgagaagaagaagcccaagattgatgagctgaaggtgtaccccaaggagctggagagcgagtttgacaactttgaggactggctgcacaccttcaacctgctgcggggcaagacaggagatgatgaagatggcagcacagaggaggagagaattgtgggccgcttcaagggcagcctgtgtgtgtacaaggtgcccctgcctgaagatgtgtcccgggaggccggctatgacagcacctacggcatgttccagggcatccccagcaatgaccccatcaacgtgctggtgcgggtgtatgtggtgcgggccacagacctgcaccctgctgacatcaacgggaaggctgacccctacatcgccatccggctgggcaagacagacatccgggacaaggagaactacatcagcaagcagctgaaccctgtgtttgggaagagctttgatattgaggccagcttccccatggagagcatgctgactgtggccgtgtatgactgggacctggtgggcacagatgacctgattggagagaccaagattgacctggagaaccgcttctacagcaagcaccgggccacctgtggcatcgcccagacctacagcacccacggctacaacatctggagggaccccatgaagcccagccagatcctgacccggctgtgcaaggatggcaaggtggatggcccccacttcggccccccaggccgggtgaaggtggccaacagagtcttcaccggccccagcgagattgaagatgaaaatggccagaggaagcccacagatgagcacgtggccctgctggccctgcggcactgggaggacatccccagggctggctgccgcctggtgcctgagcacgtggagacccggcccctgctgaacccagacaagccaggcatcgagcagggccgcctggagctgtgggtggacatgttccccatggacatgcctgcccctggcacccccctggacatcagccccaggaagcccaagaagtatgagctgcgggtcatcatctggaacacagatgaggtggtgctggaggatgatgacttcttcaccggggagaagagcagtgacatctttgtgcggggctggctgaagggccagcaggaggacaagcaggacacagatgtgcactaccacagcctgaccggggagggcaacttcaactggagatacctgttcccctttgactacctggccgctgaggagaagatcgtcatcagcaagaaggagagcatgttctcctgggatgaaacagagtacaagatcccagcccggctgaccctgcagatctgggatgctgaccacttcagcgcagatgacttcctgggcgccatcgagctggacctgaaccgcttccccaggggggccaagacagccaagcagtgcaccatggagatggccaccggggaggtggatgtgcccctggtgtccatcttcaagcagaagagggtgaagggctggtggcccctgctggccagaaatgaaaatgatgaatttgagctgaccgggaaggtggaggccgagctgcacctgctgacagctgaggaggccgagaagaaccctgtgggcctggccagaaatgaaccagaccccctggagaagcccaacagaccagacaccagcttcatctggttcctgaaccccctgaagagcgcccgctacttcctgtggcacacctaccgctggctgctgctgaagctgctgctgctgctgctgctgctgctgctgctggccctcttcctgtacagcgtgcccggctacctggtgaagaagatcctgggcgcctag

SEQ ID NO: 162882 - DNA, 4527 bp, synthetic construct
  misc_feature 1..4527: note = Description of Artificial Sequence: Synthetic coding sequence
  source 1..4527: mol_type = other DNA
atgtttcctgcccggggcgtgcccctgcacctggagggggagggcgtcttcccctggggccctggagatgtgtccctgccctacctgagcaccagtgatgtgtccttctctgtgattgtggagaatgtgaactgctacagcagcggcatgatctgcaggaagttcatcagcatcaacgtgggcaacagcctgattgtgtttgatgatgattctggcaaccccagccctgagagcttcctggatgacaagcaggaggtgcacacctggagggtgggcttcttcaccctggtgcacttcccccaggagcacatcaccctgctgtgggaccagaggaccaccgtgcacgtgcaggccggcccccagtggcagggccagctggccggcctgtgtggcaactttgacctgaagaccatcaatgagatgaggaccccagagaacctggagctgaccaacccccaggagtttggcagctcctgggccgctgtggagtgcccagacaccctggacccccgggacatgtgtgtgctgaaccccctgcgggagccctttgccaagaaggaatgttccatcctgctgtctgaggtgtttgagatctgccaccctgtggtggatgtgacctggttctacagcaactgcctgacagacacctgtggctgcagccagggcggggactgtgagtgcttctgtgcctctgtgtctgcctatgcccaccagtgctgccagcacggcgtggccgtggactggaggaccccccggctgtgcctgctgggcaagggcccctaccagctgagcagcctggccgccggcggggccctggtgggcatgaaggctgtgggagatgacatcgtgctggtgaggacagaagatgtggccccagctgacatcgtgtccttcctgctgacagctgccctgtacaaggccaaggcccatgaccctgatgtggtgtccctggaggccgctgaccggcccaacttcttcctgcacgtgacagccaacggcagcctggagctggccaagtggcagggccgggacaccttccagcagcacgccagcttcctgctgcaccggggcacccggcaggccggcctggtggccctggagagcctggccaagcccagcagcttcctgtatgtgtctggagctgtgctggccctgcggctgtatgagcacacagaggtgttcagaagaggcaccctcttccggctgctggatgccaagcccagcggggccgcctaccccatctgtgagtggaggtatgatgcctgtgccagcccctgcttccagacctgccgggaccccagggctgccagctgcagagatgtgccccgggtggagggctgtgtgcctgtgtgccccaccccccaggtgctggatgaggtgacccagagatgtgtgtacctggaggactgtgtggagcctgctgtgtgggtgcccacagaggccctgggcaatgagaccctgccccccagccagggcctgcccacccccagtgatgaggagccccagctgagccaggagagccccaggacccccacccacaggcctgccctgaccccagctgcccccctgaccacagccctgaacccccctgtgacagccacagaggagcctgtggtgtccccaggccccacccagaccaccctgcagcagcccctggagctgacagccagccagctgcctgctggccccacagagagccctgccagcaagggcgtgacagccagcctgctggccatcccccacaccccagagagcagcagcctgcctgtggccctgcagacccccaccccaggcatggtgtctggggccatggagaccaccagggtgaccgtcatctttgctggcagccccaacatcaccgtgagcagccgcagccccccagccccccgcttccccctgatgaccaaggctgtgacagtgcggggccacggcagcctgcctgtgaggaccaccccaccccagcccagcctgacagccagccccagcagcaggcctgtggccagccctggggccatcagccgcagccccaccagcagcggcagccacaaggctgtgctgaccccagctgtgaccaaggtgatcagcaggactggagtgccccagcccacccaggcccagagcgccagcagccccagcacccccctgactgtggccggcacagctgctgagcaggtgcctgtgagccccctggccaccaggagcctggagatcgtgctgagcacagagaagggggaggccggccacagccagcccatgggcagccctgccagcccccagccccaccccctgcccagcgccccacccaggcctgcccagcacaccaccatggccaccaggagccctgccctgcccccagagaccccagctgctgccagcctgagcacagccacagatggcctggccgccacccccttcatgagcctggagagcacccggcccagccagctgctgagcggcctgcccccagacaccagcctgcccctggccaaggtgggcaccagcgcccctgtggccaccccaggccccaaggccagcgtcatcaccacccccctgcagccccaggccaccaccctgcctgcccagaccctgagccctgtgctgcccttcaccccagctgccatgacccaggcccacccccccacccacatcgcccctcctgctgctggaacagcccctggcctgctgctgggcgccaccctgcccaccagcggcgtgctgcctgtggccgagggcacagcctccatggtgtctgtggtgcccaggaagagcaccaccgggaaggtggccatcctgagcaagcaggtgtccctgcccacctccatgtatggcagcgctgagggcggccccacagagctgaccccagccaccagccaccccctgacccccctggtggccgagcctgagggcgcccaggccggcacagccctgcctgtgcccaccagctatgccctgagccgggtgtctgccaggacagccccccaggacagcatgctggtgctgctgccccagctggccgaggcccacggcaccagcgctggcccccacctggccgctgagcctgtggatgaggccaccacagagcccagcggccgcagcgccccagccctgagcatcgtggagggcctggccgaggccctggccaccaccacagaggccaacaccagcaccacctgtgtgcccatcgccgagcaggactgtgtgcgccacatctgcctggagggccagctgatccgggtgaaccagagccagcactgcccccagggcgccgccccaccccgctgtggcatcctgggcctggccgtgcgggtgggcggggaccgctgctgccccctgtgggagtgtgcctgccgctgcagcatcttcccagacctgagctttgtgacctttgatggcagccacgtggccctcttcaaggaggccatctacatcctgagccagagcccagatgagatgctgactgtgcacgtgctggactgcaagagcgccaacctgggccacctgaactggccacccttctgcctggtgatgctgaacatgacccacctggcccaccaggtgaccatcgaccgcttcaacaggaaggtgacagtggacctgcagcctgtgtggccccctgtgagccgctatggcttcagaattgaggacaccggccacatgtacatgatcctgacccccagcgacatccagatccagtggctgcacagcagcggcctgatgattgtggaggccagcaagaccagcaaggcccagggccacggcctgtgtggcatctgtgatggagatgctgccaatgacctgaccctgaaggatggctctgtggtgggcggcgctgaggaccctgcccccttcctggacagctggcaggtgcccagcagcctgacctctgtgggccagacccgcttccggccagacagctgtgccaccacagactgcagcccctgcctgaggatggtgagcaacagaaccttcagcgcctgccacagatttgtgcccccagagagcttctgtgagctgtggatccgggacaccaagtatgtgcagcagccctgtgtggccctgactgtgtatgtggccatgtgccacaagttccacgtgtgcatcgagtggaggagaagtgactactgccccttcctgtgcagcagtgacagcacctaccaggcctgtgtgacagcctgtgagccccccaagacctgccaggacggcatcctgggccccctggaccctgagcactgccaggtgctgggggagggctgtgtgtgcagcgagggcaccatcctgcaccggcggcacagcgccctgtgcatccctgaggccaagtgtgcctgtggggactgcccagacagcatccctgagtgccaggagggggaggccctgactgtgcacaggaacaccacagagctgtgctgccccctgtaccagtgtgtgtgtgagaacttccgctgcccccaggtgcagtgtggcctgggcacagccctggtggaggtgtggagcccagaccgctgctgcccctacaagagctgtggctag

SEQ ID NO: 162883 - DNA, 8778 bp, synthetic construct
  misc_feature 1..8778: note = Description of Artificial Sequence: Synthetic coding sequence
  source 1..8778: mol_type = other DNA
atgggcgtgctggccagcgccctgtgctggctgctgtgtgtgtggctgccctggggcgagcaggccgctgagagcctgcgggtgcagaggctgggggagcgggtggtggacagcggccgcagcggggcccggggcatgagaaatgtgaagggcatgagaaatggacctgcccagaccagggtgagcagcagcagcagccaccaggaggccaccctggccatgggagacaaggccaccgtggtgggcggccagcaggccgaggccccagattctgtggccatgagctcctgggagcggcggctgcaccgggccaagtgtgcccccagctacctgttcagctgcttcaatggaggagaatgtgtgcacccagccttctgtgactgccgccgcttcaatgccaccggcccccgctgccagatggtgtacaatgccggccctgagcgggacagcatctgccgggcctggggccagcaccacgtggagacctttgatggcctgtactactacctgagcggcaagggcagctacaccctggtgggcagacatgagcctgagggccagagcttcagcatccaggtgcacaatgacccccagtgtggcagcagcccctacacctgcagcagagctgtgtccctcttctttgtgggggagcaggagatccacctggccaaggaggtgacccacggcggcatgagggtgcagctgccccacgtgatgggcagcgcccggctgcagcagctggccggctacgtgattgtgcgccaccagagcgccttcaccctggcctgggatggagccagcgctgtgtacatcaagatgagccctgagctgctgggctggacccacggcctgtgtggcaacaacaatgctgaccccaaggatgacctggtgaccagcagcggcaagctgacagatgatgtggtggagtttgtgcacagctggcaggagcaggcccccaaccagcccccaggccccaccaccagcagcctgcccaggcctccctgcctgcagcagaaccctggcaccatgcagggcgtgtatgagcagtgtgaggccctgctgcggcccccatttgatgcctgccacgcctacgtgagccccctgcccttcaccgccagctgcaccagtgacctgtgccagagcatgggagatgtggccacctggtgccgggccctggccgagtatgcccgggcctgtgcccaggccggccggcccctgcagggctggaggacccagctgcggcagtgcaccgtgcactgcaaggagaaggccttcacctacaatgaatgtattgcctgctgcccagccagctgccacccccgggccagctgtgtggacagcgagatcgcctgtgtggatggctgctactgccccaacggcctcatctttgaagatggcggctgtgtggccccagcagaatgtccctgtgagttccacggcaccctgtacccacctggctctgtggtgaaggaggactgcaacacctgcacctgcaccagcggcaagtgggagtgcagcacagctgtgtgcccagcagaatgttctgtgactggagacatccacttcaccacctttgatggccgccgctacaccttccctgccacctgccagtacatcctggccaagagccgcagcagcggcaccttcaccgtgaccctgcagaatgccccctgtggcctgaaccaggatggagcctgtgtgcagagcgtgtctgtcatcctgcaccaggacccccggcggcaggtgaccctgacccaggccggagatgtgctgctgtttgaccagtacaagatcatccccccctacacagatgatgcctttgagatccggcggctgagcagcgtcttcctgcgggtgaggaccaacgtgggcgtgcgggtgctgtatgaccgggagggcctgcggctgtacctgcaggtggaccagcgctgggtggaggacacagtgggcctgtgtggcaccttcaacggcaacacccaggatgacttcctgagccctgtgggcgtgcctgagagcaccccccagctgtttggaaacagctggaagaccctgagcgcctgcagccccctggtgtctggcagccccctggacccctgtgatgtgcacctgcaggccgccagctacagcgtgcaggcctgcagcgtgctgactggagagatgtttgccccctgcagcgccttcctgagccctgtgccctactttgagcagtgcagaagagatgcctgccgctgtggccagccctgcctgtgtgccaccctggcccactacgcccacctgtgcagaagacatggcctgcctgtggacttccgggcccggctgcctgcctgtgccctgagctgtgaggccagcaaggagtacagcccctgtgtggccccctgtggccgcacctgccaggacctggccagccctgaggcctgtggggtggatggaggagatgacctgagcagagatgaatgtgtggagggctgtgcctgccccccagacacctacctggacacccaggccgacctgtgtgtgcccaggaaccagtgcagctgccacttccagggcgtggactacccacctggggacagcgacatccccagcctgggccactgccactgcaaggatggagtgatgagctgtgacagccgggccccagctgctgcctgcccagctggccaggtgtttgtgaactgcagcgacctgcacacagacctggagctgagccgggagaggacctgtgagcagcagctgctgaacctgtctgtgtctgcccggggcccctgcctgagcggctgtgcctgcccccagggcctgctgcggcatggagatgcctgcttcctgcctgaagaatgtccctgcacctggaagggcaaggagtacttccctggggaccaggtgatgagcccctgccacacctgtgtgtgccagaggggcagcttccagtgcaccctgcacccctgtgccagcacctgcacagcctatggagacagacactaccgcacctttgatggcctgccctttgattttgtgggcgcctgcaaggtgcacctggtgaagagcaccagtgatgtgtccttcagcgtcatcgtggagaatgtgaactgctacagcagcggcatgatctgcaggaagttcatcagcatcaacgtgggcaacagcctcatcgtgtttgatgatgacagcggcaaccccagccctgagagcttcctggatgacaagcaggaggtgcacacctggagggtgggcttcttcaccctggtgcacttcccccaggagcacatcaccctgctgtgggaccagaggaccaccgtgcacgtgcaggccggcccccagtggcagggccagctggccggcctgtgtggcaactttgacctgaagaccatcaatgagatgaggaccccagagaacctggagctgaccaacccccaggagtttggcagctcctgggccgctgtggagtgcccagacaccctggacccccgggacatgtgtgtgctgaaccccctgcgggagccctttgccaagaaggagtgcagcatcctgctgtctgaggtgtttgagatctgccaccctgtggtggatgtgacctggttctacagcaactgcctgacagacacctgtggctgcagccagggcggggactgtgagtgcttctgtgcctctgtgtctgcctatgcccaccagtgctgccagcacggcgtggccgtggactggaggaccccccggctgtgcccctatgactgtgacttcttcaacaaggtgctgggcaagggcccctaccagctgagcagcctggccgccggcggggccctggtgggcatgaaggctgtgggagatgacatcgtgctggtgaggacagaagatgtggccccagctgacatcgtgtccttcctgctgacagctgccctgtacaaggccaaggcccatgaccctgatgtggtgtccctggaggccgctgaccggcccaacttcttcctgcacgtgacagccaacggcagcctggagctggccaagtggcagggccgggacaccttccagcagcacgccagcttcctgctgcaccggggcacccggcaggccggcctggtggccctggagagcctggccaagcccagcagcttcctgtatgtgtctggagctgtgctggccctgcggctgtatgagcacacagaggtgttcagaagaggcaccctcttccggctgctggatgccaagcccagcggggccgcctaccccatctgtgagtggaggtatgatgcctgtgccagcccctgcttccagacctgccgggaccccagggctgccagctgcagagatgtgccccgggtggagggctgtgtgcctgtgtgccccaccccccaggtgctggatgaggtgacccagagatgtgtgtacctggaggactgtgtggagcctgctgtgtgggtgcccacagaggccctgggcaatgagaccctgccccccagccagggcctgcccacccccagtgatgaggagccccagctgagccaggagagccccaggacccccacccacaggcctgccctgaccccagctgcccccctgaccacagccctgaacccccctgtgacagccacagaggagcctgtggtgtccccaggccccacccagaccaccctgcagcagcccctggagctgacagccagccagctgcctgctggccccacagagagccctgccagcaagggcgtgacagccagcctgctggccatcccccacaccccagagagcagcagcctgcctgtggccctgcagacccccaccccaggcatggtgtctggggccatggagaccaccagggtgaccgtcatctttgctggcagccccaacatcaccgtgagcagccgcagccccccagccccccgcttccccctgatgaccaaggctgtgacagtgcggggccacggcagcctgcctgtgaggaccaccccaccccagcccagcctgacagccagccccagcagcaggcctgtggccagccctggggccatcagccgcagccccaccagcagcggcagccacaaggctgtgctgaccccagctgtgaccaaggtgatcagcaggactggagtgccccagcccacccaggcccagagcgccagcagccccagcacccccctgactgtggccggcacagctgctgagcaggtgcctgtgagccccctggccaccaggagcctggagatcgtgctgagcacagagaagggggaggccggccacagccagcccatgggcagccctgccagcccccagccccaccccctgcccagcgccccacccaggcctgcccagcacaccaccatggccaccaggagccctgccctgcccccagagaccccagctgctgccagcctgagcacagccacagatggcctggccgccacccccttcatgagcctggagagcacccggcccagccagctgctgagcggcctgcccccagacaccagcctgcccctggccaaggtgggcaccagcgcccctgtggccaccccaggccccaaggccagcgtcatcaccacccccctgcagccccaggccaccaccctgcctgcccagaccctgagccctgtgctgcccttcaccccagctgccatgacccaggcccacccccccacccacatcgcccctcctgctgctggaacagcccctggcctgctgctgggcgccaccctgcccaccagcggcgtgctgcctgtggccgagggcacagcctccatggtgtctgtggtgcccaggaagagcaccaccgggaaggtggccatcctgagcaagcaggtgtccctgcccacctccatgtatggcagcgctgagggcggccccacagagctgaccccagccaccagccaccccctgacccccctggtggccgagcctgagggcgcccaggccggcacagccctgcctgtgcccaccagctatgccctgagccgggtgtctgccaggacagccccccaggacagcatgctggtgctgctgccccagctggccgaggcccacggcaccagcgctggcccccacctggccgctgagcctgtggatgaggccaccacagagcccagcggccgcagcgccccagccctgagcatcgtggagggcctggccgaggccctggccaccaccacagaggccaacaccagcaccacctgtgtgcccatcgccgagcaggactgtgtgcgccacatctgcctggagggccagctgatccgggtgaaccagagccagcactgcccccagggcgccgccccaccccgctgtggcatcctgggcctggccgtgcgggtgggcggggaccgctgctgccccctgtgggagtgtgcctgccgctgcagcatcttcccagacctgagctttgtgacctttgatggcagccacgtggccctcttcaaggaggccatctacatcctgagccagagcccagatgagatgctgactgtgcacgtgctggactgcaagagcgccaacctgggccacctgaactggccacccttctgcctggtgatgctgaacatgacccacctggcccaccaggtgaccatcgaccgcttcaacaggaaggtgacagtggacctgcagcctgtgtggccccctgtgagccgctatggcttcagaattgaggacaccggccacatgtacatgatcctgacccccagcgacatccagatccagtggctgcacagcagcggcctgatgattgtggaggccagcaagaccagcaaggcccagggccacggcctgtgtggcatctgtgatggagatgctgccaatgacctgaccctgaaggatggctctgtggtgggcggcgctgaggaccctgcccccttcctggacagctggcaggtgcccagcagcctgacctctgtgggccagacccgcttccggccagacagctgtgccaccacagactgcagcccctgcctgaggatggtgagcaacagaaccttcagcgcctgccacagatttgtgcccccagagagcttctgtgagctgtggatccgggacaccaagtatgtgcagcagccctgtgtggccctgactgtgtatgtggccatgtgccacaagttccacgtgtgcatcgagtggaggagaagtgactactgccccttcctgtgcagcagtgacagcacctaccaggcctgtgtgacagcctgtgagccccccaagacctgccaggacggcatcctgggccccctggaccctgagcactgccaggtgctgggggagggctgtgtgtgcagcgagggcaccatcctgcaccggcggcacagcgccctgtgcatccctgaggccaagtgtgcctgcacagacagcatgggcgtgccccgggccctgggggagacctggaacagcagcctgagcggctgctgccagcaccagtgccaggccccagacaccatcgtgcctgtggacctgggctgccccagccccaggcctgagagctgcctgcgctttggagaggtggccctgctgctgcccaccaaggacccctgctgcctgggcaccgtgtgtgtgtgcaaccagaccctgtgtgagggcctggcccccacctgcaggcctggccaccggctgctgacccacttccaggaggacagctgctgccccagctacagctgtgaatgtgaccctgacctgtgtgaggccgagctggtgcccagctgccggcaggaccagatcctgatcaccggccgcctgggggacagctgctgcaccagctacttctgtgcctgtggggactgcccagacagcatccctgagtgccaggagggggaggccctgactgtgcacaggaacaccacagagctgtgctgccccctgtaccagtgtgtgtgtgagaacttccgctgcccccaggtgcagtgtggcctgggcacagccctggtggaggtgtggagcccagaccgctgctgcccctacaagagctgtgaatgtgactgtgacaccatccctgtgccccgctgccacctgtgggagaagagccagctggatgaggagttcatgcacagcgtggagaatgtgtgtggctgtgccaagtatgaatgtgtgaaggcccctgtgtgcctgagccgggagctgggcgtgatgcagcccggccagacagtggtggagctgtctgcagatggagtgtgccacaccagccgctgcaccaccgtgctggaccccctgaccaacttctaccagatcaacaccacctctgtgctgtgtgacatccactgtgaggccaaccaggagtatgagcacccccgggacctggccgcctgctgcggcagctgcagaaatgtgtcctgcctcttcaccttccccaacggcaccaccagcctcttcctgcccggggcctcctggattgctgactgtgcccggcaccactgcagcagcacccccctgggcgctgtgctggtgcgcagccccatcagctgcccccccctgaatgaaacagaatgtgccaaggtgggcggctctgtggtgcccagcctggagggctgctgcaggacctgcaaggaggatggccgcagctgcaagaaggtgaccatccgcatgaccatcaggaagaatgaatgtcgcagcagcacccctgtgaacctggtgtcctgtgatggccgctgccccagcgccagcatctacaactacaacatcaacacctacgcccgcttctgcaagtgctgccgggaggtgggcctgcagaggagatctgtgcagctgttctgtgccaccaatgccacctgggtgccctacacagtgcaggagcccacagactgtgcctgccagtggagctag

SEQ ID NO: 162884 - DNA, 387 bp, synthetic construct
  misc_feature 1..387: note = Description of Artificial Sequence: Synthetic coding sequence
  source 1..387: mol_type = other DNA
atggcccgcatcctgctgctcttcctgcccggcctggtggccgtgtgtgctgtgcacggcatcttcatggaccggctggccagcaagaagctgtgtgctgatgatgaatgtgtgtacaccatcagcctggccagcgcccaggaggactacaatgccccagactgccgcttcatcaacgtgaagaagggccagcagatctacgtgtacagcaagctggtgaaggaaaatggagctggggagttctgggccggctctgtgtatggagatggccaggatgagatgggcgtggtgggctacttccccaggaacctggtgaaggagcagagggtgtaccaggaggccaccaaggaggtgcccaccacagacatcgacttcttctgtgagtag

SEQ ID NO: 162885 - DNA, 1446 bp, synthetic construct
  misc_feature 1..1446: note = Description of Artificial Sequence: Synthetic coding sequence
  source 1..1446: mol_type = other DNA
atgcagctgtacagctctgtgtgcacccactacccagctggggcccctggccccacagctgctgccccagcccctcctgctgctgccacccccttcaaggtgtccctgcagcccccaggagctgctggggccgcccctgagcctgagaccggggagtgccagcctgctgctgctgctgagcaccgggaggccgctgctgtgcctgctgccaagatgcctgccttcagcagctgctttgaggtggtgtctggagctgctgccccagccagcgctgctgctggccccccaggggccagctgcaagccacccctgcccccccactacaccagcacagcccagatcaccgtgcgggccctgggcgctgaccggctgctgctgcacggccctgaccctgtgcctggagctgctggcagcgctgctgccccccggggccgctgcctgctgctggccccagccccagctgcccctgtgcccccccggcggggcagcagcgcctggctgctggaggagctgctgcggccagactgcccagagcccgccggcctggatgccacccgggagggccctgacaggaacttccggctgtctgagcaccggcaggccctggccgccgccaagcaccggggccctgctgccaccccaggcagcccagaccccggccctggcccctggggcgaggagcacctggccgagcggggcccccggggctgggagcggggcggggacagatgtgatgcccctggaggagatgctgcccggcggccagaccctgaggccgaggcccccccagctggcagcattgaagctgcccccagcagcgctgctgagcctgtgattgtgtccagaagtgaccccagagatgagaagctggccctgtacctggccgaggtggagaagcaggacaagtacctgcggcagaggaacaagtaccgcttccacatcatcccagatggcaactgcctgtacagagctgtgtccaagacagtgtatggagaccagagcctgcaccgggagctgcgggagcagacagtgcactacatcgctgaccacctggaccacttcagccccctcatcgagggagatgtgggggagttcatcatcgctgctgcccaggatggagcctgggccggctacccagagctgctggccatgggccagatgctgaatgtgaacatccacctgaccaccggcggccgcctggagagccccaccgtgtccaccatgatccactacctgggccctgaggacagcctgcggcccagcatctggctgtcctggctgagcaatggccactatgatgctgtgtttgaccacagctaccccaacccagaatatgacaactggtgcaagcagacccaggtgcagaggaagagagatgaggagctggccaagtccatggccatcagcctgagcaagatgtacatcgagcagaatgcctgcagctag

SEQ ID NO: 162886 - DNA, 1197 bp, synthetic construct
  misc_feature 1..1197: note = Description of Artificial Sequence: Synthetic coding sequence
  source 1..1197: mol_type = other DNA
atgagcaggaagcaggccgccaagagcaggcctggcagcggcagcaggaaggccgaggccgagaggaagagagatgagcgggccgcccggcgggccctggccaaggagaggaggaacagacctgagagcggcggcggcggcggctgtgaggaggagtttgtgtcctttgccaaccagctgcaggccctgggcctgaagctgcgggaggtgcctggagatggcaactgcctcttccgggccctgggggaccagctggagggccacagcaggaaccacctgaagcaccggcaggagaccgtggactacatgatcaagcagcgggaggactttgagccctttgtggaggatgacatcccctttgagaagcacgtggccagcctggccaagccaggcacctttgctggaaatgatgccatcgtggcctttgccaggaaccaccagctgaatgtggtgatccaccagctgaatgcccccctgtggcagatccggggcacagagaagagctctgtgcgggagctgcacatcgcctaccgctatggagagcactatgattctgtgcggcgcatcaatgacaacagcgaggccccagcccacctgcagacagacttccagatgctgcaccaggatgagagcaacaagcgggagaagatcaagaccaagggcatggacagtgaagatgacctgagagatgaggtggaggatgctgtgcagaaggtgtgcaatgccaccggctgcagcgacttcaacctgattgtgcagaacctggaggccgagaactacaacatcgagagcgccatcatcgctgtgctgaggatgaaccagggcaagagaaataatgctgaggagaacctggagcccagcggccgggtgctgaagcagtgtggccccctgtgggaggagggcggcagcggggcccgcatcttcggcaaccagggcctgaatgaaggaagaacagagaacaacaaggcccaggccagccccagcgaggagaacaaggccaacaagaaccagctggccaaggtgaccaacaagcagaggcgggagcagcagtggatggagaagaagaagaggcaggaggagcggcaccgccacaaggccctggagagccggggcagccaccgggacaacaacagaagtgaagctgaggccaacacccaggtgaccctggtgaagacctttgctgccctgaacatctag

SEQ ID NO: 162887 - DNA, 438 bp, synthetic construct
  misc_feature 1..438: note = Description of Artificial Sequence: Synthetic coding sequence
  source 1..438: mol_type = other DNA
atggcctgcatccactacctgagagaaaatcgggagaagtttgaggccttcatcgagggcagctttgaggagtacctgaagaggctggagaacccccaggagtgggtgggccaggtggagatcagcgccctgagcctgatgtacaggaaggacttcatcatctaccgggagcccaacgtgagccccagccaggtgacagagaacaacttccctgagaaggtgctgctgtgcttcagcaatggaaaccactatgacatcgtgtaccccatcaagtacaaggagagcagcgccatgtgccagagcctgctgtatgagctgctgtatgagaaggtgttcaagacagatgtgtccaagatcgtgatggagctggacaccctggaggtggctgatgaggacaacagcgagatcagtgacagtgaagatgacagctgcaagtag

SEQ ID NO: 162888 - DNA, 3345 bp, synthetic construct
  misc_feature 1..3345: note = Description of Artificial Sequence: Synthetic coding sequence
  source 1..3345: mol_type = other DNA
atggaggccgctgtgggcgtgcctgatggaggagaccagggcggggccggcccccgggaggatgccacccccatggatgcctacctgaggaagctgggcctgtacaggaagctggtggccaaggatggcagctgcctcttccgggctgtggccgagcaggtgctgcacagccagagcagacatgtggaggtgaggatggcctgcatccactacctgcgggagaaccgggagaagtttgaggccttcatcgagggcagctttgaggagtacctgaagaggctggagaacccccaggagtgggtgggccaggtggagatcagcgccctgagcctgatgtacaggaaggacttcatcatctaccgggagcccaacgtgagccccagccaggtgacagagaacaacttccctgagaaggtgctgctgtgcttcagcaatggaaaccactatgacatcgtgtaccccatcaagtacaaggagagcagcgccatgtgccagagcctgctgtatgagctgctgtatgagaaggtgttcaagacagatgtgtccaagatcgtgatggagctggacaccctggaggtggctgatgaggacaacagcgagatcagtgacagtgaagatgacagctgcaagagcaagacagctgctgctgctgctgatgtgaatggcttcaagcccctgtctggaaatgagcagctgaagaacaatggaaacagcaccagcctgcccctgagcaggaaggtgctgaagagcctgaacccagctgtgtacagaaatgtggagtatgagatctggctgaagagcaagcaggcccagcagaagagggactacagcattgctgctggcctgcagtatgaggtgggggacaagtgccaggtgcggctggaccacaacgggaagttcctgaatgctgatgtgcagggcatccacagtgaaaatggacctgtgctggtggaggagctgggcaagaagcacaccagcaagaacctgaaggcccctcctcctgagagctggaacacagtgtctgggaagaagatgaagaagcccagcaccagcggccagaacttccacagtgatgtggactaccggggccccaagaaccccagcaagcccatcaaggcccccagcgccctgcccccccggctgcagcaccccagcggcgtgcggcagcacgccttcagcagccacagcagcggcagccagagccagaagttcagcagcgagcacaagaacctgagcaggacccccagccagatcatcaggaagccagaccgggagcgggtggaggactttgaccacaccagccgggagagcaactacttcggcctgagccctgaggagcggcgggagaagcaggccatcgaggagagccggctgctgtatgagatccagaacagagatgagcaggccttccctgccctgagcagcagctctgtgaaccagagcgccagccagagcagcaacccctgtgtgcagaggaagagcagccacgtgggggacaggaagggcagcagaagaaggatggacacagaggagaggaaggacaaggacagcatccacggccacagccagctggacaagaggcctgagcccagcaccctggagaacatcacagatgacaagtatgccaccgtgagcagccccagcaagagcaagaagctggagtgccccagccctgctgagcagaagccagctgagcacgtgtccctgagcaacccagcccccctgctggtgtccccagaggtgcacctgaccccagctgtgcccagcctgcctgccaccgtgcctgcctggcccagcgagcccaccaccttcggccccactggagtgcctgcccccatccctgtgctgtctgtgacccagaccctgaccaccggccctgacagcgctgtgtcccaggcccacctgacccccagccctgtgcctgtgtccatccaggccgtgaaccagcccctgatgcccctgccccagaccctgagcctgtaccaggaccccctgtacccaggcttcccctgcaatgagaagggggaccgggccatcgtgcccccctacagcctgtgccagacaggagaggacctgcccaaggacaagaacatcctgcgcttcttcttcaacctgggcgtgaaggcctacagctgccccatgtgggccccccacagctacctgtaccccctgcaccaggcctacctggccgcctgcaggatgtaccccaaggtgcctgtgcctgtgtacccccacaacccctggttccaggaggccccagctgcccagaatgaaagtgactgcacctgcacagatgcccacttccccatgcagacagaggcctctgtgaatggccagatgccccagcctgagatcggcccccccaccttcagcagccccctggtgattcctcccagccaggtgtctgagagccacggccagctgagctaccaggccgacctggagagcgagaccccaggccagctgctgcatgctgactatgaggagagcctgagcggcaagaacatgttcccccagcccagctttggccccaaccccttcctgggccctgtgcccatcgccccacccttcttcccccacgtgtggtacggctaccccttccagggcttcatcgagaaccctgtgatgaggcagaacatcgtgctgcccagtgatgagaagggggagctggacctgagcctggagaacctggacctgagcaaggactgtggctctgtgtccacagtggatgagttccctgaggcccggggggagcacgtgcacagcctgcctgaggcctctgtgagcagcaagccagatgagggccgcacagagcagagcagccagaccaggaaggctgacacagccctggccagcatcccccctgtggccgagggcaaggcccacccccccacccagatcctgaaccgggagcgggagaccgtgcctgtggagctggagcccaagaggaccatccagagcctgaaggagaagacagagaaggtgaaggaccccaagacagctgctgatgtggtgtcccctggggccaacagcgtggacagccgggtgcagaggcccaaggaggagagcagtgaagatgaaaatgaggtgagcaacatcctgcggagcggccgcagcaagcagttctacaaccagacctacggcagcaggaagtacaagagtgactggggctacagcggccggggcggctaccagcacgtgcgctctgaggagagctggaagggccagcccagccgcagcagagatgagggctaccagtaccacagaaatgtgcggggccggcccttccggggggacagaagaagaagtggcatgggagatggccaccggggccagcacacctag

SEQ ID NO: 162889 - DNA, 3150 bp, synthetic construct
  misc_feature 1..3150: note = Description of Artificial Sequence: Synthetic coding sequence
  source 1..3150: mol_type = other DNA
atggcctgcatccactacctgagagaaaatcgggagaagtttgaggccttcatcgagggcagctttgaggagtacctgaagaggctggagaacccccaggagtgggtgggccaggtggagatcagcgccctgagcctgatgtacaggaaggacttcatcatctaccgggagcccaacgtgagccccagccaggtgacagagaacaacttccctgagaaggtgctgctgtgcttcagcaatggaaaccactatgacatcgtgtaccccatcaagtacaaggagagcagcgccatgtgccagagcctgctgtatgagctgctgtatgagaaggtgttcaagacagatgtgtccaagatcgtgatggagctggacaccctggaggtggctgatgaggacaacagcgagatcagtgacagtgaagatgacagctgcaagagcaagacagctgctgctgctgctgatgtgaatggcttcaagcccctgtctggaaatgagcagctgaagaacaacggcaacagcaccagcctgcccctgagcaggaaggtgctgaagagcctgaacccagctgtgtacagaaatgtggagtatgagatctggctgaagagcaagcaggcccagcagaagagggactacagcattgctgctggcctgcagtatgaggtgggggacaagtgccaggtgcggctggaccacaacgggaagttcctgaatgctgatgtgcagggcatccacagtgaaaatggacctgtgctggtggaggagctgggcaagaagcacaccagcaagaacctgaaggcccctcctcctgagagctggaacacagtgtctgggaagaagatgaagaagcccagcaccagcggccagaacttccacagtgatgtggactaccggggccccaagaaccccagcaagcccatcaaggcccccagcgccctgcccccccggctgcagcaccccagcggcgtgcggcagcacgccttcagcagccacagcagcggcagccagagccagaagttcagcagcgagcacaagaacctgagcaggacccccagccagatcatcaggaagccagaccgggagcgggtggaggactttgaccacaccagccgggagagcaactacttcggcctgagccctgaggagcggcgggagaagcaggccatcgaggagagccggctgctgtatgagatccagaacagagatgagcaggccttccctgccctgagcagcagctctgtgaaccagagcgccagccagagcagcaacccctgtgtgcagaggaagagcagccacgtgggggacaggaagggcagcagaagaaggatggacacagaggagaggaaggacaaggacagcatccacggccacagccagctggacaagaggcctgagcccagcaccctggagaacatcacagatgacaagtatgccaccgtgagcagccccagcaagagcaagaagctggagtgccccagccctgctgagcagaagccagctgagcacgtgtccctgagcaacccagcccccctgctggtgtccccagaggtgcacctgaccccagctgtgcccagcctgcctgccaccgtgcctgcctggcccagcgagcccaccaccttcggccccaccggggtgcctgcccccatccctgtgctgtctgtgacccagaccctgaccactggaccagattctgctgtgtcccaggcccacctgacccccagccctgtgcctgtgtccatccaggccgtgaaccagcccctgatgcccctgccccagaccctgagcctgtaccaggaccccctgtacccaggcttcccctgcaatgaaaaaggagaccgggccatcgtgcccccctacagcctgtgccagacaggagaggacctgcccaaggacaagaacatcctgcgcttcttcttcaacctgggcgtgaaggcctacagctgccccatgtgggccccccacagctacctgtaccccctgcaccaggcctacctggccgcctgcaggatgtaccccaaggtgcctgtgcctgtgtacccccacaacccctggttccaggaggccccagctgcccagaatgaaagtgactgcacctgcacagatgcccacttccccatgcagacagaggcctctgtgaatggccagatgccccagcctgagatcggcccccccaccttcagcagccccctggtgatcccccccagccaggtgtctgagagccacggccagctgagctaccaggccgacctggagagcgagaccccaggccagctgctgcacgccgactatgaggagagcctgagcggcaagaacatgttcccccagcccagctttggccccaaccccttcctgggccctgtgcccatcgccccacccttcttcccccacgtgtggtacggctaccccttccagggcttcattgaaaatcctgtgatgaggcagaacatcgtgctgcccagtgatgagaagggggagctggacctgagcctggagaacctggacctgagcaaggactgtggctctgtgtccacagtggatgagttccctgaggcccggggggagcacgtgcacagcctgcctgaggcctctgtgagcagcaagccagatgagggccgcacagagcagagcagccagaccaggaaggctgacacagccctggccagcatcccccctgtggccgagggcaaggcccacccccccacccagatcctgaaccgggagcgggagaccgtgcctgtggagctggagcccaagaggaccatccagagcctgaaggagaagacagagaaggtgaaggaccccaagacagctgctgatgtggtgtcccctggggccaacagcgtggacagccgggtgcagaggcccaaggaggagagcagtgaagatgaaaatgaggtgagcaacatcctgcggagcggccgcagcaagcagttctacaaccagacctacggcagcaggaagtacaagagtgactggggctacagcggccggggcggctaccagcacgtgcgctctgaggagagctggaagggccagcccagccgcagcagagatgagggctaccagtaccacagaaatgtgcggggccggcccttccggggggacagaagaagaagtggcatgggagatggccaccggggccagcacacctag

SEQ ID NO: 162890 - DNA, 420 bp, synthetic construct
  misc_feature 1..420: note = Description of Artificial Sequence: Synthetic coding sequence
  source 1..420: mol_type = other DNA
atggcctgcatccactacctgagagaaaatcgggagaagtttgaggccttcatcgagggcagctttgaggagtacctgaagaggctggagaacccccaggagtgggtgggccaggtggagatcagcgccctgagcctgatgtacaggaaggacttcatcatctaccgggagcccaacgtgagccccagccaggtgacagagaacaacttccctgagaaggtgctgctgtgcttcagcaatggaaaccactatgacatcgtgtaccccatcaagtacaaggagagcagcgccatgtgccagagcctgctgtatgagctgctgtatgagaaggtgttcaagacagatgtgtccaagatcgtgatggagctggacaccctggaggtggctgatgaggacaacagcgagatcagtgacagctag

SEQ ID NO: 162891 - DNA, 438 bp, synthetic construct; identical to SEQ ID NO: 162887
  misc_feature 1..438: note = Description of Artificial Sequence: Synthetic coding sequence
  source 1..438: mol_type = other DNA

SEQ ID NO: 162892 - DNA, 1716 bp, synthetic construct
  misc_feature 1..1716: note = Description of Artificial Sequence: Synthetic coding sequence
  source 1..1716: mol_type = other DNA
atgaccatcctgcccaagaagaagcccccacctccagatgctgaccctgccaatgagcccccacctcctggccccatgcccccagcccccaggagaggaggaggagtgggcgtgggcggcggcggcactggagtgggcggcggggaccgggaccgggacagcggcgtggtgggcgcccggccccgggccagccccccaccccagggccccctgcccggccccccaggggccctgcaccgctgggccctggccgtgcccccaggagctgtggccggcccccggccccagcaggccagccccccaccctgtggcggccctgggggccctgggggcggccctggagatgccctgggcgctgctgctgctggggtgggcgctgctggggtggtggtgggcgtgggcggcgctgtgggcgtgggcggctgctgcagcggccctggccacagcaagagaagacggcaggcccctggggtgggcgctgtgggcggcggcagccctgagcgggaggaggtgggcgccggctacaacagtgaagatgaatatgaagctgctgctgcccgcatcgaggccatggaccctgccaccgtggagcagcaggagcactggtttgagaaggccctgcgggacaagaagggcttcatcatcaagcagatgaaggaggatggagcctgcctcttccgggctgtggccgaccaggtgtatggagaccaggacatgcatgaggtggtgaggaagcactgcatggactacctgatgaagaatgctgactacttcagcaactacgtgacagaggacttcaccacctacatcaacaggaagaggaagaacaactgccacggcaaccacatcgagatgcaggccatggccgagatgtacaacagacctgtggaggtgtaccagtacagcacaggcaccagcgctgtggagcccatcaacaccttccacggcatccaccagaatgaagatgagcccatccgggtgtcctaccacaggaacatccactacaacagcgtggtgaaccccaacaaggccaccatcggcgtgggcctgggcctgcccagcttcaagccaggctttgctgagcagagcctgatgaagaatgccatcaagaccagcgaggagagctggattgagcagcagatgctggaggacaagaagagggccacagactgggaggccaccaatgaggccatcgaggagcaggtggcccgggagagctacctgcagtggctgcgggaccaggagaagcaggcccggcaggtgcggggccccagccagcccaggaaggccagcgccacctgcagcagcgccacagctgctgccagcagcggcctggaggagtggaccagccgcagcccccggcagaggagcagcgccagcagccctgagcaccctgagctgcatgctgagctgggcatgaagccacccagccctggcaccgtgctggccctggccaagccacccagcccctgtgcccctggcaccagcagccagttctctgctggagctgaccgggccaccagccccctggtgtccctgtacccagccctggagtgccgggccctgatccagcagatgagccccagcgccttcggcctgaatgactgggatgatgatgagatcctggcctctgtgctggccgtgtcccagcaggagtacctggacagcatgaagaagaacaaggtgcaccgggaccccccaccagacaagagctag

SEQ ID NO: 162893 - DNA, 1701 bp, synthetic construct
  misc_feature 1..1701: note = Description of Artificial Sequence: Synthetic coding sequence
  source 1..1701: mol_type = other DNA
atgaccatcctgcccaagaagaagcccccacctccagatgctgaccctgccaatgagcccccacctcctggccccatgcccccagcccccaggagaggaggaggagtgggcgtgggcggcggcggcactggagtgggcggcggggaccgggaccgggacagcggcgtggtgggcgcccggccccgggccagccccccaccccagggccccctgcccggccccccaggggccctgcaccgctgggccctggccgtgcccccaggagctgtggccggcccccggccccagcaggccagccccccaccctgtggcggccctgggggccctgggggcggccctggagatgccctgggcgctgctgctgctggggtgggcgctgctggggtggtggtgggcgtgggcggcgctgtgggcgtgggcggctgctgcagcggccctggccacagcaagagaagacggcaggcccctggggtgggcgctgtgggcggcggcagccctgagcgggaggaggtgggcgccggctacaacagtgaagatgaatatgaagctgctgctgcccgcatcgaggccatggaccctgccaccgtggagcagcaggagcactggtttgagaaggccctgcgggacaagaagggcttcatcatcaagcagatgaaggaggatggagcctgcctcttccgggctgtggccgaccaggtgtatggagaccaggacatgcatgaggtggtgaggaagcactgcatggactacctgatgaagaatgctgactacttcagcaactacgtgacagaggacttcaccacctacatcaacaggaagaggaagaacaactgccacggcaaccacatcgagatgcaggccatggccgagatgtacaacagacctgtggaggtgtaccagtacagcacagagcccatcaacaccttccacggcatccaccagaatgaagatgagcccatccgggtgtcctaccacaggaacatccactacaacagcgtggtgaaccccaacaaggccaccatcggcgtgggcctgggcctgcccagcttcaagccaggctttgctgagcagagcctgatgaagaatgccatcaagaccagcgaggagagctggattgagcagcagatgctggaggacaagaagagggccacagactgggaggccaccaatgaggccatcgaggagcaggtggcccgggagagctacctgcagtggctgcgggaccaggagaagcaggcccggcaggtgcggggccccagccagcccaggaaggccagcgccacctgcagcagcgccacagctgctgccagcagcggcctggaggagtggaccagccgcagcccccggcagaggagcagcgccagcagccctgagcaccctgagctgcacgccgagctgggcatgaagccacccagccctggcaccgtgctggccctggccaagccacccagcccctgtgcccctggcaccagcagccagttctctgctggagctgaccgggccaccagccccctggtgtccctgtacccagccctggagtgccgggccctgatccagcagatgagccccagcgccttcggcctgaatgactgggatgatgatgagatcctggcctctgtgctggccgtgtcccagcaggagtacctggacagcatgaagaagaacaaggtgcaccgggaccccccaccagacaagagctag

SEQ ID NO: 162894 - DNA, 1701 bp, synthetic construct; identical to SEQ ID NO: 162893
  misc_feature 1..1701: note = Description of Artificial Sequence: Synthetic coding sequence
  source 1..1701: mol_type = other DNA

SEQ ID NO: 162895 - DNA, 1050 bp, synthetic construct
  misc_feature 1..1050: note = Description of Artificial Sequence: Synthetic coding sequence
  source 1..1050: mol_type = other DNA
atgaaggaggatggagcctgcctcttccgggctgtggccgaccaggtgtatggagaccaggacatgcatgaggtggtgaggaagcactgcatggactacctgatgaagaatgctgactacttcagcaactacgtgacagaggacttcaccacctacatcaacaggaagaggaagaacaactgccacggcaaccacatcgagatgcaggccatggccgagatgtacaacagacctgtggaggtgtaccagtacagcacagagcccatcaacaccttccacggcatccaccagaatgaagatgagcccatccgggtgtcctaccacaggaacatccactacaacagcgtggtgaaccccaacaaggccaccatcggcgtgggcctgggcctgcccagcttcaagccaggctttgctgagcagagcctgatgaagaatgccatcaagaccagcgaggagagctggattgagcagcagatgctggaggacaagaagagggccacagactgggaggccaccaatgaggccatcgaggagcaggtggcccgggagagctacctgcagtggctgcgggaccaggagaagcaggcccggcaggtgcggggccccagccagcccaggaaggccagcgccacctgcagcagcgccacagctgctgccagcagcggcctggaggagtggaccagccgcagcccccggcagaggagcagcgccagcagccctgagcaccctgagctgcatgctgagctgggcatgaagccacccagccctggcaccgtgctggccctggccaagccacccagcccctgtgcccctggcaccagcagccagttctctgctggagctgaccgggccaccagccccctggtgtccctgtacccagccctggagtgccgggccctgatccagcagatgagccccagcgccttcggcctgaatgactgggatgatgatgagatcctggcctctgtgctggccgtgtcccagcaggagtacctggacagcatgaagaagaacaaggtgcaccgggaccccccaccagacaagagctag

SEQ ID NO: 162896 - DNA, 1629 bp, synthetic construct
  misc_feature 1..1629: note = Description of Artificial Sequence: Synthetic coding sequence
  source 1..1629: mol_type = other DNA
atgaccatcctgcccaagaagaagcccccacctccagatgctgaccccggcggcactggagtgggcggcggggaccgggaccgggacagcggcgtggtgggcgcccggccccgggccagccccccaccccagggccccctgcccggccccccaggggccctgcaccgctgggccctggccgtgcccccaggagctgtggccggcccccggccccagcaggccagccccccaccctgtggcggccctgggggccctgggggcggccctggagatgccctgggcgctgctgctgctggggtgggcgctgctggggtggtggtgggcgtgggcggcgctgtgggcgtgggcggctgctgcagcggccctggccacagcaagagaagacggcaggcccctggggtgggcgctgtgggcggcggcagccctgagcgggaggaggtgggcgccggctacaacagtgaagatgaatatgaagctgctgctgcccgcatcgaggccatggaccctgccaccgtggagcagcaggagcactggtttgagaaggccctgcgggacaagaagggcttcatcatcaagcagatgaaggaggatggagcctgcctcttccgggctgtggccgaccaggtgtatggagaccaggacatgcatgaggtggtgaggaagcactgcatggactacctgatgaagaatgctgactacttcagcaactacgtgacagaggacttcaccacctacatcaacaggaagaggaagaacaactgccacggcaaccacatcgagatgcaggccatggccgagatgtacaacagacctgtggaggtgtaccagtacagcacagagcccatcaacaccttccacggcatccaccagaatgaagatgagcccatccgggtgtcctaccacaggaacatccactacaacagcgtggtgaaccccaacaaggccaccatcggcgtgggcctgggcctgcccagcttcaagccaggctttgctgagcagagcctgatgaagaatgccatcaagaccagcgaggagagctggattgagcagcagatgctggaggacaagaagagggccacagactgggaggccaccaatgaggccatcgaggagcaggtggcccgggagagctacctgcagtggctgcgggaccaggagaagcaggcccggcaggtgcggggccccagccagcccaggaaggccagcgccacctgcagcagcgccacagctgctgccagcagcggcctggaggagtggaccagccgcagcccccggcagaggagcagcgccagcagccctgagcaccctgagctgcacgccgagctgggcatgaagccacccagccctggcaccgtgctggccctggccaagccacccagcccctgtgcccctggcaccagcagccagttctctgctggagctgaccgggccaccagccccctggtgtccctgtacccagccctggagtgccgggccctgatccagcagatgagccccagcgccttcggcctgaatgactgggatgatgatgagatcctggcctctgtgctggccgtgtcccagcaggagtacctggacagcatgaagaagaacaaggtgcaccgggaccccccaccagacaagagctag

SEQ ID NO: 162897 - DNA, 1335 bp, synthetic construct
  misc_feature 1..1335: note = Description of Artificial Sequence: Synthetic coding sequence
  source 1..1335: mol_type = other DNA
ggtgtggtggtgggcgtgggcggcgctgtgggcgtgggcggctgctgcagcggccctggccacagcaagagaagacggcaggcccctggggtgggcgctgtgggcggcggcagccctgagcgggaggaggtgggcgccggctacaacagtgaagatgaatatgaggccgccgccgccagaattgaggccatggaccctgccaccgtggagcagcaggagcactggtttgagaaggccctgcgggacaagaagggcttcatcatcaagcagatgaaggaggatggagcctgcctcttccgggctgtggccgaccaggtgtatggagaccaggacatgcatgaggtggtgaggaagcactgcatggactacctgatgaagaatgctgactacttcagcaactacgtgacagaggacttcaccacctacatcaacaggaagaggaagaacaactgccacggcaaccacatcgagatgcaggccatggccgagatgtacaacagacctgtggaggtgtaccagtacagcacaggcaccagcgctgtggagcccatcaacaccttccacggcatccaccagaatgaagatgagcccatccgggtgtcctaccacaggaacatccactacaacagcgtggtgaaccccaacaaggccaccatcggcgtgggcctgggcctgcccagcttcaagccaggctttgctgagcagagcctgatgaagaatgccatcaagaccagcgaggagagctggattgagcagcagatgctggaggacaagaagagggccacagactgggaggccaccaatgaggccatcgaggagcaggtggcccgggagagctacctgcagtggctgcgggaccaggagaagcaggcccggcaggtgcggggccccagccagcccaggaaggccagcgccacctgcagcagcgccacagctgctgccagcagcggcctggaggagtggaccagccgcagcccccggcagaggagcagcgccagcagccctgagcaccctgagctgcacgccgagctgggcatgaagccacccagccctggcaccgtgctggccctggccaagccacccagcccctgtgcccctggcaccagcagccagttctctgctggagctgaccgggccaccagccccctggtgtccctgtacccagccctggagtgccgggccctgatccagcagatgagccccagcgccttcggcctgaatgactgggatgatgatgagatcctggcctctgtgctggccgtgtcccagcaggagtacctggacagcatgaagaagaacaaggtgcaccgggaccccccaccagacaagagctag

SEQ ID NO: 162898 - DNA, 867 bp, synthetic construct
  misc_feature 1..867: note = Description of Artificial Sequence: Synthetic coding sequence
  source 1..867: mol_type = other DNA
atggatgaccccaagtctgagcagcagaggatcctgcggcggcaccagcgggagcggcaggagctgcaggcccagatccgcagcctgaagaacagcgtgcccaagacagacaagaccaagaggaagcagctgctgcaggatgtggccaggatggaggccgagatggcccagaagcaccggcaggagctggagaagttccaggatgacagcagcattgagagcgtggtggaggacctggccaagatgaacctggagaaccggccccccaggagcagcaaggcccacaggaagcgggagaggatggagagcgaggagcgggagcggcaggagagcatcttccaggccgagatgtctgagcacctggccggcttcaagcgggaggaggaggagaagctggccgccatcctgggcgcccggggcctggagatgaaggccatcccagcagatggccactgcatgtaccgggccatccaggaccagctggtgttttctgtgtctgtggagatgctgcgctgcaggacagccagctacatgaagaagcacgtggatgagttcctgcccttcttcagcaaccctgagaccagtgacagctttggctatgatgacttcatgatctactgtgacaacatcgtgaggaccacagcctggggcggccagctggagctgcgggccctgagccacgtgctgaagacccccattgaagtcatccaggccgacagccccaccctcatcattggagaggagtatgtgaagaagcccatcatcctggtgtacctgcgctatgcctacagcctgggggagcactacaacagcgtgacccccctggaggccggggccgccggcggcgtgctgccccggctgctgtag

SEQ ID NO: 162899 - DNA, 972 bp, synthetic construct
  misc_feature 1..972: note = Description of Artificial Sequence: Synthetic coding sequence
  source 1..972: mol_type = other DNA
atggagccccgggtgcgggtggagggctggaaggtgcccaccagccgctgccgcttcctgctggcccgggtgctgggctacctggtggtgatggaggccgtgctgacagaggagctggatgaggaggagcagctgctgcggcggcacaggaaggagaagaaggagctgcaggccaagatccagggcatgaagaatgctgtgcccaagaatgacaagaagaggaggaagcagctgacagaagatgtggccaagctggagaaggagatggagcagaagcaccgggaggagctggagcagctgaagctgaccaccaaggagaacaagattgattctgtggccgtgaacatcagcaacctggtgctggagaaccagcccccacgcatcagcaaggcccagaagaggcgggagaagaaggccgccctggagaaggagcgggaggagagaattgctgaggccgagattgagaacctgaccggggcccggcacatggagagcgagaagctggcccagatcctggccgcccggcagctggagatcaagcagatccccagtgatggccactgcatgtacaaggccatcgaggaccagctgaaggagaaggactgtgccctgactgtggtggccctgcggagccagacagctgagtacatgcagagccacgtggaggacttcctgcccttcctgaccaaccccaacacaggagacatgtacaccccagaggagttccagaagtactgtgaagatattgtgaacacagctgcctggggcggccagctggagctgcgggccctgagccacatcctgcagacccccatcgagatcatccaggccgacagcccccccatcatcgtgggggaggagtacagcaagaagcccctcatcctggtgtacatgagacatgcctacggcctgggggagcactacaacagcgtgacccggctggtgaacatcgtgacagagaactgcagctag

SEQ ID NO: 162900 - DNA, 579 bp, synthetic construct
  misc_feature 1..579: note = Description of Artificial Sequence: Synthetic coding sequence
  source 1..579: mol_type = other DNA
atgatcagcaaggagaagaaggccgccctggagaaggagcgggaggagagaattgctgaggccgagattgagaacctgactggagcccggcacatggagagcgagaagctggcccagatcctggccgcccggcagctggagatcaagcagatccccagtgatggccactgcatgtacaaggccatcgaggaccagctgaaggagaaggactgtgccctgactgtggtggccctgcggagccagacagctgagtacatgcagagccacgtggaggacttcctgcccttcctgaccaaccccaacacaggagacatgtacaccccagaggagttccagaagtactgtgaggacatcgtgaacacagctgcctggggcggccagctggagctgcgggccctgagccacatcctgcagacccccatcgagatcatccaggccgacagcccccccatcatcgtgggggaggagtacagcaagaagcccctcatcctggtgtacatgagacatgcctacggcctgggggagcactacaacagcgtgacccggctggtgaacatcgtgacagagaactgcagctag

SEQ ID NO: 162901 - DNA, 2781 bp, synthetic construct
  misc_feature 1..2781: note = Description of Artificial Sequence: Synthetic coding sequence
  source 1..2781: mol_type = other DNA
atggtgtcctctgtgctgcccaaccccaccagcgctgagtgctgggccgccctgctgcatgaccccatgaccctggacatggatgctgtgctgagtgactttgtgcgcagcactggagctgagcccggcctggcccgggacctgctggagggcaagaactgggacctgacagctgccctgagtgactatgagcagctgcggcaggtgcacacagccaacctgccccacgtgttcaatgaaggccggggccccaagcagcctgagcgggagccccagcccggccacaaggtggagcggccctgcctgcagaggcaggatgacatcgcccaggagaagaggctgagccggggcatcagccacgccagcagcgccatcgtgtccctggcccggagccacgtggccagcgagtgcaacaatgagcagttccccctggagatgcccatctacaccttccagctgcctgacctgtctgtgtacagcgaggacttccgctccttcatcgagcgggacctgattgagcaggccaccatggtggccctggagcaggccggccgcctgaactggtggagcacagtgtgcaccagctgcaagaggctgctgcccctggccaccactggagatggcaactgcctgctgcacgccgccagcctgggcatgtggggcttccatgaccgggacctggtgctgaggaaggccctgtacaccatgatgaggactggagctgagcgggaggccctgaagaggcgctggcgctggcagcagacccagcagaacaaggaggaggagtgggagcgggagtggacagagctgctgaagctggccagcagcgagcccaggacccacttcagcaagaatggaggcaccggcggcggcgtggacaacagcgaggaccctgtgtatgagagcctggaggagttccacgtgtttgtgctggcccacatcctgcggcggcccatcgtggtggtggccgacaccatgctgcgggacagcggcggggaggcctttgcccccatcccctttggaggcatctacctgcccctggaggtgccccccaaccgctgccactgcagccccctggtgctggcctatgaccaggcccacttcagcgccctggtgtccatggagcagagggaccagcagcgggagcaggccgtcatccccctgacagattctgagcacaagctgctgcccctgcactttgctgtggaccccgggaaggactgggagtggggcaaggatgacaatgacaatgcccggctggcccacctgatcctgagcctggaggccaagctgaacctgctgcacagctacatgaatgtgacctggatccgcatccccagcgagacccgggcccccctggcccagcctgagagccccacagccagcgctggagaagatgtgcagagcctggccgacagcctggacagcgaccgggacagcgtgtgcagcaacagcaacagcaacaacgggaagaatggcaaggacaaggagaaggagaagcagaggaaggagaaggacaagaccagggctgacagcgtggccaacaagctgggcagcttcagcaagaccctgggcatcaagctgaagaagaacatgggcggcctgggcggcctggtgcacggcaagatgggccgggccaacagcgccaacgggaagaatggagacagcgctgagcggggcaaggagaagaaggccaagagcaggaagggcagcaaggaggagagcggggccagcgccagcaccagccccagcgagaagaccacccccagccccacagacaaggccgccggggccagccctgctgagaagggcggcggccccagaggagatgcctggaagtacagcacagatgtgaagctgagcctgaacatcctgcgggccgccatgcagggcgagaggaagttcatctttgctggcctgctgctgaccagccaccgccaccagttccacgaggagatgattggctactacctgaccagcgcccaggagcgcttctctgctgagcaggagcagaggagaagagatgctgccacagctgctgctgctgctgctgctgctgctgctgccacagccaagaggcctccccggcggcctgagacagagggcgtgcctgtgcctgagcgggccagccctggcccccccacccagctggtgctgaagctgaaggagcggcccagccctggccctgctgctggccgggccgcccgggctgctgctgggggcacagccagccctgggggcggggcccggcgggccagcgccagcggccctgtgcccggccgcagccccccagccccagcccggcagagcgtcatccacgtgcaggccagcggggccagagatgaggcctgtgccccagctgtgggcgccctgcggccctgtgccacctacccccagcagaacagaagcctgagcagccagagctacagccctgcccgggctgctgccctgaggacagtgaacacagtggagagcctggcccgggctgtgcctggggccctgcctggagctgctggaacagctggagctgctgagcacaagagccagacctacaccaatggatttggagccctgagagatggcctggagtttgctgatgctgatgcccccacagcccggagcaatggagaatgtggccggggcggccctggccctgtgcagaggcgctgccagcgggagaactgtgccttctacggccgggcagagacagagcactactgcagctactgctaccgggaggagctgcggcggcggcgggaggcccggggggcccggccctag

SEQ ID NO: 162902 - DNA, 2802 bp, synthetic construct
  misc_feature 1..2802: note = Description of Artificial Sequence: Synthetic coding sequence
  source 1..2802: mol_type = other DNA
atggtgtcctctgtgctgcccaaccccaccagcgctgagtgctgggccgccctgctgcatgaccccatgaccctggacatggatgctgtgctgagtgactttgtgcgcagcactggagctgagcccggcctggcccgggacctgctggagggcaagaactgggacctgacagctgccctgagtgactatgagcagctgcggcaggtgcacacagccaacctgccccacgtgttcaatgaaggccggggccccaagcagcctgagcgggagccccagcccggccacaaggtggagcggccctgcctgcagaggcaggatgacatcgcccaggagaagaggctgagccggggcatcagccacgccagcagcgccatcgtgtccctggcccggagccacgtggccagcgagtgcaacaatgagcagttccccctggagatgcccatctacaccttccagctgcctgacctgtctgtgtacagcgaggacttccgctccttcatcgagcgggacctgattgagcaggccaccatggtggccctggagcaggccggccgcctgaactggtggagcacagtgtgcaccagctgcaagaggctgctgcccctggccaccactggagatggcaactgcctgctgcacgccgccagcctgggcatgtggggcttccatgaccgggacctggtgctgaggaaggccctgtacaccatgatgaggactggagctgagcgggaggccctgaagaggcgctggcgctggcagcagacccagcagaacaaggagagcggcctggtgtacacagaggaggagtgggagcgggagtggacagagctgctgaagctggccagcagcgagcccaggacccacttcagcaagaatggaggcactggaggcggcgtggacaacagtgaagatcctgtgtatgagagcctggaggagttccacgtgtttgtgctggcccacatcctgcggcggcccatcgtggtggtggccgacaccatgctgcgggacagcggcggggaggcctttgcccccatcccctttggaggcatctacctgcccctggaggtgccccccaaccgctgccactgcagccccctggtgctggcctatgaccaggcccacttcagcgccctggtgtccatggagcagagggaccagcagcgggagcaggccgtcatccccctgacagacagcgagcacaagctgctgcccctgcactttgctgtggaccccgggaaggactgggagtggggcaaggatgacaatgacaatgcccggctggcccacctgatcctgagcctggaggccaagctgaacctgctgcacagctacatgaatgtgacctggatccgcatccccagcgagacccgggcccccctggcccagcctgagagccccacagccagcgctggggaggatgtgcagagcctggccgacagcctggacagcgaccgggacagcgtgtgcagcaacagcaacagcaacaacgggaagaatggcaaggacaaggagaaggagaagcagaggaaggagaaggacaagaccagggctgacagcgtggccaacaagctgggcagcttcagcaagaccctgggcatcaagctgaagaagaacatgggcggcctgggcggcctggtgcacggcaagatgggccgggccaacagcgccaacgggaagaatggagacagcgctgagcggggcaaggagaagaaggccaagagcaggaagggcagcaaggaggagagcggggccagcgccagcaccagccccagcgagaagaccacccccagccccacagacaaggctgctggggccagccctgctgagaagggcggcggccccagaggagatgcctggaagtacagcacagatgtgaagctgagcctgaacatcctgcgggccgccatgcagggcgagaggaagttcatctttgctggcctgctgctgaccagccaccgccaccagttccacgaggagatgattggctactacctgaccagcgcccaggagcgcttctctgctgagcaggagcagaggagaagagatgctgccacagctgctgctgctgctgctgctgctgctgctgccacagccaagaggcccccaagaagacctgagacagaaggagtgcctgtgcctgagcgggccagccctggcccccccacccagctggtgctgaagctgaaggagcggcccagccctggccctgctgctggccgggccgcccgggctgctgctgggggcacagccagccctgggggcggggcccggcgggccagcgccagcggccctgtgcccggccgcagccccccagccccagcccggcagagcgtcatccacgtgcaggccagcggggccagagatgaggcctgtgccccagctgtgggcgccctgcggccctgtgccacctacccccagcagaacagaagcctgagcagccagagctacagccctgcccgggccgccgccctgaggacagtgaacacagtggagagcctggcccgggctgtgcctggggccctgcccggggctgctggaacagctggagctgctgagcacaagagccagacctacaccaacggctttggagccctgagagatggcctggagtttgctgatgctgatgcccccacagcccggagcaatggagaatgtggccggggcggccctggccctgtgcagaggcgctgccagcgggagaactgtgccttctacggccgggcagagacagagcactactgcagctactgctaccgggaggagctgcggaggagaagagaggcccggggggcccggccctag

SEQ ID NO: 162903 - DNA, 333 bp, synthetic construct
  misc_feature 1..333: note = Description of Artificial Sequence: Synthetic coding sequence
  source 1..333: mol_type = other DNA
atggtgtcctctgtgctgcccaaccccaccagcgctgagtgctgggccgccctgctgcatgaccccatgaccctggacatggatgctgtgctgagtgactttgtgcgcagcactggagctgagcccggcctggcccgggacctgctggagggcaagaactgggacctgacagctgccctgagtgactatgagcagctgcggcaggtgcacacagccaacctgccccacgtgttcaatgaaggccggggccccaagcagcctgagcgggagccccagcccggccacaaggtggagcggccctgcctgcagaggcaggatgacatcgcccagtag

SEQ ID NO: 162904 - DNA, 2532 bp, synthetic construct
  misc_feature 1..2532: note = Description of Artificial Sequence: Synthetic coding sequence
  source 1..2532: mol_type = other DNA
atgaccctggacatggatgctgtgctgagtgactttgtgcgcagcactggagctgagcccggcctggcccgggacctgctggagggcaagaactgggatgtgaatgctgccctgagtgactttgagcagctgcggcaggtgcatgctggcaacctgcccccatccttcagcgagggcagcggcggcagcaggaccccagagaagggcttcagtgaccgggagcccacccggcccccccggcccatcctgcagaggcaggatgacatcgtgcaggagaagaggctgagccggggcatcagccacgccagcagcagcatcgtgtccctggcccggagccacgtgagcagcaatggaggcggcggcggcagcaatgagcaccccctggagatgcccatctgtgccttccagctgcctgacctgactgtgtacaatgaagacttccgctccttcatcgagcgggacctgattgagcagagcatgctggtggccctggagcaggccggccgcctgaactggtgggtgtctgtggaccccaccagccagaggctgctgcccctggccaccactggagatggcaactgcctgctgcacgccgccagcctgggcatgtggggcttccatgaccgggacctgatgctgaggaaggccctgtatgccctgatggagaagggcgtggagaaggaggccctgaagaggcgctggcgctggcagcagacccagcagaacaaggagagcggcctggtgtacacagaagatgagtggcagaaggagtggaatgaactcatcaagctggccagcagcgagcccaggatgcacctgggcaccaacggggccaactgtggcggcgtggagagcagcgaggagcctgtgtatgagagcctggaggagttccacgtgtttgtgctggcccacgtgctgcggcggcccatcgtggtggtggccgacaccatgctgcgggacagcggcggggaggcctttgcccccatcccctttggaggcatctacctgcccctggaggtgcctgccagccagtgccacaggagccccctggtgctggcctatgaccaggcccacttcagcgccctggtgtccatggagcagaaggagaacaccaaggagcaggccgtcatccccctgacagacagcgagtacaagctgctgcccctgcactttgctgtggaccccgggaagggctgggagtggggcaaggatgacagcgacaacgtgcggctggccagcgtcatcctgagcctggaggtgaagctgcacctgctgcacagctacatgaatgtgaagtggatccccctgagcagtgatgcccaggcccccctggcccagcctgagagccccacagccagcgctggagatgagcccaggagcaccccagagagcggggacagcgacaaggagagcgtgggcagcagcagcaccagcaatgaaggaggaagaaggaaggagaagagcaagagggaccgggagaaggacaagaagagagctgacagcgtggccaacaagctgggcagctttgggaagaccctgggcagcaagctgaagaagaacatgggcggcctgatgcacagcaagggcagcaagccaggcggcgtgggcaccggcctgggcggcagcagcggcacagagaccctggagaagaagaagaagaacagcctgaagtcctggaagggcggcaaggaggaggccgctggagatggccctgtgtctgagaagcccccagctgagagcgtgggcaatggaggcagcaagtacagccaggaggtgatgcagagcctgagcatcctgaggacagccatgcagggcgagggcaagttcatctttgtgggcaccctgaagatgggccaccgccaccagtaccaggaggagatgatccagcgctacctgagtgatgctgaggagcgcttcctggccgagcagaagcagaaggaggccgagaggaagatcatgaatggaggcattggaggcggccccccaccagccaagaagccagagccagatgcccgggaggagcagcccactggacctcctgctgagagccgggccatggccttcagcacaggctacccaggggacttcaccatcccccggcccagcggcggcggcgtgcactgccaggagccccggcggcagctggccggcggcccctgtgtgggcggcctgcccccctatgccaccttcccccggcagtgccccccaggccggccctacccccaccaggacagcatccccagcctggagcccggcagccacagcaaggatggcctgcacagaggagccctgctgcccccaccctacagagtggccgacagctacagcaatggctaccgggagcccccagagccagatggctgggccggcggcctgcggggcctgccccccacccagaccaagtgcaagcagcccaactgcagcttctacggccaccctgagaccaacaacttctgcagctgctgctaccgggaggagctgcggcggcgggagcgggagccagatggagagctgctggtgcaccgcttctag

SEQ ID NO: 162905 - DNA, 1284 bp, synthetic construct
  misc_feature 1..1284: note = Description of Artificial Sequence: Synthetic coding sequence
  source 1..1284: mol_type = other DNA
atgaccctggacatggatgctgtgctgagtgactttgtgcgcagcactggagctgagcccggcctggcccgggacctgctggagggcaagaactgggatgtgaatgctgccctgagtgactttgagcagctgcggcaggtgcatgctggcaacctgcccccatccttcagcgagggcagcggcggcagcaggaccccagagaagggcttcagtgaccgggagcccacccggcccccccggcccatcctgcagaggcaggatgacatcgtgcaggagaagaggctgagccggggcatcagccacgccagcagcagcatcgtgtccctggcccggagccacgtgagcagcaatggaggcggcggcggcagcaatgagcaccccctggagatgcccatctgtgccttccagctgcctgacctgactgtgtacaatgaagacttccgctccttcatcgagcgggacctgattgagcagagcatgctggtggccctggagcaggccggccgcctgaactggtgggtgtctgtggaccccaccagccagaggctgctgcccctggccaccactggagatggcaactgcctgctgcacgccgccagcctgggcatgtggggcttccatgaccgggacctgatgctgaggaaggccctgtatgccctgatggagaagggcgtggagaaggaggccctgaagaggcgctggcgctggcagcagacccagcagaacaaggagagcggcctggtgtacacagaagatgagtggcagaaggagtggaatgaactcatcaagctggccagcagcgagcccaggatgcacctgggcaccaacggggccaactgtggcggcgtggagagcagcgaggagcctgtgtatgagagcctggaggagttccacgtgtttgtgctggcccacgtgctgcggcggcccatcgtggtggtggccgacaccatgctgcgggacagcggcggggaggcctttgcccccatcccctttggaggcatctacctgcccctggaggtgcctgccagccagtgccacaggagccccctggtgctggcctatgaccaggcccacttcagcgccctggtgtccatggagcagaaggagaacaccaaggagcaggccgtcatccccctgacagacagcgagtacaagctgctgcccctgcactttgctgtggaccccgggaagggctgggagtggggcaaggatgacagcgacaacgtgcggctggccagcgtcatcctgagcctggaggtgaagctgcacctgctgcacagctag

SEQ ID NO: 162906 - DNA, 2445 bp, synthetic construct
  misc_feature 1..2445: note = Description of Artificial Sequence: Synthetic coding sequence
  source 1..2445: mol_type = other DNA
atgaccctggacatggatgctgtgctgagtgactttgtgcgcagcactggagctgagcccggcctggcccgggacctgctggagggcaagaactgggatgtgaatgctgccctgagtgactttgagcagctgcggcaggtgcatgctggcaacctgcccccatccttcagcgagggcagcggcggcagcaggaccccagagaagggcttcagtgaccgggagcccacccggcccccccggcccatcctgcagaggcaggatgacatcgtgcaggagaagaggctgagccggggcatcagccacgccagcagcagcatcgtgtccctggcccggagccacgtgagcagcaatggaggcggcggcggcagcaatgagcaccccctggagatgcccatctgtgccttccagctgcctgacctgactgtgtacaatgaagacttccgctccttcatcgagcgggacctgattgagcagagcatgctggtggccctggagcaggccggccgcctgaactggtgggtgtctgtggaccccaccagccagaggctgctgcccctggccaccactggagatggcaactgcctgctgcacgccgccagcctgggcatgtggggcttccatgaccgggacctgatgctgaggaaggccctgtatgccctgatggagaagggcgtggagaaggaggccctgaagaggcgctggcgctggcagcagacccagcagaacaaggagagcggcctggtgtacacagaagatgagtggcagaaggagtggaatgaactcatcaagctggccagcagcgagcccaggatgcacctgggcaccaacggggccaactgtggcggcgtggagagcagcgaggagcctgtgtatgagagcctggaggagttccacgtgtttgtgctggcccacgtgctgcggcggcccatcgtggtggtggccgacaccatgctgcgggacagcggcggggaggcctttgcccccatcccctttggaggcatctacctgcccctggaggtgcctgccagccagtgccacaggagccccctggtgctggcctatgaccaggcccacttcagcgccctggtgtccatggagcagaaggagaacaccaaggagcaggccgtcatccccctgacagacagcgagtacaagctgctgcccctgcactttgctgtggaccccgggaagggctgggagtggggcaaggatgacagcgacaacgtgcggctggccagcgtcatcctgagcctggaggtgaagctgcacctgctgcacagctacatgaatgtgaagtggatccccctgagcagtgatgcccaggcccccctggcccagcctgagagccccacagccagcgctggagatgagcccaggagcaccccagagagcggggacagcgacaaggagagcgtgggcagcagcagcaccagcaatgaaggaggaagaaggaaggagaagagcaagagggaccgggagaaggacaagaagagagctgacagcgtggccaacaagctgggcagctttgggaagaccctgggcagcaagctgaagaagaacatgggcggcctgatgcacagcaagggcagcaagccaggcggcgtgggcaccggcctgggcggcagcagcggcacagagaccctggagaagaagaagaagaacagcctgaagtcctggaagggcggcaaggaggaggccgctggagatggccctgtgtctgagaagcccccagctgagagcgtgggcaatggaggcagcaagtacagccaggaggtgatgcagagcctgagcatcctgaggacagccatgcagggcgagggcaagttcatctttgtgggcaccctgaagatgggccaccgccaccagtaccaggaggagatgatccagcgctacctgagtgatgctgaggagcgcttcctggccgagcagaagcagaaggaggccgagaggaagatcatgaatggaggcattggaggcggccccccaccagccaagaagccagagccagatgcccgggaggagcagcccactggacctcctgctgagagccgggccatggccttcagcacaggctacccaggggacttcaccatcccccggcccagcggcggcggcgtgcactgccaggagccccggcggcagctggccggcggcccctgtgtgggcggcctgcccccctatgccaccttcccccggcagtgccccccaggccggccctacccccaccaggacagcatccccagcctggagcccggcagccacagcaaggatggcctgcacagaggagccctgctgcccccaccctacagagtggccgacagctacagcaatggctaccgggagcccccagagccagatggctgggccggcggcctgcggggcctgccccccacccagaccaagtgcaagcagccagatggagagctgctggtgcaccgcttctag

SEQ ID NO: 162907 - DNA, 927 bp, synthetic construct
  misc_feature 1..927: note = Description of Artificial Sequence: Synthetic coding sequence
  source 1..927: mol_type = other DNA
atgtgtggggtggagggctgctgccagggcggggccacccggcggggcagcctgcccggcggccggcagctggccaccaggaagaggtctgtggtgcggcgctgcctgaagatggctgctgaggagccccagcagcagaagcaggagcccctgggcagtgacagcgagggcgtgaactgcctggcctatgatgaggccatcatggcccagcaggaccgcatccagcaggagattgctgtgcagaaccccctggtgtctgagcggctggagctgtctgtgctgtacaaggagtatgcagaagatgacaacatctaccagcagaagatcaaggacctgcacaagaagtacagctacatcaggaagaccaggccagatggcaactgcttctaccgggccttcggcttcagccacctggaggccctgctggatgacagcaaggagctgcagcgcttcaaggctgtgtctgccaagagcaaggaggacctggtgtcccagggcttcacagagttcaccatcgaggacttccacaacaccttcatggacctgattgagcaggtggagaagcagacctctgtggccgacctgctggccagcttcaatgaccagagcaccagtgactacctggtggtgtacctgcggctgctgaccagcggctacctgcagcgggagagcaagttctttgagcacttcattgaaggaggccgcacagtgaaggagttctgccagcaggaggtggagcccatgtgcaaggagagtgaccacatccacatcatcgccctggcccaggccctgtctgtgtccatccaggtggagtacatggacagaggagagggcggcaccaccaacccccacatcttccctgagggcagcgagcccaaggtgtacctgctgtaccggcccggccactatgacatcctgtacaagtag

SEQ ID NO: 162908 - DNA, 816 bp, synthetic construct
  misc_feature 1..816: note = Description of Artificial Sequence: Synthetic coding sequence
  source 1..816: mol_type = other DNA
atggctgctgaggagccccagcagcagaagcaggagcccctgggcagtgacagcgagggcgtgaactgcctggcctatgatgaggccatcatggcccagcaggaccgcatccagcaggagattgctgtgcagaaccccctggtgtctgagcggctggagctgtctgtgctgtacaaggagtatgcagaagatgacaacatctaccagcagaagatcaaggacctgcacaagaagtacagctacatcaggaagaccaggccagatggcaactgcttctaccgggccttcggcttcagccacctggaggccctgctggatgacagcaaggagctgcagcgcttcaaggctgtgtctgccaagagcaaagaagacctggtgtcccagggcttcacagagttcaccatcgaggacttccacaacaccttcatggacctgattgagcaggtggagaagcagacctctgtggccgacctgctggccagcttcaatgaccagagcaccagtgactacctggtggtgtacctgcggctgctgaccagcggctacctgcagcgggagagcaagttctttgagcacttcatcgagggcggccgcacagtgaaggagttctgccagcaggaggtggagcccatgtgcaaggagagtgaccacatccacatcatcgccctggcccaggccctgtctgtgtccatccaggtggagtacatggacagaggagagggcggcaccaccaacccccacatcttccctgagggcagcgagcccaaggtgtacctgctgtacagacctggccactatgacatcctgtacaagtag

SEQ ID NO: 162909 - DNA, 816 bp, synthetic construct; identical to SEQ ID NO: 162908
  misc_feature 1..816: note = Description of Artificial Sequence: Synthetic coding sequence
  source 1..816: mol_type = other DNA

SEQ ID NO: 162910 - DNA, 843 bp, synthetic construct
  misc_feature 1..843: note = Description of Artificial Sequence: Synthetic coding sequence
  source 1..843: mol_type = other DNA
atggctgctgaggagccccagcagcagaagcaggagcccctgggcagtgacagcgagggcgtgaactgcctggcctatgatgaggccatcatggcccagcaggaccgcatccagcaggaggacatgacagacccctgcctgctgcagattgctgtgcagaaccccctggtgtctgagcggctggagctgtctgtgctgtacaaggagtatgcagaagatgacaacatctaccagcagaagatcaaggacctgcacaagaagtacagctacatcaggaagaccaggccagatggcaactgcttctaccgggccttcggcttcagccacctggaggccctgctggatgacagcaaggagctgcagcgcttcaaggctgtgtctgccaagagcaaggaggacctggtgtcccagggcttcacagagttcaccatcgaggacttccacaacaccttcatggacctgattgagcaggtggagaagcagacctctgtggccgacctgctggccagcttcaatgaccagagcaccagtgactacctggtggtgtacctgcggctgctgaccagcggctacctgcagcgggagagcaagttctttgagcacttcattgaaggaggccgcacagtgaaggagttctgccagcaggaggtggagcccatgtgcaaggagagtgaccacatccacatcatcgccctggcccaggccctgtctgtgtccatccaggtggagtacatggacagaggagagggcggcaccaccaacccccacatcttccctgagggcagcgagcccaaggtgtacctgctgtaccggcccggccactatgacatcctgtacaagtag

SEQ ID NO: 162911 - DNA, 705 bp, synthetic construct
  misc_feature 1..705: note = Description of Artificial Sequence: Synthetic coding sequence
  source 1..705: mol_type = other DNA
atgtctgagaccagcttcaacctgatcagcgagaagtgtgacatcctgagcatcctgcgggaccaccctgagaaccgcatctacagaaggaagattgaggagctgagcaagcgcttcaccgccatcaggaagaccaagggagatggcaactgcttctaccgggccctgggctacagctacctggagagcctgctgggcaagagccgggagatcttcaagttcaaggagcgggtgctgcagaccccaaatgacctgctggccgccggctttgaggagcacaagttcaggaacttcttcaatgccttctacagcgtggtggagctggtggagaaggatggctctgtgagcagcctgctgaaggtgttcaatgaccagagcgccagtgaccacatcgtgcagttcctgcggctgctgaccagcgccttcatccggaacagagctgacttcttccgccacttcattgatgaggagatggacatcaaggacttctgcacccatgaggtggagcccatggccacagaatgtgaccacatccagatcacagccctgagccaggccctgagcatcgccctgcaggtggagtatgtggatgagatggacacagccctgaaccaccacgtgtttcctgaggccgccaccccatctgtgtacctgctgtacaagaccagccactacaacatcctgtatgctgctgacaagcactag

SEQ ID NO: 162912 - DNA, 222 bp, synthetic construct
  misc_feature 1..222: note = Description of Artificial Sequence: Synthetic coding sequence
  source 1..222: mol_type = other DNA
atgtctgagaccagcttcaacctgatcagcgagaagtgtgacatcctgagcatcctgcgggaccaccctgagaaccgcatctacagaaggaagattgaggagctgagcaagcgcttcaccgccatcaggaagaccaagggagatggcaactgcttctaccgggccctgggctacagctacctggagagcctgctgggcaagagccgggagatcttcaagtag

SEQ ID NO: 162913 - DNA, 753 bp, synthetic construct
  misc_feature 1..753: note = Description of Artificial Sequence: Synthetic coding sequence
  source 1..753: mol_type = other DNA
atggccgccctgagctgcctgctggacagcgtgcggcgggacatcaagaaggtggaccgggagctgcggcagctgcgctgcattgatgagttcagcacccgctgcctgtgtgacctgtacatgcacccctactgctgctgtgacctgcacccctacccctactgcctgtgctacagcaagaggagccgcagctgtggcctgtgtgacctgtacccctgctgcctgtgtgactacaagctgtactgcctgcggcccagcctgcggagcctggagaggaaggccatccgggccattgaagatgagaagcgggagctggccaagctgcggaggaccaccaaccgcatcctggccagcagctgctgcagcagcaacatcctgggctctgtgaatgtgtgtggctttgagccagaccaggtgaaggtgcgggtgaaggatggcaaggtgtgtgtgtctgctgagagagaaaatagatatgactgcctgggcagcaagaagtacagctacatgaacatctgcaaggagttcagcctgcccccctgtgtggatgagaaggatgtgacctacagctatggcctgggcagctgtgtgaagattgagagcccctgctacccctgcaccagcccctgcagcccctgcagcccctgcagcccctgcaacccctgcagcccctgcaacccctgcagcccctatgacccctgcaacccctgctacccctgtggcagccgcttcagctgcaggaagatgatcctgtag

SEQ ID NO: 162914 - DNA, 2418 bp, synthetic construct
  misc_feature 1..2418: note = Description of Artificial Sequence: Synthetic coding sequence
  source 1..2418: mol_type = other DNA
atgaaggacaggagcagcaccccacccctgcacgtgcacgtggatgagaacacccctgtgcacgtgcacatcaagaagctgcccaagcccagcgccaccagcagccagaagagccacaagaggggcatgaagggggacacagtgaatgtgagaagatctgtgcgggtgaagaccaagaaccccccccactgcctggagatcaccccacccagcagcgagaagctggtgtctgtgatgaggctgagtgacctgagcacagaagatgatgattctggccactgcaagatgaacagatatgacaagaagattgacagcctgatgaatgctgtgggctgcctgaagtctgaggtgaagatgcagaagggggagcggcagatggccaagcgcttcctggaggagaggaaggaggagctggaggaggtggcccacgagctggccgagacagaacatgaaaatacagtgctgcggcacaacattgaaagaatgaaggaggagaaggacttcaccatcctgcagaagaagcacctgcagcaggagaaggaatgtctgatgagcaagctggtggaggccgagatggatggagctgctgctgccaagcaggtgatggccctgaaggacaccatcggcaagctgaagacagagaagcagatgacctgcacagacatcaacaccctgacccggcagaaggagctgctgctgcagaagctgagcacctttgaggagaccaacagaaccctgcgggacctgctgcgggagcagcactgcaaggaggacagcgagcggctgatggagcagcagggcgccctgctgaagaggctggccgaggccgacagcgagaaggcccggctgctgctgctgctgcaggacaaggacaaggaggtggaggagctgctgcaggagatccagtgtgagaaggcccaggccaagacagccagcgagctgagcaagtccatggagagcatgaggggccacctgcaggcccagctgcggagcaaggaggccgagaacagccggctgtgcatgcagatcaagaacctggagaggagcggcaaccagcacaaggccgaggtggaggccatcatggagcagctgaaggagctgaagcagaagggggaccgggacaaggagagcctgaagaaggccatccgggcccagaaggagagagctgagaagtctgaggagtatgcagagcagctgcacgtgcagctggccgacaaggacctgtatgtggccgaggccctgagcaccctggagagctggaggagccgctacaaccaggtggtgaaggagaagggggacctggagctggagatcatcgtgctgaatgacagagtgacagacctggtgaaccagcagcagaccctggaggagaagatgagagaagatcgggacagcctggtggagcggctgcaccggcagacagctgagtacagcgccttcaagctggagaatgaaaggctgaaggccagctttgcccccatggaggacaagctgaaccaggcccacctggaggtgcagcagctgaaggcctctgtgaagaactatgagggcatgattgacaactacaagagccaggtgatgaagacccggctggaggctgatgaggtggccgcccagctggagcgctgtgacaaggagaacaagatcctgaaggatgagatgaacaaggagattgaggccgcccggcggcagttccagagccagctggccgacctgcagcagctgcctgacatcctgaagatcacagaggccaagctggccgagtgccaggaccagctgcagggctatgaaaggaagaacatcgacctgacagccatcatcagtgacctgcggagccgcatcgagcaccagggcgacaagctggagatggcccgggagaagcaccaggccagccagaaggagaacaagcagctgagcctgaaggtggatgagctggagaggaagctggaggccaccagcgcccagaacatcgagttcctgcaggtgattgccaagcgggaggaggccatccaccagagccagctgcggctggaggagaagaccagagaatgtggcaccctggcccggcagctggagagcgccattgaagatgcccggcggcaggtggagcagaccaaggagcacgccctgagcaaggagagagctgcccagaacaagatcctggacctggagacccagctgagcaggaccaagacagagctgagccagctgcggcgcagcagagatgatgctgaccggcgctaccagagccggctgcaggacctgaaggaccggctggagcagagcgagagcaccaacagatccatgcagaactacgtgcagttcctgaagagcagctatgccaacgtgtttggagatggcccctacagcaccttcctgaccagcagccccatccgcagccgcagccccccagcctag

SEQ ID NO: 162915 - DNA, 2475 bp, synthetic construct
  misc_feature 1..2475: note = Description of Artificial Sequence: Synthetic coding sequence
  source 1..2475: mol_type = other DNA
atgaaggacaggagcagcaccccacccctgcacgtgcacgtggatgagaacacccctgtgcacgtgcacatcaagaagctgcccaagcccagcgccaccagcagccagaagagccacaagaggggcatgaagggggacacagtgaatgtgagaagatctgtgcgggtgaagaccaaggtgccctggatgcctcctgggaagagcagcgcccggcctgtgggctgcaagtgggagaaccccccccactgcctggagatcaccccacccagcagcgagaagctggtgtctgtgatgaggctgagtgacctgagcacagaagatgatgacagcggccactgcaagatgaacagatatgacaagaagattgacagcctgatgaatgctgtgggctgcctgaagtctgaggtgaagatgcagaagggggagcggcagatggccaagcgcttcctggaggagaggaaggaggagctggaggaggtggcccacgagctggccgagacagaacatgagaacacagtgctgcggcacaacatcgagaggatgaaggaggagaaggacttcaccatcctgcagaagaagcacctgcagcaggagaaggagtgcctgatgagcaagctggtggaggccgagatggatggagctgctgctgccaagcaggtgatggccctgaaggacaccatcggcaagctgaagacagagaagcagatgacctgcacagacatcaacaccctgacccggcagaaggagctgctgctgcagaagctgagcacctttgaggagaccaacagaaccctgcgggacctgctgcgggagcagcactgcaaggaggacagcgagcggctgatggagcagcagggcgccctgctgaagaggctggccgaggccgacagcgagaaggcccggctgctgctgctgctgcaggacaaggacaaggaggtggaggagctgctgcaggagatccagtgtgagaaggcccaggccaagacagccagcgagctgagcaagtccatggagagcatgaggggccacctgcaggcccagctgcggagcaaggaggccgagaacagccggctgtgcatgcagatcaagaacctggagaggagcggcaaccagcacaaggccgaggtggaggccatcatggagcagctgaaggagctgaagcagaagggggaccgggacaaggagagcctgaagaaggccatccgggcccagaaggagcgggcagagaagtctgaggagtatgcagagcagctgcacgtgcagctggccgacaaggacctgtatgtggccgaggccctgagcaccctggagagctggaggagccgctacaaccaggtggtgaaggagaagggggacctggagctggagatcatcgtgctgaatgacagagtgacagacctggtgaaccagcagcagaccctggaggagaagatgagggaggaccgggacagcctggtggagcggctgcaccggcagacagctgagtacagcgccttcaagctggagaatgaaaggctgaaggccagctttgcccccatggaggacaagctgaaccaggcccacctggaggtgcagcagctgaaggcctctgtgaagaactatgagggcatgattgacaactacaagagccaggtgatgaagacccggctggaggctgatgaggtggccgcccagctggagcgctgtgacaaggagaacaagatcctgaaggatgagatgaacaaggagattgaagctgcccggcggcagttccagagccagctggccgacctgcagcagctgcctgacatcctgaagatcacagaggccaagctggccgagtgccaggaccagctgcagggctatgaaaggaagaacatcgacctgacagccatcatcagtgacctgcggagcagaattgagcaccagggcgacaagctggagatggcccgggagaagcaccaggccagccagaaggagaacaagcagctgagcctgaaggtggatgagctggagaggaagctggaggccaccagcgcccagaacatcgagttcctgcaggtgattgccaagcgggaggaggccatccaccagagccagctgcggctggaggagaagacccgggagtgtggcaccctggcccggcagctggagagcgccattgaagatgcccggcggcaggtggagcagaccaaggagcacgccctgagcaaggagcgggccgcccagaacaagatcctggacctggagacccagctgagcaggaccaagacagagctgagccagctgcggcgcagcagagatgatgctgaccggcgctaccagagccggctgcaggacctgaaggaccggctggagcagagcgagagcaccaacagatccatgcagaactacgtgcagttcctgaagagcagctatgccaacgtgtttggagatggcccctacagcaccttcctgaccagcagccccatccgcagccgcagccccccagcctag

SEQ ID NO: 162916 - DNA, 1917 bp, synthetic construct
  misc_feature 1..1917: note = Description of Artificial Sequence: Synthetic coding sequence
  source 1..1917: mol_type = other DNA
atgtctgccagcagcagcggcggcagcccccgcttccccagctgtgggaagaatggagtgaccagcctgacccagaagaaggtgctgcgggccccctgtggggcccccagcgtgacagtgaccaagagccacaagaggggcatgaagggggacacagtgaatgtgcggcgctctgtgcgggtgaagaccaagaaccccccccactgcctggagatcaccccacccagcagcgagaagctggtgtctgtgatgaggctgagtgacctgagcacagaagatgatgacagcggccactgcaagatgaacagatatgacaagaagattgacagcctgatgaatgctgtgggctgcctgaagtctgaggtgaagatgcagaagggggagcggcagatggccaagcgcttcctggaggagaggaaggaggagctggaggaggtggcccacgagctggccgagacagaacatgagaacacagtgctgcggcacaacatcgagaggatgaaggaggagaaggacttcaccatcctgcagaagaagcacctgcagcaggagaaggagtgcctgatgagcaagctggtggaggccgagatggatggagctgctgctgccaagcaggtgatggccctgaaggacaccatcggcaagctgaagacagagaagcagatgacctgcacagacatcaacaccctgacccggcagaaggagctgctgctgcagaagctgagcacctttgaggagaccaacagaaccctgcgggacctgctgcgggagcagcactgcaaggaggacagcgagcggctgatggagcagcagggcgccctgctgaagaggctggccgaggccgacagcgagaaggcccggctgctgctgctgctgcaggacaaggacaaggaggtggaggagctgctgcaggagatccagtgtgagaaggcccaggccaagacagccagcgagctgagcaagtccatggagagcatgaggggccacctgcaggcccagctgcggagcaaggaggccgagaacagccggctgtgcatgcagatcaagaacctggagaggagcggcaaccagcacaaggccgaggtggaggccatcatggagcagctgaaggagctgaagcagaagggggaccgggacaaggagagcctgaagaaggccatccgggcccagaaggagcgggcagagaagtctgaggagtatgcagagcagctgcacgtgcagctggccgacaaggacctgtatgtggccgaggccctgagcaccctggagagctggaggagccgctacaaccaggtggtgaaggagaagggggacctggagctggagatcatcgtgctgaatgacagagtgacagacctggtgaaccagcagcagaccctggaggagaagatgagggaggaccgggacagcctggtggagcggctgcaccggcagacagctgagtacagcgccttcaagctggagaatgaaaggctgaaggccagctttgcccccatggaggacaagctgaaccaggcccacctggaggtgcagcagctgaaggcctctgtgaagaactatgagggcatgattgacaactacaagagccaggtgatgaagacccggctggaggctgatgaggtggccgcccagctggagcgctgtgacaaggagaacaagatcctgaaggatgagatgaacaaggagattgaagctgcccggcggcagttccagagccagctggccgacctgcagcagctgcctgacatcctgaagatcacagaggccaagctggccgagtgccaggaccagctgcagggctatgaaaggaagaacatcgacctgacagccatcatcagtgacctgcggagccgggtgcgggactggcagaagggcagccatgagctgacccgggccggggcccgcatccccaggtag

SEQ ID NO: 162917 - DNA, 2490 bp, synthetic construct
  misc_feature 1..2490: note = Description of Artificial Sequence: Synthetic coding sequence
  source 1..2490: mol_type = other DNA
atgtctgccagcagcagcggcggcagcccccgcttccccagctgtgggaagaatggagtgaccagcctgacccagaagaaggtgctgcgggccccctgtggggcccccagcgtgacagtgaccaagagccacaagaggggcatgaagggggacacagtgaatgtgcggcgctctgtgcgggtgaagaccaaggtgccctggatgcctcctgggaagagcagcgcccggcctgtgggctgcaagtgggagaaccccccccactgcctggagatcaccccacccagcagcgagaagctggtgtctgtgatgaggctgagtgacctgagcacagaagatgatgattctggccactgcaagatgaacagatatgacaagaagattgacagcctgatgaatgctgtgggctgcctgaagtctgaggtgaagatgcagaagggggagcggcagatggccaagcgcttcctggaggagaggaaggaggagctggaggaggtggcccacgagctggccgagacagaacatgaaaatacagtgctgcggcacaacattgaaagaatgaaggaggagaaggacttcaccatcctgcagaagaagcacctgcagcaggagaaggaatgtctgatgagcaagctggtggaggccgagatggatggagctgctgctgccaagcaggtgatggccctgaaggacaccatcggcaagctgaagacagagaagcagatgacctgcacagacatcaacaccctgacccggcagaaggagctgctgctgcagaagctgagcacctttgaggagaccaacagaaccctgcgggacctgctgcgggagcagcactgcaaggaggacagcgagcggctgatggagcagcagggcgccctgctgaagaggctggccgaggccgacagcgagaaggcccggctgctgctgctgctgcaggacaaggacaaggaggtggaggagctgctgcaggagatccagtgtgagaaggcccaggccaagacagccagcgagctgagcaagtccatggagagcatgaggggccacctgcaggcccagctgcggagcaaggaggccgagaacagccggctgtgcatgcagatcaagaacctggagaggagcggcaaccagcacaaggccgaggtggaggccatcatggagcagctgaaggagctgaagcagaagggggaccgggacaaggagagcctgaagaaggccatccgggcccagaaggagagagctgagaagtctgaggagtatgcagagcagctgcacgtgcagctggccgacaaggacctgtatgtggccgaggccctgagcaccctggagagctggaggagccgctacaaccaggtggtgaaggagaagggggacctggagctggagatcatcgtgctgaatgacagagtgacagacctggtgaaccagcagcagaccctggaggagaagatgagagaagatcgggacagcctggtggagcggctgcaccggcagacagctgagtacagcgccttcaagctggagaatgaaaggctgaaggccagctttgcccccatggaggacaagctgaaccaggcccacctggaggtgcagcagctgaaggcctctgtgaagaactatgagggcatgattgacaactacaagagccaggtgatgaagacccggctggaggctgatgaggtggccgcccagctggagcgctgtgacaaggagaacaagatcctgaaggatgagatgaacaaggagattgaggccgcccggcggcagttccagagccagctggccgacctgcagcagctgcctgacatcctgaagatcacagaggccaagctggccgagtgccaggaccagctgcagggctatgaaaggaagaacatcgacctgacagccatcatcagtgacctgcggagccgcatcgagcaccagggcgacaagctggagatggcccgggagaagcaccaggccagccagaaggagaacaagcagctgagcctgaaggtggatgagctggagaggaagctggaggccaccagcgcccagaacatcgagttcctgcaggtgattgccaagcgggaggaggccatccaccagagccagctgcggctggaggagaagaccagagaatgtggcaccctggcccggcagctggagagcgccattgaagatgcccggcggcaggtggagcagaccaaggagcacgccctgagcaaggagagagctgcccagaacaagatcctggacctggagacccagctgagcaggaccaagacagagctgagccagctgcggcgcagcagagatgatgctgaccggcgctaccagagccggctgcaggacctgaaggaccggctggagcagagcgagagcaccaacagatccatgcagaactacgtgcagttcctgaagagcagctatgccaacgtgtttggagatggcccctacagcaccttcctgaccagcagccccatccgcagccgcagccccccagcctag

SEQ ID NO: 162918 - DNA, 2106 bp, synthetic construct
  misc_feature 1..2106: note = Description of Artificial Sequence: Synthetic coding sequence
  source 1..2106: mol_type = other DNA
atgggagagctgcccaccggctgcaggaagagaagaaggaagaggggcggcgctgctgcccgggcccggctgcaccccccccggcggctgcacggcaccaccctggccagtgacttcaatgacttcatcagaagacgcttctgggcccagccctgccgctcctggttccccagctgtgggaagaatggagtgaccagcctgacccagaagaaggtgctgcgggccccctgtggggcccccagcgtgacagtgaccaagagccacaagaggggcatgaagggggacacagtgaatgtgcggcgctctgtgcgggtgaagaccaaggtgccctggatgcctcctgggaagagcagcgcccggcctgtgggctgcaagtgggagaaccccccccactgcctggagatcaccccacccagcagcgagaagctggtgtctgtgatgaggctgagtgacctgagcacagaagatgatgattctggccactgcaagatgaacagatatgacaagaagattgacagcctgatgaatgctgtgggctgcctgaagtctgaggtgaagatgcagaagggggagcggcagatggccaagcgcttcctggaggagaggaaggaggagctggaggaggtggcccacgagctggccgagacagaacatgaaaatacagtgctgcggcacaacattgaaagaatgaaggaggagaaggacttcaccatcctgcagaagaagcacctgcagcaggagaaggaatgtctgatgagcaagctggtggaggccgagatggatggagctgctgctgccaagcaggtgatggccctgaaggacaccatcggcaagctgaagacagagaagcagatgacctgcacagacatcaacaccctgacccggcagaaggagctgctgctgcagaagctgagcacctttgaggagaccaacagaaccctgcgggacctgctgcgggagcagcactgcaaggaggacagcgagcggctgatggagcagcagggcgccctgctgaagaggctggccgaggccgacagcgagaaggcccggctgctgctgctgctgcaggacaaggacaaggaggtggaggagctgctgcaggagatccagtgtgagaaggcccaggccaagacagccagcgagctgagcaagtccatggagagcatgaggggccacctgcaggcccagctgcggagcaaggaggccgagaacagccggctgtgcatgcagatcaagaacctggagaggagcggcaaccagcacaaggccgaggtggaggccatcatggagcagctgaaggagctgaagcagaagggggaccgggacaaggagagcctgaagaaggccatccgggcccagaaggagagagctgagaagtctgaggagtatgcagagcagctgcacgtgcagctggccgacaaggacctgtatgtggccgaggccctgagcaccctggagagctggaggagccgctacaaccaggtggtgaaggagaagggggacctggagctggagatcatcgtgctgaatgacagagtgacagacctggtgaaccagcagcagaccctggaggagaagatgagagaagatcgggacagcctggtggagcggctgcaccggcagacagctgagtacagcgccttcaagctggagaatgaaaggctgaaggccagctttgcccccatggaggacaagctgaaccaggcccacctggaggtgcagcagctgaaggcctctgtgaagaactatgagggcatgattgacaactacaagagccaggtgatgaagacccggctggaggctgatgaggtggccgcccagctggagcgctgtgacaaggagaacaagatcctgaaggatgagatgaacaaggagattgaggccgcccggcggcagttccagagccagctggccgacctgcagcagctgcctgacatcctgaagatcacagaggccaagctggccgagtgccaggaccagctgcagggctatgaaaggaagaacatcgacctgacagccatcatcagtgacctgcggagccgggtgcgggactggcagaagggcagccatgagctgaccagggctggggcccgcatccccaggtag

SEQ ID NO: 162919 - DNA, 1974 bp, synthetic construct
  misc_feature 1..1974: note = Description of Artificial Sequence: Synthetic coding sequence
  source 1..1974: mol_type = other DNA
atggctgaccagcagggcccccaccagaaccgcttccccagctgtgggaagaatggagtgaccagcctgacccagaagaaggtgctgcgggccccctgtggggcccccagcgtgacagtgaccaagagccacaagaggggcatgaagggggacacagtgaatgtgcggcgctctgtgcgggtgaagaccaaggtgccctggatgcctcctgggaagagcagcgcccggcctgtgggctgcaagtgggagaaccccccccactgcctggagatcaccccacccagcagcgagaagctggtgtctgtgatgaggctgagtgacctgagcacagaagatgatgattctggccactgcaagatgaacagatatgacaagaagattgacagcctgatgaatgctgtgggctgcctgaagtctgaggtgaagatgcagaagggggagcggcagatggccaagcgcttcctggaggagaggaaggaggagctggaggaggtggcccacgagctggccgagacagaacatgaaaatacagtgctgcggcacaacattgaaagaatgaaggaggagaaggacttcaccatcctgcagaagaagcacctgcagcaggagaaggaatgtctgatgagcaagctggtggaggccgagatggatggagctgctgctgccaagcaggtgatggccctgaaggacaccatcggcaagctgaagacagagaagcagatgacctgcacagacatcaacaccctgacccggcagaaggagctgctgctgcagaagctgagcacctttgaggagaccaacagaaccctgcgggacctgctgcgggagcagcactgcaaggaggacagcgagcggctgatggagcagcagggcgccctgctgaagaggctggccgaggccgacagcgagaaggcccggctgctgctgctgctgcaggacaaggacaaggaggtggaggagctgctgcaggagatccagtgtgagaaggcccaggccaagacagccagcgagctgagcaagtccatggagagcatgaggggccacctgcaggcccagctgcggagcaaggaggccgagaacagccggctgtgcatgcagatcaagaacctggagaggagcggcaaccagcacaaggccgaggtggaggccatcatggagcagctgaaggagctgaagcagaagggggaccgggacaaggagagcctgaagaaggccatccgggcccagaaggagagagctgagaagtctgaggagtatgcagagcagctgcacgtgcagctggccgacaaggacctgtatgtggccgaggccctgagcaccctggagagctggaggagccgctacaaccaggtggtgaaggagaagggggacctggagctggagatcatcgtgctgaatgacagagtgacagacctggtgaaccagcagcagaccctggaggagaagatgagagaagatcgggacagcctggtggagcggctgcaccggcagacagctgagtacagcgccttcaagctggagaatgaaaggctgaaggccagctttgcccccatggaggacaagctgaaccaggcccacctggaggtgcagcagctgaaggcctctgtgaagaactatgagggcatgattgacaactacaagagccaggtgatgaagacccggctggaggctgatgaggtggccgcccagctggagcgctgtgacaaggagaacaagatcctgaaggatgagatgaacaaggagattgaggccgcccggcggcagttccagagccagctggccgacctgcagcagctgcctgacatcctgaagatcacagaggccaagctggccgagtgccaggaccagctgcagggctatgaaaggaagaacatcgacctgacagccatcatcagtgacctgcggagccgggtgcgggactggcagaagggcagccatgagctgaccagggctggggcccgcatccccaggtag

SEQ ID NO: 162920 - DNA, 570 bp, synthetic construct
  misc_feature 1..570: note = Description of Artificial Sequence: Synthetic coding sequence
  source 1..570: mol_type = other DNA
atgaaggacaggagcagcaccccacccctgcacgtgcacgtggatgagaacacccctgtgcacgtgcacatcaagaagctgcccaagcccagcgccaccagcagccagaagagccacaagaggggcatgaagggggacacagtgaatgtgagaagatctgtgcgggtgaagaccaaggtgaagatgcagaagggggagcggcagatggccaagcgcttcctggaggagaggaaggaggagctggaggaggtggcccacgagctggccgagacagaacatgagaacacagtgctgcggcacaacatcgagaggatgaaggaggagaaggacttcaccatcctgcagaagaagcacctgcagcaggagaaggagtgcctgatgagcaagctggtggaggccgagatggatggagctgctgctgccaagcaggtgatggccctgaaggacaccatcggcaagctgaagacagagaagcagatgacctgcacagacatcaacaccctgacccggcagaaggagctgctgctgcagaagctgagcacctttgaggagaccaacagaaccctgtag

SEQ ID NO: 162921 - DNA, 618 bp, synthetic construct
  misc_feature 1..618: note = Description of Artificial Sequence: Synthetic coding sequence
  source 1..618: mol_type = other DNA
atgtctgccagcagcagcggcggcagcccccgcttccccagctgtgggaagaatggagtgaccagcctgacccagaagaaggtgctgcgggccccctgtggggcccccagcgtgacagtgaccaagagccacaagaggggcatgaagggggacacagtgaatgtgcggcgctctgtgcgggtgaagaccaaggtgaagatgcagaagggggagcggcagatggccaagcgcttcctggaggagaggaaggaggagctggaggaggtggcccacgagctggccgagacagaacatgaaaatacagtgctgcggcacaacattgaaagaatgaaggaggagaaggacttcaccatcctgcagaagaagcacctgcagcaggagaaggaatgtctgatgagcaagctggtggaggccgagatggatggagctgctgctgccaagcaggtgatggccctgaaggacaccatcggcaagctgaagacagagaagcagatgacctgcacagacatcaacaccctgacccggcagaaggagctgctgctgcagaagctgagcacctttgaggagaccaacagaaccctgcgggacctgctgcgggagcagcactgcaaggagtag

SEQ ID NO: 162922 - DNA, 543 bp, synthetic construct
  misc_feature 1..543: note = Description of Artificial Sequence: Synthetic coding sequence
  source 1..543: mol_type = other DNA
atgtctgccagcagcagcggcggcagcccccgcttccccagctgtgggaagaatggagtgaccagcctgacccagaagaaggtgctgcgggccccctgtggggcccccagcgtgacagtgaccaagagccacaagaggggcatgaagggggacacagtgaatgtgcggcgctctgtgcgggtgaagaccaaggtgccctggatgcctcctgggaagagcagcgcccggcctgtgggctgcaagtgggagaaccccccccactgcctggagatcaccccacccagcagcgagaagctggtgtctgtgatgaggctgagtgacctgagcacagaagatgatgattctggccactgcaagatgaacagatatgacaagaagattgacagcctgatgaatgctgtgggctgcctgaagtctgaggtgaagatgcagaagggggagcggcagatggccaagcgcttcctggaggagaggaaggaggagctggaggaggtggcccacgagctggccgagacagaacatgaaaatacagtgctgaggtag

SEQ ID NO: 162923 - DNA, 648 bp, synthetic construct
  misc_feature 1..648: note = Description of Artificial Sequence: Synthetic coding sequence
  source 1..648: mol_type = other DNA
atgaaggacaggagcagcaccccacccctgcacgtgcacgtggatgagaacacccctgtgcacgtgcacatcaagaagctgcccaagcccagcgccaccagcagccagaagagccacaagaggggcatgaagggggacacagtgaatgtgagaagatctgtgcgggtgaagaccaagaaccccccccactgcctggagatcaccccacccagcagcgagaagctggtgtctgtgatgaggctgagtgacctgagcacagaagatgatgattctggccactgcaagatgaacagatatgacaagaagattgacagcctgatgaatgctgtgggctgcctgaagtctgaggtgaagatgcagaagggggagcggcagatggccaagcgcttcctggaggagaggaaggaggagctggaggaggtggcccacgagctggccgagacagaacatgaaaatacagtgctgcggcacaacattgaaagaatgaaggaggagaaggacttcaccatcctgcagaagaagcacctgcagcaggagaaggaatgtctgatgagcaagctggtggaggccgagatggatggagctgctgctgccaagcaggtgatggccctgaaggacaccatcggcaagctgaagacagtgggctag

SEQ ID NO: 162924 - DNA, 471 bp, synthetic construct
  misc_feature 1..471: note = Description of Artificial Sequence: Synthetic coding sequence
  source 1..471: mol_type = other DNA
atgtctgccagcagcagcggcggcagcccccgcttccccagctgtgggaagaatggagtgaccagcctgacccagaagaaggtgctgcgggccccctgtggggcccccagcgtgacagtgaccaagagccacaagaggggcatgaagggggacacagtgaatgtgcggcgctctgtgcgggtgaagaccaagaaccccccccactgcctggagatcaccccacccagcagcgagaagctggtgtctgtgatgaggctgagtgacctgagcacagaagatgatgacagcggccactgcaagatgaacagatatgacaagaagattgacagcctgatgaatgctgtgggctgcctgaagtctgaggtgaagatgcagaagggggagcggcagatggccaagcgcttcctggaggagaggaaggaggagctggaggaggtggcccacgagctggccgagacagaacatgaatag

SEQ ID NO: 162925 - DNA, 1731 bp, synthetic construct
  misc_feature 1..1731: note = Description of Artificial Sequence: Synthetic coding sequence
  source 1..1731: mol_type = other DNA
atgaaggacaggagcagcaccccacccctgcacgtgcacgtggatgagaacacccctgtgcacgtgcacatcaagaagctgcccaagcccagcgccaccagcagccagaagagccacaagaggggcatgaagggggacacagtgaatgtgagaagatctgtgcgggtgaagaccaaggtgaagatgcagaagggggagcggcagatggccaagcgcttcctggaggagaggaaggaggagctggaggaggtggcccacgagctggccgagacagaacatgagaacacagtgctgcggcacaacatcgagaggatgaaggaggagaaggacttcaccatcctgcagaagaagcacctgcagcaggagaaggagtgcctgatgagcaagctggtggaggccgagatggatggagctgctgctgccaagcaggtgatggccctgaaggacaccatcggcaagctgaagacagagaagcagatgacctgcacagacatcaacaccctgacccggcagaaggagctgctgctgcagaagctgagcacctttgaggagaccaacagaaccctgcgggacctgctgcgggagcagcactgcaaggaggacagcgagcggctgatggagcagcagggcgccctgctgaagaggctggccgaggccgacagcgagaaggcccggctgctgctgctgctgcaggacaaggacaaggaggtggaggagctgctgcaggagatccagtgtgagaaggcccaggccaagacagccagcgagctgagcaagtccatggagagcatgaggggccacctgcaggcccagctgcggagcaaggaggccgagaacagccggctgtgcatgcagatcaagaacctggagaggagcggcaaccagcacaaggccgaggtggaggccatcatggagcagctgaaggagctgaagcagaagggggaccgggacaaggagagcctgaagaaggccatccgggcccagaaggagcgggcagagaagtctgaggagtatgcagagcagctgcacgtgcagctggccgacaaggacctgtatgtggccgaggccctgagcaccctggagagctggaggagccgctacaaccaggtggtgaaggagaagggggacctggagctggagatcatcgtgctgaatgacagagtgacagacctggtgaaccagcagcagaccctggaggagaagatgagggaggaccgggacagcctggtggagcggctgcaccggcagacagctgagtacagcgccttcaagctggagaatgaaaggctgaaggccagctttgcccccatggaggacaagctgaaccaggcccacctggaggtgcagcagctgaaggcctctgtgaagaactatgagggcatgattgacaactacaagagccaggtgatgaagacccggctggaggctgatgaggtggccgcccagctggagcgctgtgacaaggagaacaagatcctgaaggatgagatgaacaaggagattgaagctgcccggcggcagttccagagccagctggccgacctgcagcagctgcctgacatcctgaagatcacagaggccaagctggccgagtgccaggaccagctgcagggctatgaaaggaagaacatcgacctgacagccatcatcagtgacctgcggagccgggtgcgggactggcagaagggcagccatgagctgacccgggccggggcccgcatccccaggtag

SEQ ID NO: 162926 - DNA, 444 bp, synthetic construct
  misc_feature 1..444: note = Description of Artificial Sequence: Synthetic coding sequence
  source 1..444: mol_type = other DNA
atgaaggacaggagcagcaccccacccctgcacgtgcacgtggatgagaacacccctgtgcacgtgcacatcaagaagctgcccaagcccagcgccaccagcagccagaagagccacaagaggggcatgaagggggacacagtgaatgtgagaagatctgtgcgggtgaagaccaaggtgccctggatgcctcctgggaagagcagcgcccggcctgtgggctgcaagtgggagaccagcgaggagacccccaccaccggggagggcgtgccccacgtgcaggccggcggcggcggcaatggctggggctgcggctgccaggccggccacggcctggagggctaccaccgggaggccgagaaccgggagaccaatgacctgcacggccaccagcacccagacaaggccgagggcaccagccctgctgaggccgagcacatctag

SEQ ID NO: 162927 - DNA, 1917 bp, synthetic construct
  misc_feature 1..1917: note = Description of Artificial Sequence: Synthetic coding sequence
  source 1..1917: mol_type = other DNA
atgggcaggaaccgctaccccccagcctgctggttccccagctgtgggaagaatggagtgaccagcctgacccagaagaaggtgctgcgggccccctgtggggcccccagcgtgacagtgaccaagagccacaagaggggcatgaagggggacacagtgaatgtgcggcgctctgtgcgggtgaagaccaagaaccccccccactgcctggagatcaccccacccagcagcgagaagctggtgtctgtgatgaggctgagtgacctgagcacagaagatgatgacagcggccactgcaagatgaacagatatgacaagaagattgacagcctgatgaatgctgtgggctgcctgaagtctgaggtgaagatgcagaagggggagcggcagatggccaagcgcttcctggaggagaggaaggaggagctggaggaggtggcccacgagctggccgagacagaacatgagaacacagtgctgcggcacaacatcgagaggatgaaggaggagaaggacttcaccatcctgcagaagaagcacctgcagcaggagaaggagtgcctgatgagcaagctggtggaggccgagatggatggagctgctgctgccaagcaggtgatggccctgaaggacaccatcggcaagctgaagacagagaagcagatgacctgcacagacatcaacaccctgacccggcagaaggagctgctgctgcagaagctgagcacctttgaggagaccaacagaaccctgcgggacctgctgcgggagcagcactgcaaggaggacagcgagcggctgatggagcagcagggcgccctgctgaagaggctggccgaggccgacagcgagaaggcccggctgctgctgctgctgcaggacaaggacaaggaggtggaggagctgctgcaggagatccagtgtgagaaggcccaggccaagacagccagcgagctgagcaagtccatggagagcatgaggggccacctgcaggcccagctgcggagcaaggaggccgagaacagccggctgtgcatgcagatcaagaacctggagaggagcggcaaccagcacaaggccgaggtggaggccatcatggagcagctgaaggagctgaagcagaagggggaccgggacaaggagagcctgaagaaggccatccgggcccagaaggagcgggcagagaagtctgaggagtatgcagagcagctgcacgtgcagctggccgacaaggacctgtatgtggccgaggccctgagcaccctggagagctggaggagccgctacaaccaggtggtgaaggagaagggggacctggagctggagatcatcgtgctgaatgacagagtgacagacctggtgaaccagcagcagaccctggaggagaagatgagggaggaccgggacagcctggtggagcggctgcaccggcagacagctgagtacagcgccttcaagctggagaatgaaaggctgaaggccagctttgcccccatggaggacaagctgaaccaggcccacctggaggtgcagcagctgaaggcctctgtgaagaactatgagggcatgattgacaactacaagagccaggtgatgaagacccggctggaggctgatgaggtggccgcccagctggagcgctgtgacaaggagaacaagatcctgaaggatgagatgaacaaggagattgaagctgcccggcggcagttccagagccagctggccgacctgcagcagctgcctgacatcctgaagatcacagaggccaagctggccgagtgccaggaccagctgcagggctatgaaaggaagaacatcgacctgacagccatcatcagtgacctgcggagccgggtgcgggactggcagaagggcagccatgagctgacccgggccggggcccgcatccccaggtag

SEQ ID NO: 162928 - DNA, 765 bp, synthetic construct
  misc_feature 1..765: note = Description of Artificial Sequence: Synthetic coding sequence
  source 1..765: mol_type = other DNA
atgacagaggaggtgtggatgggcacctggaggccccaccggccccggggccccatcatggccctgtacagcagccctggccccaagtacctgatcccccccaccaccggcttcatgaagcacacccccaccaagctgcgggccccagcctacagcttccggggggcccccatgctgctggccgagaactgcagccctggcccccgctacaacgtgaaccccaagatcctgaggacaggcaaggacctgggccctgcctacagcatcctgggccgctaccagaccaagaccatgctgaccccaggccctggggactacttccctgagaagagcaccaagtatgtgtttgacagcgcccccagccacagcatcagcgcccggaccaaggccttccgggtggacagcaccccaggccctgctgcctacatgctgcccatggtgatgggccccaacacagtgggcaaggccagccagcccagcttcagcatcaagggccgcagcaagctgggcggcttcagtgatgacctgcacaagaccccaggccctgctgcctaccggcagacagatgtgcgggtgaccaagttcaaggccccccagtacaccatggccgcccgggtggagcccccaggggacaagaccctgaagccaggccctggggcccacagccctgagaaggtgaccctgaccaagccctgtgcccctgtggtgaccttcggcatcaagcacagcgactacatgacccccctgctggtggatgtggagtag

SEQ ID NO: 162929 - DNA, 417 bp, synthetic construct
  misc_feature 1..417: note = Description of Artificial Sequence: Synthetic coding sequence
  source 1..417: mol_type = other DNA
atgacagaggaggtgtggatgggcacctggaggccccaccggccccggggccccatcatggccctgtacagcagccctggccccaagtacctgatcccccccaccaccggcttcatgaagcacacccccaccaagctgcgggccccagcctacagcttccggggggcccccatgctgctggccgagaactgcagccctggcccccgctacaacgtgaaccccaagatcctgaggacaggcaaggacctgggccctgcctacagcatcctgggccgctaccagaccaagaccatgctgaccccaggccctgccctgaagagcgccttccccagctggaccccaccagaccccacctggagcccccctgtgctggagccccggggccccacccccaggatgctgggcagccccccatag

SEQ ID NO: 162930 - DNA, 375 bp, synthetic construct
  misc_feature 1..375: note = Description of Artificial Sequence: Synthetic coding sequence
  source 1..375: mol_type = other DNA
atgacagaggaggtgtggatgggcacctggaggccccaccggccccggggccccatcatggccctgtacagcagccctggccccaagtacctgatcccccccaccaccggcttcatgaagcacacccccaccaagctgcgggccccagcctacagcttccggggggcccccatgctgctggccgagaactgcagcccccccaacacagtgggcaaggccagccagcccagcttcagcatcaagggccgcagcaagctgggcggcttcagtgatgacctgcacaaggtgaccctgaccaagccctgtgcccctgtggtgaccttcggcatcaagcacagcgactacatgacccccctgctggtggatgtggagtag

SEQ ID NO: 162931 - DNA, 774 bp, synthetic construct
  misc_feature 1..774: note = Description of Artificial Sequence: Synthetic coding sequence
  source 1..774: mol_type = other DNA
atggatgctgagtacagcggaaatgagttccccaggtctgagggggagcgggaccagcaccagaggcctgggaaggagaggaagtctggagaggccggctggggcaccggggagctgggccaggacggccgcctgctgagcagcaccctgagcctgagcagcaacagaagcctgggccagaggcagaacagccccctgcccttccagtggaggatcacccacagcttccgctggatggcccaggtgctggccagcgagctgagcctggtggccttcatcctgctgctggtggtggccttcagcaagaagtggctggacctgagccgcagcctcttctaccagcgctggcctgtggatgtgagcaaccgcatccacaccagcgcccacgtgatgtccatgggcctgctgcacttctacaagagccgcagctgcagcgacctggagaatggcaaggtgaccttcatcttcagcaccctgatgctgttccccatcaacatctggatctttgagctggagagaaatgtgtccatccccatcggctggagctacttcatcggctggctggtgctgatcctgtacttcacctgtgccatcctgtgctacttcaaccacaagagcttctggagcctcatcctgagccaccccagcggggctgtgtcctgcagcagcagctttggatctgtggaggagagcccccgggcccagaccatcacagacacccccatcacccaggagggcgtgctggaccctgagcagaaggacacccacgtgtag

SEQ ID NO: 162932 - DNA, 1488 bp, synthetic construct
  misc_feature 1..1488: note = Description of Artificial Sequence: Synthetic coding sequence
  source 1..1488: mol_type = other DNA
atggtgacctggctgtaccgcttcctgcccaccagcaacatggccgccaagctgcggagcctgctgcccccagacctgcggctgcagttctggctgcacgcccggctgcagaagtgcttcctgagccggggctgcggcagctactgtgccggggccaaggccagccccctgcccgggaagatggccatgggcctgatgtgtggcagaagagagctgctgcggctgctgcagagcggccggcgggtgcacagcgtggccggccccagccagtggctgggcaagcccctgaccacccggctgctcttccctgctgccccctgctgctgccggccccactacctgttcctggccgccagcggccccaggagcctgagcaccagcgccatcagctttgctgaggtgcaggtgcaggcccctcctgtggtggccgccacccccagccccacagctgtgcctgaggtggccagcggggagacagcagatgtggtgcagacagctgctgagcagagctttgctgagctgggcctgggcagctacacccctgtgggcctcatccagaacctgctggagttcatgcacgtggacctgggcctgccctggtggggcgccatcgccgcctgcaccgtgtttgcccgctgcctgatcttccccctgattgtgacaggccagcgggaggccgcccgcatccacaaccacctgcctgagatccagaagttcagcagccgcatccgggaggccaagctggccggggaccacatcgagtactacaaggccagcagcgagatggccctgtaccagaagaagcacggcatcaagctgtacaagcccctcatcctgcctgtgacccaggcccccatcttcatctccttcttcatcgccctgcgggagatggccaacctgcctgtgcccagcctgcagacaggaggcctgtggtggttccaggacctgactgtgtctgaccccatctacatcctgcccctggccgtgacagccaccatgtgggccgtgctggagctgggcgctgagactggagtgcagagcagtgacctgcagtggatgagaaatgtcatccgcatgatgcccctcatcaccctgcccatcaccatgcacttccccacagctgtgttcatgtactggctgagcagcaacctcttcagcctggtgcaggtgtcctgcctgcgcatcccagctgtgaggacagtgctgaagatcccccagagggtggtgcatgacctggacaagctgcccccccgggagggcttcctggagagcttcaagaagggctggaagaatgctgagatgacccggcagctgcgggagcgggagcagaggatgaggaaccagctggagctggccgcccggggccccctgcggcagaccttcacccacaaccccctgctgcagcccgggaaggacaacccccccaacatccccagcagcagcagcaagcccaagagcaagtacccctggcatgacaccctgggctag

SEQ ID NO: 162933 - DNA, 1260 bp, synthetic construct
  misc_feature 1..1260: note = Description of Artificial Sequence: Synthetic coding sequence
  source 1..1260: mol_type = other DNA
atgaggggcacccaggtgcacagcgtggccggccccagccagtggctgggcaagcccctgaccacccggctgctcttccctgctgccccctgctgctgccggccccactacctgttcctggccgccagcggccccaggagcctgagcaccagcgccatcagctttgctgaggtgcaggtgcaggcccctcctgtggtggccgccacccccagccccacagctgtgcctgaggtggccagcggggagacagcagatgtggtgcagacagctgctgagcagagctttgctgagctgggcctgggcagctacacccctgtgggcctcatccagaacctgctggagttcatgcacgtggacctgggcctgccctggtggggcgccatcgccgcctgcaccgtgtttgcccgctgcctgatcttccccctgattgtgacaggccagcgggaggccgcccgcatccacaaccacctgcctgagatccagaagttcagcagccgcatccgggaggccaagctggccggggaccacatcgagtactacaaggccagcagcgagatggccctgtaccagaagaagcacggcatcaagctgtacaagcccctcatcctgcctgtgacccaggcccccatcttcatctccttcttcatcgccctgcgggagatggccaacctgcctgtgcccagcctgcagacaggaggcctgtggtggttccaggacctgactgtgtctgaccccatctacatcctgcccctggccgtgacagccaccatgtgggccgtgctggagctgggcgctgagactggagtgcagagcagtgacctgcagtggatgagaaatgtcatccgcatgatgcccctcatcaccctgcccatcaccatgcacttccccacagctgtgttcatgtactggctgagcagcaacctcttcagcctggtgcaggtgtcctgcctgcgcatcccagctgtgaggacagtgctgaagatcccccagagggtggtgcatgacctggacaagctgcccccccgggagggcttcctggagagcttcaagaagggctggaagaatgctgagatgacccggcagctgcgggagcgggagcagaggatgaggaaccagctggagctggccgcccggggccccctgcggcagaccttcacccacaaccccctgctgcagcccgggaaggacaacccccccaacatccccagcagcagcagcaagcccaagagcaagtacccctggcatgacaccctgggctag

SEQ ID NO: 162934 - DNA, 732 bp, synthetic construct
  misc_feature 1..732: note = Description of Artificial Sequence: Synthetic coding sequence
  source 1..732: mol_type = other DNA
atgagccggctgtggtacggcaagaagggcagaagacaccagcccatcaaccacaagtacaccctggtggtgtctgtggccgagtaccacagaagaattgatgccctgaacacagaggagctgcggaccctgtgccggcggctgcagatcaccacccgggaggacatcaacagcaagcaggtggccaccgtgaaggctgacctggagagcgagagcttccggcccaacctgagtgaccccagcgagctgctgctgcctgaccagatcgagaagctgaccaagcacctgccccccaggaccatcggctacccctggaccctggtgtatggaacaggcaagcacggcaccagcctgaagaccctgtaccgcaccatgacaggcctggacacccctgtgctgatggtgatcaaggacagtgatggccaggtgtttggagccctggccagcgagcccctgaaggtgtctgatggcttctatggaactggagagacctttgtgttcaccttctgcccagagtttgaggtgttcaagtggacaggagacaacatgttcttcatcaagggggacatggacagcctggcctttggaggcggcggcggggagtttgccctgtggctggatggagacctgtaccacggccgcagccacagctgcaagacctttggaaacagaaccctgagcaagaaggaggacttcttcatccaggacatcgagatctgggcctttgaatag

SEQ ID NO: 162935 - DNA, 2520 bp, synthetic construct
  misc_feature 1..2520: note = Description of Artificial Sequence: Synthetic coding sequence
  source 1..2520: mol_type = other DNA
atggactacctgaccaccttcacagagaagagcggccgcctgctgcggggcacagccaaccggctgctgggctttggaggcggcggggaggcccggcaggtgcgctttgaggactacctgcgggagcccgcccagggcgacctgggctgcggcagccccccccaccggcccccagcccccagcagccctgagggccctgacaccggccagaagaagaccctggacaagaaggatggccgcaggatgtccttccagaagcccaagggcaccatcgagtacacagtggagagccgggacagcctgaacagcatcgccctgaagtttgacaccaccccaaatgagctggtgcagctgaacaagctgttcagcagagctgtggtgacaggccaggtgctgtatgtgcctgaccctgaatatgtgtcctctgtggagagcagccccagcctgagccctgtgagccccctgagccccaccagcagcgaggccgagtttgacaagaccaccaacccagatgtgcaccccacagaggccacccccagcagcaccttcaccggcatccggcctgcccgggtggtgagcagcaccagcgaggaggaggaggccttcacagagaagttcctgaagatcaactgcaagtacatcaccagcggcaagggcaccgtgtctggagtgctgctggtgacccccaacaacatcatgtttgacccccacaagaatgaccccctggtgcaggagaatggctgtgaggagtatggcatcatgtgccccatggaggaggtgatgtctgctgccatgtacaaggagatcctggacagcaagatcaaggagagcctgcccatcgacatcgaccagctgagcggccgggacttctgccacagcaagaagatgacaggcagcaacacagaggagattgacagccgcatcagagatgctggaaatgattctgccagcacagcccccaggagcacagaggagagcctgtctgaagatgtgttcacagaaagtgagctgagccccatccgggaggagctggtgtccagtgatgagctgcggcaggacaagagcagcggggccagcagcgagagcgtgcagacagtgaaccaggccgaggtggagagcctgactgtgaagtctgagagcacaggcaccccaggccacctgcggagtgacacagagcacagcaccaatgaggtgggcaccctgtgccacaagacagacctgaacaacctggagatggccatcaaggaggaccagattgctgacaacttccagggcatcagcggccccaaggaggacagcaccagcatcaagggcaacagcgaccaggacagcttcctgcacgagaacagcctgcaccaggaggagagccagaaggagaacatgccctgtggggagacagctgagttcaagcagaagcagagcgtgaacaagggcaagcagggcaaggagcagaaccaggacagccagacagaggccgaggagctgaggaagctgtggaagacccacaccatgcagcagaccaagcagcagcgggagaacatccagcaggtgtcccagaaggaggccaagcacaagatcaccagcgcagatggccacatcgagagcagcgccctgctgaaggagaagcagaggcaccggctgcacaagttcctgtgcctgcgggtgggcaagcccatgaggaagacctttgtgtcccaggccagcgccaccatgcagcagtatgcccagagggacaagaagcatgagtactggtttgctgtgccccaggagaggacagaccacctgtatgccttcttcatccagtggagccctgagatctatgcagaagatactggagagtacacccgggagcccggcttcatcgtggtgaagaagattgaggagagcgagaccatcgaggacagcagcaaccaggccgccgcccgggagtgggagatcaccacccgggaggacatcaacagcaagcaggtggccaccgtgaaggctgacctggagagcgagagcttccggcccaacctgagtgaccccagcgagctgctgctgcctgaccagatcgagaagctgaccaagcacctgccccccaggaccatcggctacccctggaccctggtgtatggaacaggcaagcacggcaccagcctgaagaccctgtaccgcaccatgacaggcctggacacccctgtgctgatggtgatcaaggacagtgatggccaggtgtttggagccctggccagcgagcccctgaaggtgtctgatggcttctatggaactggagagacctttgtgttcaccttctgcccagagtttgaggtgttcaagtggacaggagacaacatgttcttcatcaagggggacatggacagcctggcctttggaggcggcggcggggagtttgccctgtggctggatggagacctgtaccacggccgcagccacagctgcaagacctttggaaacagaaccctgagcaagaaggaggacttcttcatccaggacatcgagatctgggcctttgaatag

SEQ ID NO: 162936 - DNA, 2625 bp, synthetic construct
  misc_feature 1..2625: note = Description of Artificial Sequence: Synthetic coding sequence
  source 1..2625: mol_type = other DNA
atgaccaaggacaagaacagccctggcctgaagaagaagagccagagcgtggacatcaatgcccctggcttcaaccccctggccggggccggcaagcagaccccccaggccagcaagcccccagcccccaagacccccatcatcgaggaggagcagaacaatgctgccaacacccagaagcaccccagccgccgctctgagctgaagcgcttctacaccatcgacaccggccagaagaagaccctggacaagaaggatggccgcaggatgtccttccagaagcccaagggcaccatcgagtacacagtggagagccgggacagcctgaacagcatcgccctgaagtttgacaccaccccaaatgagctggtgcagctgaacaagctgttcagcagagctgtggtgacaggccaggtgctgtatgtgcctgaccctgaatatgtgtcctctgtggagagcagccccagcctgagccctgtgagccccctgagccccaccagcagcgaggccgagtttgacaagaccaccaacccagatgtgcaccccacagaggccacccccagcagcaccttcaccggcatccggcctgcccgggtggtgagcagcaccagcgaggaggaggaggccttcacagagaagttcctgaagatcaactgcaagtacatcaccagcggcaagggcaccgtgtctggagtgctgctggtgacccccaacaacatcatgtttgacccccacaagaatgaccccctggtgcaggagaatggctgtgaggagtatggcatcatgtgccccatggaggaggtgatgtctgctgccatgtacaaggagatcctggacagcaagatcaaggagagcctgcccatcgacatcgaccagctgagcggccgggacttctgccacagcaagaagatgacaggcagcaacacagaggagattgacagccgcatcagagatgctggaaatgattctgccagcacagcccccaggagcacagaggagagcctgtctgaagatgtgttcacagaaagtgagctgagccccatccgggaggagctggtgtccagtgatgagctgcggcaggacaagagcagcggggccagcagcgagagcgtgcagacagtgaaccaggccgaggtggagagcctgactgtgaagtctgagagcacaggcaccccaggccacctgcggagtgacacagagcacagcaccaatgaggtgggcaccctgtgccacaagacagacctgaacaacctggagatggccatcaaggaggaccagattgctgacaacttccagggcatcagcggccccaaggaggacagcaccagcatcaagggcaacagcgaccaggacagcttcctgcacgagaacagcctgcaccaggaggagagccagaaggagaacatgccctgtggggagacagctgagttcaagcagaagcagagcgtgaacaagggcaagcagggcaaggagcagaaccaggacagccagacagaggccgaggagctgaggaagctgtggaagacccacaccatgcagcagaccaagcagcagcgggagaacatccagcaggtgtcccagaaggaggccaagcacaagatcaccagcgcagatggccacatcgagagcagcgccctgctgaaggagaagcagaggcaccggctgcacaagttcctgtgcctgcgggtgggcaagcccatgaggaagacctttgtgtcccaggccagcgccaccatgcagcagtatgcccagagggacaagaagcatgagtactggtttgctgtgccccaggagaggacagaccacctgtatgccttcttcatccagtggagccctgagatctatgcagaagatactggagagtacacccgggagcccggcttcatcgtggtgaagaagattgaggagagcgagaccatcgaggacagcagcaaccaggccgccgcccgggagtgggaggtggtgtctgtggccgagtaccacagaagaattgatgccctgaacacagaggagctgcggaccctgtgccggcggctgcagatcaccacccgggaggacatcaacagcaagcaggtggccaccgtgaaggctgacctggagagcgagagcttccggcccaacctgagtgaccccagcgagctgctgctgcctgaccagatcgagaagctgaccaagcacctgccccccaggaccatcggctacccctggaccctggtgtatggcaccgggaagcacggcaccagcctgaagaccctgtaccgcaccatgacaggcctggacacccctgtgctgatggtgatcaaggacagtgatggccaggtgtttggagccctggccagcgagcccctgaaggtgtctgatggcttctacggcaccggggagacctttgtgttcaccttctgcccagagtttgaggtgttcaagtggacaggagacaacatgttcttcatcaagggggacatggacagcctggccttcggcggcggcggcggggagtttgccctgtggctggatggagacctgtaccacggccgcagccacagctgcaagaccttcggcaacagaaccctgagcaagaaggaggacttcttcatccaggacatcgagatctgggcctttgaatag

SEQ ID NO: 162937 - DNA, 2541 bp, synthetic construct
  misc_feature 1..2541: note = Description of Artificial Sequence: Synthetic coding sequence
  source 1..2541: mol_type = other DNA
atgtctgtgagcaacctgtcctggctgaagaagaagagccagagcgtggacatcaatgcccctggcttcaaccccctggccggggccggcaagcagaccccccaggccagcaagcccccagcccccaagacccccatcatcgaggaggagcagaacaatgctgccaacacccagaagcaccccagcagaagaagtgagctgaagcgcttctacaccatcgacaccggccagaagaagaccctggacaagaaggatggaagaaggatgtccttccagaagcccaagggcaccatcgagtacacagtggagagccgggacagcctgaacagcatcgccctgaagtttgacaccaccccaaatgagctggtgcagctgaacaagctgttcagcagagctgtggtgacaggccaggtgctgtatgtgcctgaccctgaatatgtgtcctctgtggagagcagccccagcctgagccctgtgagccccctgagccccaccagcagcgaggccgagtttgacaagaccaccaacccagatgtgcaccccacagaggccacccccagcagcaccttcaccggcatccggcctgcccgggtggtgagcagcaccagcgaggaggaggaggccttcacagagaagttcctgaagatcaactgcaagtacatcaccagcgggaaaggaacagtgtctggagtgctgctggtgacccccaacaacatcatgtttgacccccacaagaatgaccccctggtgcaggagaatggctgtgaggagtatggcatcatgtgccccatggaggaggtgatgtctgctgccatgtacaaggagatcctggacagcaagatcaaggagagcctgcccattgatattgaccagctgagcggccgggacttctgccacagcaagaagatgacaggcagcaacacagaggagattgacagccgcatcagagatgctggaaatgacagcgccagcacagcccccaggagcacagaggagagcctgtctgaagatgtgttcacagagagcgagctgagccccatccgggaggagctggtgtccagtgatgagctgcggcaggacaagagcagcggggccagcagcgagagcgtgcagacagtgaaccaggccgaggtggagagcctgactgtgaagtctgagagcacaggcaccccaggccacctgcggagtgacacagagcacagcaccaatgaggtgggcaccctgtgccacaagacagacctgaacaacctggagatggccatcaaggaggaccagattgctgacaacttccagggcatcagcggccccaaggaggacagcaccagcatcaagggcaacagcgaccaggacagcttcctgcacgagaacagcctgcaccaggaggagagccagaaggagaacatgccctgtggggagacagctgagttcaagcagaagcagagcgtgaacaagggcaagcagggcaaggagcagaaccaggacagccagacagaagctgaggagctgaggaagctgtggaagacccacaccatgcagcagaccaagcagcagcgggagaacatccagcaggtgtcccagaaggaggccaagcacaagatcaccagcgcagatggccacatcgagagcagcgccctgctgaaggagaagcagaggcaccggctgcacaagttcctgtgcctgcgggtgggcaagcccatgaggaagacctttgtgtcccaggccagcgccaccatgcagcagtatgcccagagggacaagaagcatgagtactggtttgctgtgccccaggagaggacagaccacctgtatgccttcttcatccagtggagccctgagatctatgcagaggacaccggggagtacacccgggagcccggcttcatcgtggtgaagaagattgaggagagcgagaccatcgaggacagcagcaaccaggccgccgcccgggagtgggagatcaccacccgggaggacatcaacagcaagcaggtggccaccgtgaaggctgacctggagagcgagagcttccggcccaacctgagtgaccccagcgagctgctgctgcctgaccagatcgagaagctgaccaagcacctgccccccaggaccatcggctacccctggaccctggtgtatggcaccgggaagcacggcaccagcctgaagaccctgtaccgcaccatgacaggcctggacacccctgtgctgatggtgatcaaggacagtgatggccaggtgtttggagccctggccagcgagcccctgaaggtgtctgatggcttctacggcaccggggagacctttgtgttcaccttctgcccagagtttgaggtgttcaagtggacaggagacaacatgttcttcatcaagggggacatggacagcctggccttcggcggcggcggcggggagtttgccctgtggctggatggagacctgtaccacggccgcagccacagctgcaagaccttcggcaacagaaccctgagcaagaaggaggacttcttcatccaggacatcgagatctgggcctttgaatag

SEQ ID NO: 162938 - DNA, 651 bp, synthetic construct
  misc_feature 1..651: note = Description of Artificial Sequence: Synthetic coding sequence
  source 1..651: mol_type = other DNA
atgagccggctgtggtacggcaagaagggcagaagacaccagcccatcaaccacaagtacaccctcatcaccacccgggaggacatcaacagcaagcaggtggccaccgtgaaggctgacctggagagcgagagcttccggcccaacctgagtgaccccagcgagctgctgctgcctgaccagatcgagaagctgaccaagcacctgccccccaggaccatcggctacccctggaccctggtgtatggcaccgggaagcacggcaccagcctgaagaccctgtaccgcaccatgacaggcctggacacccctgtgctgatggtgatcaaggacagtgatggccaggtgtttggagccctggccagcgagcccctgaaggtgtctgatggcttctacggcaccggggagacctttgtgttcaccttctgcccagagtttgaggtgttcaagtggacaggagacaacatgttcttcatcaagggggacatggacagcctggccttcggcggcggcggcggggagtttgccctgtggctggatggagacctgtaccacggccgcagccacagctgcaagaccttcggcaacagaaccctgagcaagaaggaggacttcttcatccaggacatcgagatctgggcctttgaatag

SEQ ID NO: 162939 - DNA, 885 bp, synthetic construct
  misc_feature 1..885: note = Description of Artificial Sequence: Synthetic coding sequence
  source 1..885: mol_type = other DNA
atgcagcagaccaagcagcagcgggagaacatccagcaggtgtcccagaaggaggccaagcacaagatcaccagcgcagatggccacatcgagagcagcgccctgctgaaggagaagcagaggcaccggctgcacaagttcctgtgcctgcgggtgggcaagcccatgaggaagacctttgtgtcccaggccagcgccaccatgcagcagtatgcccagagggacaagaagcatgagtactggtttgctgtgccccaggagaggacagaccacctgtatgccttcttcatccagtggagccctgagatctatgcagaggacaccggggagtacacccgggagcccggcttcatcgtggtgaagaagattgaggagagcgagaccatcgaggacagcagcaaccaggccgccgcccgggagtgggagctgaccaagcacctgccccccaggaccatcggctacccctggaccctggtgtatggcaccgggaagcacggcaccagcctgaagaccctgtaccgcaccatgacaggcctggacacccctgtgctgatggtgatcaaggacagtgatggccaggtgtttggagccctggccagcgagcccctgaaggtgtctgatggcttctacggcaccggggagacctttgtgttcaccttctgcccagagtttgaggtgttcaagtggacaggagacaacatgttcttcatcaagggggacatggacagcctggccttcggcggcggcggcggggagtttgccctgtggctggatggagacctgtaccacggccgcagccacagctgcaagaccttcggcaacagaaccctgagcaagaaggaggacttcttcatccaggacatcgagatctgggcctttgaatag

SEQ ID NO: 162940 - DNA, 1512 bp, synthetic construct
  misc_feature 1..1512: note = Description of Artificial Sequence: Synthetic coding sequence
  source 1..1512: mol_type = other DNA
atgttctgccagaggaaggacaccggccagaagaagaccctggacaagaaggatggccgcaggatgtccttccagaagcccaagggcaccatcgagtacacagtggagagccgggacagcctgaacagcatcgccctgaagtttgacaccaccccaaatgagctggtgcagctgaacaagctgttcagcagagctgtggtgacaggccaggtgctgtatgtgcctgaccctgaatatgtgtcctctgtggagagcagccccagcctgagccctgtgagccccctgagccccaccagcagcgaggccgagtttgacaagaccaccaacccagatgtgcaccccacagaggccacccccagcagcaccttcaccggcatccggcctgcccgggtggtgagcagcaccagcgaggaggaggaggccttcacagagaagttcctgaagatcaactgcaagtacatcaccagcggcaagggcaccgtgtctggagtgctgctggtgacccccaacaacatcatgtttgacccccacaagaatgaccccctggtgcaggagaatggctgtgaggagtatggcatcatgtgccccatggaggaggtgatgtctgctgccatgtacaaggagatcctggacagcaagatcaaggagagcctgcccatcgacatcgaccagctgagcggccgggacttctgccacagcaagaagatgacaggcagcaacacagaggagattgacagccgcatcagagatgctggaaatgattctgccagcacagcccccaggagcacagaggagagcctgtctgaagatgtgttcacagaaagtgagctgagccccatccgggaggagctggtgtccagtgatgagctgcggcaggacaagagcagcggggccagcagcgagagcgtgcagacagtgaaccaggccgaggtggagagcctgactgtgaagtctgagagcacaggcaccccaggccacctgcggagtgacacagagcacagcaccaatgaggtgggcaccctgtgccacaagacagacctgaacaacctggagatggccatcaaggaggaccagattgctgacaacttccagggcatcagcggccccaaggaggacagcaccagcatcaagggcaacagcgaccaggacagcttcctgcacgagaacagcctgcaccaggaggagagccagaaggagaacatgccctgtggggagacagctgagttcaagcagaagcagagcgtgaacaagggcaagcagggcaaggagcagaaccaggacagccagacagaggccgaggagctgaggaagctgtggaagacccacaccatgcagcagaccaagcagcagcgggagaacatccagcaggtgtcccagaaggaggccaagcacaagatcaccagcgcagatggccacatcgagagcaagtgctacagagtgaatgaggtgagcagcagcaactgcatggtgagccccagcttcctgacagacagcaaggctgctgtgccctag

SEQ ID NO: 162941 - DNA, 2622 bp, synthetic construct
  misc_feature 1..2622: note = Description of Artificial Sequence: Synthetic coding sequence
  source 1..2622: mol_type = other DNA
atgtctgtgagcaacctgtcctggctgaagaagaagagccagagcgtggacatcaatgcccctggcttcaaccccctggccggggccggcaagcagaccccccaggccagcaagcccccagcccccaagacccccatcatcgaggaggagcagaacaatgctgccaacacccagaagcaccccagcagaagaagtgagctgaagcgcttctacaccatcgacaccggccagaagaagaccctggacaagaaggatggaagaaggatgtccttccagaagcccaagggcaccatcgagtacacagtggagagccgggacagcctgaacagcatcgccctgaagtttgacaccaccccaaatgagctggtgcagctgaacaagctgttcagcagagctgtggtgacaggccaggtgctgtatgtgcctgaccctgaatatgtgtcctctgtggagagcagccccagcctgagccctgtgagccccctgagccccaccagcagcgaggccgagtttgacaagaccaccaacccagatgtgcaccccacagaggccacccccagcagcaccttcaccggcatccggcctgcccgggtggtgagcagcaccagcgaggaggaggaggccttcacagagaagttcctgaagatcaactgcaagtacatcaccagcgggaaaggaacagtgtctggagtgctgctggtgacccccaacaacatcatgtttgacccccacaagaatgaccccctggtgcaggagaatggctgtgaggagtatggcatcatgtgccccatggaggaggtgatgtctgctgccatgtacaaggagatcctggacagcaagatcaaggagagcctgcccattgatattgaccagctgagcggccgggacttctgccacagcaagaagatgacaggcagcaacacagaggagattgacagccgcatcagagatgctggaaatgacagcgccagcacagcccccaggagcacagaggagagcctgtctgaagatgtgttcacagagagcgagctgagccccatccgggaggagctggtgtccagtgatgagctgcggcaggacaagagcagcggggccagcagcgagagcgtgcagacagtgaaccaggccgaggtggagagcctgactgtgaagtctgagagcacaggcaccccaggccacctgcggagtgacacagagcacagcaccaatgaggtgggcaccctgtgccacaagacagacctgaacaacctggagatggccatcaaggaggaccagattgctgacaacttccagggcatcagcggccccaaggaggacagcaccagcatcaagggcaacagcgaccaggacagcttcctgcacgagaacagcctgcaccaggaggagagccagaaggagaacatgccctgtggggagacagctgagttcaagcagaagcagagcgtgaacaagggcaagcagggcaaggagcagaaccaggacagccagacagaagctgaggagctgaggaagctgtggaagacccacaccatgcagcagaccaagcagcagcgggagaacatccagcaggtgtcccagaaggaggccaagcacaagatcaccagcgcagatggccacatcgagagcagcgccctgctgaaggagaagcagaggcaccggctgcacaagttcctgtgcctgcgggtgggcaagcccatgaggaagacctttgtgtcccaggccagcgccaccatgcagcagtatgcccagagggacaagaagcatgagtactggtttgctgtgccccaggagaggacagaccacctgtatgccttcttcatccagtggagccctgagatctatgcagaggacaccggggagtacacccgggagcccggcttcatcgtggtgaagaagattgaggagagcgagaccatcgaggacagcagcaaccaggccgccgcccgggagtgggaggtggtgtctgtggccgagtaccacagaagaattgatgccctgaacacagaggagctgcggaccctgtgccggcggctgcagatcaccacccgggaggacatcaacagcaagcaggtggccaccgtgaaggctgacctggagagcgagagcttccggcccaacctgagtgaccccagcgagctgctgctgcctgaccagatcgagaagctgaccaagcacctgccccccaggaccatcggctacccctggaccctggtgtatggaacaggcaagcacggcaccagcctgaagaccctgtaccgcaccatgacaggcctggacacccctgtgctgatggtgatcaaggacagtgatggccaggtgtttggagccctggccagcgagcccctgaaggtgtctgatggcttctatggaactggagagacctttgtgttcaccttctgcccagagtttgaggtgttcaagtggacaggagacaacatgttcttcatcaagggggacatggacagcctggcctttggaggcggcggcggggagtttgccctgtggctggatggagacctgtaccacggccgcagccacagctgcaagacctttggaaacagaaccctgagcaagaaggaggacttcttcatccaggacatcgagatctgggcctttgaatag

SEQ ID NO: 162942 - DNA, 2541 bp, synthetic construct; identical to SEQ ID NO: 162937
  misc_feature 1..2541: note = Description of Artificial Sequence: Synthetic coding sequence
  source 1..2541: mol_type = other DNA

SEQ ID NO: 162943 - DNA, 822 bp, synthetic construct
  misc_feature 1..822: note = Description of Artificial Sequence: Synthetic coding sequence
  source 1..822: mol_type = other DNA
atgacctttgatgacctgaagatccagacagtgaaggaccagccagatgagaagagcaatggcaagaaggccaagggcctgcagttcctgtacagcccctggtggtgcctggccgccgccaccctgggcgtgctgtgcctgggcctggtggtgaccatcatggtgctgggcatgcagctgagccaggtgtctgacctgctgacccaggagcaggccaacctgacccaccagaagaagaagctggagggccagatcagcgcccggcagcaggccgaggaggccagccaggagagtgaaaatgagctgaaggagatgattgagaccctggccaggaagctgaatgagaagagcaaggagcagatggagctgcaccaccagaacctgaacctgcaggagaccctgaagagggtggccaactgcagcgccccctgcccccaggactggatctggcatggagagaactgctacctgttcagcagcggcagcttcaactgggagaagagccaggagaagtgcctgagcctggatgccaagctgctgaagatcaacagcacagctgacctggacttcatccagcaggccatctcctacagcagcttccccttctggatgggcctgagcagaagaaaccccagctacccctggctgtgggaggatggcagccccctgatgccccacctgttccgggtgagaggagctgtgtcccagacctaccccagcggcacctgtgcctacatccagagaggagctgtgtatgcagagaactgcatcctggccgccttcagcatctgccagaagaaggccaacctgcgggcccagtag

SEQ ID NO: 162944 - DNA, 546 bp, synthetic construct
  misc_feature 1..546: note = Description of Artificial Sequence: Synthetic coding sequence
  source 1..546: mol_type = other DNA
atgacctttgatgacctgaagatccagacagtgaaggaccagccagatgagaagagcaatggcaagaaggccaagggcctgcagttcctgtacagcccctggtggtgcctggccgccgccaccctgggcgtgctgtgcctgggcctggtggtgaccatcatggtgctgggcatgcagctgagccaggtgtctgacctgctgacccaggagcaggccaacctgacccaccagaagaagaagctggagggccagatcagcgcccggcagcaggccgaggaggccagccaggagagtgaaaatgagctgaaggagatgattgagaccctggccaggaagctgaatgagaagagcaaggagcagatggagctgcaccaccagaacctgaacctgcaggagaccctgaagagggtggccaactgcagcggcctgcacccagccagcaacttcctgttccagttcagcatcctggatggagctgtgtctgaggagccccagctgcccatggccctgggcggccgcttctcctttgatgcccccctcatctag

SEQ ID NO: 162945 - DNA, 570 bp, synthetic construct
  misc_feature 1..570: note = Description of Artificial Sequence: Synthetic coding sequence
  source 1..570: mol_type = other DNA
atgacctttgatgacctgaagatccagacagtgaaggaccagccagatgagaagagcaatggcaagaaggccaagggcctgcagttcctgtacagcccctggtggtgcctggccgccgccaccctgggcgtgctgtgcctgggcctggtggtgaccatcatggtgctgggcatgcagctgagccaggtgtctgacctgctgacccaggagcaggccaacctgacccaccagaagaagaagctggagggccagatcagcgcccggcagcaggccgaggaggccagccaggagagtgaaaatgagctgaaggagatgattgagaccctggccaggaagctgaatgagaagagcaaggagcagatggagctgcaccaccagaacctgaacctgcaggagaccctgaagagggtggccaactgcagcgccccctgcccccaggactggatctggcatggagagaactgctacctgttcagcagcggcagcttcaactgggagaagagccaggagaagtgcctgagcctggatgccaagctgctgaagatcaacagcacagctgacctgatctag

SEQ ID NO: 162946 - DNA, 1623 bp, synthetic construct; identical to SEQ ID NO: 159372
  misc_feature 1..1623: note = Description of Artificial Sequence: Synthetic coding sequence
  source 1..1623: mol_type = other DNA

SEQ ID NO: 162947 - DNA, 636 bp, synthetic construct
  misc_feature 1..636: note = Description of Artificial Sequence: Synthetic coding sequence
  source 1..636: mol_type = other DNA
atgttccacctgcggacctgtgccgccaagctgcggcccctgacagccagccagacagtgaagaccttcagccagaacagacctgctgctgcccggaccttccagcagatccgctgctacagcgcccctgtggccgctgagcccttcctgagcggcaccagcagcaactacgtggaggagatgtactgtgcctggctggagaaccccaagtctgtgcacaagtcctgggacatcttcttcaggaacaccaatgctggggcccctcctggaacagcctaccagagccccctgcccctgagccggggcagcctggccgctgtggcccacgcccagagcctggtggaggcccagcccaacgtggacaagctggtggaggaccacctggccgtgcagagcctcatccgggcctaccagatccggggccaccacgtggcccagctggaccccctgggcatcctggatgctgacctggacagctctgtgcctgctgacatcatcagcagcacagacaagctgggcttctacggcctggatgaaagtgacctggacaaggtgttccacctgcccaccaccaccttcatcggcggccaggagagcgccctgcccctgcgggagatcatccggcggctggagtag

SEQ ID NO: 162948 - DNA, 1284 bp, synthetic construct
  misc_feature 1..1284: note = Description of Artificial Sequence: Synthetic coding sequence
  source 1..1284: mol_type = other DNA
atgttccacctgcggacctgtgccgccaagctgcggcccctgacagccagccagacagtgaagaccttcagccagaacagacctgctgctgcccggaccttccagcagatccgctgctacagcgcccctgtggccgctgagcccttcctgagcggcaccagcagcaactacgtggaggagatgtactgtgcctggctggagaaccccaagtctgtgcacaagtcctgggacatcttcttcaggaacaccaatgctggggcccctcctggaacagcctaccagagccccctgcccctgagccggggcagcctggccgctgtggcccacgcccagagcctggtggaggcccagcccaacgtggacaagctggtggaggaccacctggccgtgcagagcctcatccgggcctaccagatccggggccaccacgtggcccagctggaccccctgggcatcctggatgctgacctggacagctctgtgcctgctgacatcatcagcagcacagacaagctgggcttctacggcctggatgaaagtgacctggacaaggtgttccacctgcccaccaccaccttcatcggcggccaggagagcgccctgcccctgcgggagatcatccggcggctggagatggcctactgccagcacatcggcgtggagttcatgttcatcaatgacctggagcagtgccagtggatccggcagaagtttgagaccccaggcatcatgcagttcaccaatgaggagaagaggaccctgctggcccggctggtgcgcagcaccaggtttgaggagttcctgcagaggaagtggagcagcgagaagcgcttcggcctggagggctgtgaggtgctgatcccagccctgaagaccatcatcgacaagagcagtgaaaatggagtggactatgtgatcatgggcatgccccaccggggccgcctgaatgtgctggccaacgtcatcaggaaggagctggagcagatcttctgccagtttgacagcaagctggaggccgcagatgagggcagcggagatgtgaagtaccacctgggcatgtaccaccggcgcatcaacagagtgacagacaggaacatcaccctgagcctggtggccaaccccagccacctggaggccgctgaccctgtggtgatgggcaagaccaaggccgagcagttctactgtggggacacagagggcaagaaggtgcggccccgggagcggcgggcccggcagatcgtgaaggccccctgcagctccatggagttccgcagccccacctag

SEQ ID NO: 162949 - DNA, 2925 bp, synthetic construct
  misc_feature 1..2925: note = Description of Artificial Sequence: Synthetic coding sequence
  source 1..2925: mol_type = other DNA
atgtactgtgcctggctggagaaccccaagtctgtgcacaagtcctgggacatcttcttcaggaacaccaatgctggggcccctcctggaacagcctaccagagccccctgcccctgagccggggcagcctggccgctgtggcccacgcccagagcctggtggaggcccagcccaacgtggacaagctggtggaggaccacctggccgtgcagagcctcatccgggcctaccaggtgcggggccaccacatcgccaagctggaccccctgggcatcagctgtgtgaactttgatgatgcccctgtgacagtgagcagcaatgtggacctggccgtgttcaaggagcggctgaggatgctgactgtgggcggcttctacggcctggatgaaagtgacctggacaaggtgttccacctgcccaccaccaccttcatcggcggccaggagagcgccctgcccctgcgggagatcatccggcggctggagatggcctactgccagcacatcggcgtggagttcatgttcatcaatgacctggagcagtgccagtggatccggcagaagtttgagaccccaggcatcatgcagttcaccaatgaggagaagaggaccctgctggcccggctggtgcgcagcaccaggtttgaggagttcctgcagaggaagtggagcagcgagaagagatttggcctggagggctgtgaggtgctgatcccagccctgaagaccatcatcgacaagagcagtgaaaatggagtggactatgtgatcatgggcatgccccaccggggccgcctgaatgtgctggccaacgtcatcaggaaggagctggagcagatcttctgccagtttgacagcaagctggaggccgcagatgagggcagcggagatgtgaagtaccacctgggcatgtaccaccggcgcatcaacagagtgacagacaggaacatcaccctgagcctggtggccaaccccagccacctggaggccgctgaccctgtggtgatgggcaagaccaaggccgagcagttctactgtggggacacagagggcaagaaggtgatgagcatcctgctgcatggagatgctgcctttgctggccagggcatcgtgtatgagaccttccacctgagtgacctgcccagctacaccacccacggcaccgtgcacgtggtggtgaacaaccagatcggcttcaccacagaccccaggatggcccggagcagcccctaccccacagatgtggcccgggtggtgaatgcccccatcttccacgtgaacagtgatgatcctgaggccgtgatgtatgtgtgcaaggtggccgctgagtggaggagcaccttccacaaggatgtggtggtggacctggtgtgctacagaagaaatggccacaatgagatggatgagcccatgttcacccagcccctgatgtacaagcagatcaggaagcagaagcctgtgctgcagaagtatgcagagctgctggtgtcccagggcgtggtgaaccagccagaatatgaggaggagatcagcaaatatgacaagatctgtgaggaggcctttgcccggagcaaggatgagaagatcctgcacatcaagcactggctggacagcccctggccaggcttcttcaccctggatggccagcccaggtccatgagctgccccagcacaggcctgacagaggacatcctgacccacatcggaaatgtggccagctctgtgcctgtggagaacttcaccatccatggaggcctgagccgcatcctgaagaccagaggagagatggtgaagaacagaacagtggactgggccctggccgagtacatggccttcggcagcctgctgaaggagggcatccacatccggctgagcggccaggatgtggagcggggcaccttcagccaccgccaccacgtgctgcatgaccagaatgtggacaagaggacctgcatccccatgaaccacctgtggcccaaccaggccccctacacagtgtgcaacagcagcctgtctgaatatggagtgctgggctttgagctgggctttgccatggccagccccaatgccctggtgctgtgggaggcccagtttggagacttccacaacacagcccagtgcatcatcgaccagttcatctgccccggccaggccaagtgggtgcggcagaatggcatcgtgctgctgctgccccacggcatggagggcatgggccctgagcacagcagcgcccggcctgagcgcttcctgcagatgtgcaatgatgatcctgatgtgctgcctgacctgaaggaggccaactttgacatcaaccagctgtatgactgcaactgggtggtggtgaactgcagcaccccaggcaacttcttccacgtgctgcggcggcagatcctgctgcccttcaggaagcccctcatcatcttcacccccaagagcctgctgcggcaccctgaggcccggagcagctttgatgagatgctgcccggcacccacttccagagggtcatcccagaagatggccctgctgcccagaacccagaaaatgtgaagaggctgctcttctgcaccgggaaggtgtactatgacctgacccgggagaggaaggcccgggacatggtgggccaggtggccatcaccagaattgagcagctgagccccttcccctttgacctgctgctgaaggaggtgcagaagtacccaaatgctgagctggcctggtgccaggaggagcacaagaaccagggctactatgactatgtgaagccccggctgcggaccaccatcagccgggccaagcctgtgtggtacgccggccgggaccctgctgctgccccagccactggaaacaagaagacccacctgacagagctgcagaggctgctggacacagcctttgacctggatgtgttcaagaacttctcctag

SEQ ID NO: 162950 - DNA, 3060 bp, synthetic construct
  misc_feature 1..3060: note = Description of Artificial Sequence: Synthetic coding sequence
  source 1..3060: mol_type = other DNA
atgttccacctgcggacctgtgccgccaagctgcggcccctgacagccagccagacagtgaagaccttcagccagaacagacctgctgctgcccggaccttccagcagatccgctgctacagcgcccctgtggccgctgagcccttcctgagcggcaccagcagcaactacgtggaggagatgtactgtgcctggctggagaaccccaagtctgtgcacaagtcctgggacatcttcttcaggaacaccaatgctggggcccctcctggaacagcctaccagagccccctgcccctgagccggggcagcctggccgctgtggcccacgcccagagcctggtggaggcccagcccaacgtggacaagctggtggaggaccacctggccgtgcagagcctcatccgggcctaccaggtgcggggccaccacatcgccaagctggaccccctgggcatcagctgtgtgaactttgatgatgcccctgtgacagtgagcagcaatgtgggcttctacggcctggatgaaagtgacctggacaaggtgttccacctgcccaccaccaccttcatcggcggccaggagagcgccctgcccctgcgggagatcatccggcggctggagatggcctactgccagcacatcggcgtggagttcatgttcatcaatgacctggagcagtgccagtggatccggcagaagtttgagaccccaggcatcatgcagttcaccaatgaggagaagaggaccctgctggcccggctggtgcgcagcaccaggtttgaggagttcctgcagaggaagtggagcagcgagaagcgcttcggcctggagggctgtgaggtgctgatcccagccctgaagaccatcatcgacaagagcagtgaaaatggagtggactatgtgatcatgggcatgccccaccggggccgcctgaatgtgctggccaacgtcatcaggaaggagctggagcagatcttctgccagtttgacagcaagctggaggccgcagatgagggcagcggagatgtgaagtaccacctgggcatgtaccaccggcgcatcaacagagtgacagacaggaacatcaccctgagcctggtggccaaccccagccacctggaggccgctgaccctgtggtgatgggcaagaccaaggccgagcagttctactgtggggacacagagggcaagaaggtgatgagcatcctgctgcatggagatgctgcctttgctggccagggcatcgtgtatgagaccttccacctgagtgacctgcccagctacaccacccatggaacagtgcacgtggtggtgaacaaccagatcggcttcaccacagaccccaggatggcccggagcagcccctaccccacagatgtggcccgggtggtgaatgcccccatcttccacgtgaacagtgatgatcctgaggccgtgatgtatgtgtgcaaggtggccgctgagtggaggagcaccttccacaaggatgtggtggtggacctggtgtgctacagaagaaatggccacaatgagatggatgagcccatgttcacccagcccctgatgtacaagcagatcaggaagcagaagcctgtgctgcagaagtatgcagagctgctggtgtcccagggcgtggtgaaccagccagaatatgaggaggagatcagcaaatatgacaagatctgtgaggaggcctttgcccggagcaaggatgagaagatcctgcacatcaagcactggctggacagcccctggccaggcttcttcaccctggatggccagcccaggtccatgagctgccccagcacaggcctgacagaggacatcctgacccacatcggaaatgtggccagctctgtgcctgtggagaacttcaccatccacggcggcctgagccgcatcctgaagaccagaggagagatggtgaagaacagaacagtggactgggccctggccgagtacatggccttcggcagcctgctgaaggagggcatccacatccggctgagcggccaggatgtggagcggggcaccttcagccaccgccaccacgtgctgcatgaccagaatgtggacaagaggacctgcatccccatgaaccacctgtggcccaaccaggccccctacacagtgtgcaacagcagcctgtctgaatatggagtgctgggctttgagctgggctttgccatggccagccccaatgccctggtgctgtgggaggcccagtttggagacttccacaacacagcccagtgcatcatcgaccagttcatctgccccggccaggccaagtgggtgcggcagaatggaattgtgctgctgctgccccacggcatggagggcatgggccctgagcacagcagcgcccggcctgagcgcttcctgcagatgtgcaatgatgatcctgatgtgctgcctgacctgaaggaggccaactttgacatcaaccagctgtatgactgcaactgggtggtggtgaactgcagcaccccaggcaacttcttccacgtgctgcggcggcagatcctgctgcccttcaggaagcccctcatcatcttcacccccaagagcctgctgcggcaccctgaggcccggagcagctttgatgagatgctgcccggcacccacttccagagggtcatcccagaagatggccctgctgcccagaacccagaaaatgtgaagaggctgctcttctgcaccgggaaggtgtactatgacctgacccgggagaggaaggcccgggacatggtgggccaggtggccatcacccgcatcgagcagctgagccccttcccctttgacctgctgctgaaggaggtgcagaagtacccaaatgctgagctggcctggtgccaggaggagcacaagaaccagggctactatgactatgtgaagccccggctgcggaccaccatcagccgggccaagcctgtgtggtacgccggccgggaccctgctgctgccccagccaccggcaacaagaagacccacctgacagagctgcagaggctgctggacacagcctttgacctggatgtgttcaagaacttctcctag

SEQ ID NO: 162951 - DNA, 2424 bp, synthetic construct
  misc_feature 1..2424: note = Description of Artificial Sequence: Synthetic coding sequence
  source 1..2424: mol_type = other DNA
atggccgccacagagctgcggggcgtggtgggccctggccctgctgccatcgccgccctgggcggcggcggggccggcccccctgtggtgggcggcggcggcggcagaggagatgctggccctggcagcggggccgccagcggcaccgtggtggccgctgctgctgggggccctggccctggggccggcggcgtggccgccgccggccctgccccagccccacccaccggcggcagcggcggcagcggggccggcggcagcggcagcgcccgggagggctggctgttcaagtggaccaactacatcaagggctaccagaggcgctggtttgtgctgagcaatggcctgctgagctactaccgcagcaaggccgagatgaggcacacctgccggggcaccatcaacctggccacagccaacatcaccgtggaggacagctgcaacttcatcatcagcaatggaggagcccagacctaccacctgaaggccagcagcgaggtggagcggcagcgctgggtgacagccctggagctggccaaggccaaggctgtgaagatgctggccgagagtgatgaaagtggagatgaggagagcgtgtcccagacagacaagacagagctgcagaacaccctgcggaccctgagcagcaaggtggaggacctgagcacctgcaatgacctgattgccaagcatggaacagccctgcagaggagcctgtctgagctggagagcctgaagctgcctgctgagagcaatgagaagatcaagcaggtgaatgaaagagccaccctcttccgcatcaccagcaatgccatgatcaatgcctgccgggacttcctgatgctggcccagacccacagcaagaagtggcagaagagcctgcagtatgaaagagaccagaggatccggctggaggagaccctggagcagctggccaagcagcacaaccacctggagcgggccttccggggggccaccgtgctgcctgccaacaccccaggaaatgtgggcagcggcaaggaccagtgctgcagcgggaaaggagacatgtctgatgaagatgatgaaaatgagttctttgatgcccctgagatcatcaccatgcctgagaacctgggccacaagaggacaggcagcaacatcagcggggccagcagtgacatcagcctggatgagcagtacaagcaccagctggaggagaccaagaaggagaagaggacccgcatcccctacaagcccaactacagcctgaacctgtggagcatcatgaagaactgcatcggcaaggagctgagcaagatccccatgcctgtgaacttcaatgagcccctgtccatgctgcagaggctgacagaggacctggagtaccacgagctgctggacagagctgccaagtgtgagaacagcctggagcagctgtgctacgtggccgccttcaccgtgtcctcctacagcaccaccgtcttccgcaccagcaagcccttcaaccccctgctgggggagacctttgagctggaccggctggaggagaatggctaccgcagcctgtgtgagcaggtgagccaccaccccccagctgctgcccaccacgccgagagcaagaatggctggaccctgcggcaggagatcaagatcaccagcaagttccggggcaagtacctgagcatcatgcccctgggcaccatccactgcatcttccacgccaccggccaccactacacctggaagaaggtgaccaccaccgtgcacaacatcatcgtgggcaagctgtggattgaccagagcggggagattgacatcgtgaaccacaagacaggagacaagtgcaacctgaagtttgtgccctacagctacttcagcagagatgtggccaggaaggtgactggagaggtgacagaccccagcggcaaggtgcactttgccctgctgggcacctgggatgagaagatggagtgcttcaaggtgcagcctgtgattggagaaaatggaggagatgcccggcagaggggccatgaagctgaggagagccgggtgatgctgtggaagaggaaccccctgcccaagaatgctgagaacatgtactacttcagcgagctggccctgaccctgaatgcctgggagagcggcacagcccccacagacagccggctgcggccagaccagaggctgatggagaatggccgctgggatgaggccaatgctgagaagcagaggctggaggagaagcagaggctgagcaggaagaagcgggaggccgaggccatgaaggccacagaagatggcaccccctatgacccctacaaggccctgtggtttgagaggaagaaggaccctgtgaccaaggagctgacccacatctacagaggagagtactgggagtgcaaggagaagcaggactggagcagctgcccagacatcttctag

SEQ ID NO: 162952 - DNA, 1224 bp, synthetic construct
  misc_feature 1..1224: note = Description of Artificial Sequence: Synthetic coding sequence
  source 1..1224: mol_type = other DNA
atggccgccacagagctgcggggcgtggtgggccctggccctgctgccatcgccgccctgggcggcggcggggccggcccccctgtggtgggcggcggcggcggcagaggagatgctggccctggcagcggggccgccctgcagaggctgacagaggacctggagtaccacgagctgctggacagagctgccaagtgtgagaacagcctggagcagctgtgctacgtggccgccttcaccgtgtcctcctacagcaccaccgtcttccgcaccagcaagcccttcaaccccctgctgggggagacctttgagctggaccggctggaggagaatggctaccgcagcctgtgtgagcaggtgagccaccaccccccagctgctgcccaccacgccgagagcaagaatggctggaccctgcggcaggagatcaagatcaccagcaagttccggggcaagtacctgagcatcatgcccctgggcaccatccactgcatcttccacgccaccggccaccactacacctggaagaaggtgaccaccaccgtgcacaacatcatcgtgggcaagctgtggattgaccagagcggggagattgacatcgtgaaccacaagacaggagacaagtgcaacctgaagtttgtgccctacagctacttcagcagagatgtggccaggaaggtgactggagaggtgacagaccccagcggcaaggtgcactttgccctgctgggcacctgggatgagaagatggagtgcttcaaggtgcagcctgtgattggagaaaatggaggagatgcccggcagaggggccatgaagctgaggagagccgggtgatgctgtggaagaggaaccccctgcccaagaatgctgagaacatgtactacttcagcgagctggccctgaccctgaatgcctgggagagcggcacagcccccacagacagccggctgcggccagaccagaggctgatggagaatggccgctgggatgaggccaatgctgagaagcagaggctggaggagaagcagaggctgagcaggaagaagcgggaggccgaggccatgaaggccacagaagatggcaccccctatgacccctacaaggccctgtggtttgagaggaagaaggaccctgtgaccaaggagctgacccacatctacagaggagagtactgggagtgcaaggagaagcaggactggagcagctgcccagacatcttctag

SEQ ID NO: 162953 - DNA, 2751 bp, synthetic construct
  misc_feature 1..2751: note = Description of Artificial Sequence: Synthetic coding sequence
  source 1..2751: mol_type = other DNA
atgggcaaggctgctgcccccagccggggcggcggctgcggcggccgcagccggggcctgagcagcctcttcaccgtggtgccctgcctgagctgccacacagctgcccctggcatgtctgccagcaccagcggcagcggccctgagcccaagccccagccccagcctgtgcctgagcctgagcggggccccctgtctgagcaggtgtctgaggccgtgtctgaggccgtgcccaggtctgagcctgtgtctgagaccaccagcgagcctgagcccggggccggccagcccagcgagctgctgcagggcagccggcccggcagcgagagcagcagcggcgtgggcgccggccccttcaccaaggccgccagcgagcccctgagcagagctgtgggcagcgccaccttcctgcggcctgagagcggcagcctgcctgccctgaagcccctgcccctgctgcggcccggccaggccaagacccccctgggcgtgcccatgtctggaacaggcaccaccagcagcgcccccctggccctgctgcccctggacagctttgagggctggctgctgaagtggaccaactacctgaagggctaccagaggcgctggtttgtgctgggcaatggcctgctgagctactacagaaaccagggcgagatggcccacacctgccggggcaccatcaacctgagcacagcccacatcgacacagaggacagctgtggcatcctgctgaccagcggggcccggagctaccacctgaaggccagcagcgaggtggaccggcagcagtggatcacagccctggagctggccaaggccaaggctgtgcgggtgatgaacacccacagtgatgattctggagatgatgatgaggccaccaccccagctgacaagtctgagctgcaccacaccctgaagaacctgagcctgaagctggatgacctgagcacctgcaatgacctgattgccaagcacggggccgccctgcagaggagcctgacagagctggatggcctgaagatccccagcgagagcggggagaagctgaaggtggtgaatgaaagagccaccctcttccgcatcaccagcaatgccatgatcaatgcctgccgggacttcctggagctggccgagatccacagcaggaagtggcagagggccctgcagtatgagcaggagcagagggtgcacctggaggagaccatcgagcagctggccaagcagcacaacagcctggagcgggccttccacagcgcccctggccggcctgccaaccccagcaagagcttcatcgagggcagcctgctgacccccaagggggaggacagcgaggaggatgaggacacagagtactttgatgccatggaggacagcaccagcttcatcaccgtcatcacagaggccaaggaggacagcaggaaggccgagggcagcacaggcaccagctctgtggactggagcagcgctgacaacgtgctggatggagccagcctggtgcccaagggcagcagcaaggtgaagagaagagtgcgcatccccaacaagcccaactacagcctgaacctgtggagcatcatgaagaactgcatcggccgggagctgagccgcatccccatgcctgtgaacttcaatgagcccctgtccatgctgcagaggctgacagaggacctggagtaccaccacctgctggacaaggctgtgcactgcaccagctctgtggagcagatgtgcctggtggccgccttctctgtgtcctcctacagcaccaccgtgcacagaattgccaagcccttcaaccccatgctgggggagacctttgagctggaccggctggatgacatgggcctgcggagcctgtgtgagcaggtgagccaccacccccccagcgctgcccactacgtgttcagcaagcacggctggagcctgtggcaggagatcaccatcagcagcaagttccggggcaagtacatcagcatcatgcccctgggcgccatccacctggagttccaggccagcggcaaccactacgtgtggaggaagagcaccagcacagtgcacaacatcatcgtgggcaagctgtggattgaccagagcggggacatcgagatcgtgaaccacaagaccaatgaccgctgccagctgaagttcctgccctacagctacttcagcaaggaggccgccaggaaggtgactggagtggtgtctgacagccagggcaaggcccactacgtgctgagcggctcctgggatgagcagatggagtgcagcaaggtgatgcacagcagccccagcagccccagcagtgatggcaagcagaagacagtgtaccagaccctgagcgccaagctgctgtggaagaagtaccccctgcctgaaaatgctgagaacatgtactacttcagcgagctggccctgaccctgaatgaacatgaggagggcgtggcccccacagacagccggctgcggccagaccagaggctgatggagaagggccgctgggatgaggccaacacagagaagcagaggctggaggagaagcagaggctgagcagaagaagaaggctggaggcctgtggccctggcagcagctgcagcagcgaggaggagaaggaggctgatgcctacacccccctgtggtttgagaagaggctggaccccctgactggagagatggcctgtgtgtacaagggcggctactgggaggccaaggagaagcaggactggcacatgtgccccaacatcttctag

SEQ ID NO: 162954 - DNA, 2625 bp, synthetic construct
  misc_feature 1..2625: note = Description of Artificial Sequence: Synthetic coding sequence
  source 1..2625: mol_type = other DNA
atgggcaaggctgctgcccccagccggggcggcggctgcggcggccgcagccggggcctgagcagcctcttcaccgtggtgccctgcctgagctgccacacagctgcccctggcatgtctgccagcaccagcggcagcggccctgagcccaagccccagccccagcctgtgcctgagcctgagcggggccccctgtctgagcaggtgtctgaggccgtgtctgaggccgtgcccaggtctgagcctgtgtctgagaccaccagcgagcctgagcccggggccggccagcccagcgagctgctgcagggcagccggcccggcagcgagagcagcagcggcgtgggcgccggccccttcaccaaggccgccagcgagcccctgagcagagctgtgggcagcgccaccttcctgcggcctgagagcggcagcctgcctgccctgaagcccctgcccctgctgcggcccggccaggccaagacccccctgggcgtgcccatgtctggaacaggcaccaccagcagcgcccccctggccctgctgcccctggacagctttgagggctggctgctgaagtggaccaactacctgaagggctaccagaggcgctggtttgtgctgggcaatggcctgctgagctactacagaaaccagggcgagatggcccacacctgccggggcaccatcaacctgagcacagcccacatcgacacagaggacagctgtggcatcctgctgaccagcggggcccggagctaccacctgaaggccagcagcgaggtggaccggcagcagtggatcacagccctggagctggccaaggccaaggctgtgcgggtgatgaacacccacagtgatgattctggagatgatgatgaggccaccaccccagctgacaagtctgagctgcaccacaccctgaagaacctgagcctgaagctggatgacctgagcacctgcaatgacctgattgccaagcacggggccgccctgcagaggagcctgacagagctggatggcctgaagatccccagcgagagcggggagaagctgaaggtggtgaatgaaagagccaccctcttccgcatcaccagcaatgccatgatcaatgcctgccgggacttcctggagctggccgagatccacagcaggaagtggcagagggccctgcagtatgagcaggagcagagggtgcacctggaggagaccatcgagcagctggccaagcagcacaacagcctggagcgggccttccacagcgcccctggccggcctgccaaccccagcaagagcttcatcgagggcagcctgctgacccccaagggggaggacagcgaggaggatgaggacacagagtactttgatgccatggaggacagcaccagcttcatcaccgtcatcacagaggccaaggaggacagcaggaaggccgagggcagcacaggcaccagctctgtggactggagcagcgctgacaacgtgaacttcaatgagcccctgtccatgctgcagaggctgacagaggacctggagtaccaccacctgctggacaaggctgtgcactgcaccagctctgtggagcagatgtgcctggtggccgccttctctgtgagcagctacagcaccaccgtgcaccgcatcgccaagcccttcaaccccatgctgggggagacctttgagctggaccggctggatgacatgggcctgcggagcctgtgtgagcaggtgagccaccaccccccatctgctgcccactacgtgttcagcaagcacggctggagcctgtggcaggagatcaccatcagcagcaagttccggggcaagtacatcagcatcatgcccctgggcgccatccacctggagttccaggccagcggcaaccactacgtgtggaggaagagcaccagcacagtgcacaacatcatcgtgggcaagctgtggattgaccagagcggggacattgaaattgtgaaccacaagaccaatgaccgctgccagctgaagttcctgccctacagctacttcagcaaggaggccgccaggaaggtgactggagtggtgtctgacagccagggcaaggcccactacgtgctgagcggctcctgggatgagcagatggagtgcagcaaggtgatgcacagcagccccagcagccccagcagtgatggcaagcagaagacagtgtaccagaccctgagcgccaagctgctgtggaagaagtaccccctgcctgaaaatgctgagaacatgtactacttcagcgagctggccctgaccctgaatgagcacgaggagggcgtggcccccacagacagccggctgcggccagaccagaggctgatggagaagggccgctgggatgaggccaacacagagaagcagaggctggaggagaagcagaggctgagcagaagaagaaggctggaggcctgtggccctggcagcagctgcagcagcgaggagggggaggccggccgggagggccggcctggaggagaggagcggggggcccgggtgggcgtgccccagggccgcatccctggagagcaggccaccagcccccccaccagccccctgtgcctgcccagccgggagggcggcggctgcctgcacgccaccgtggtgtag

SEQ ID NO: 162955 - DNA, 2253 bp, synthetic construct
  misc_feature 1..2253: note = Description of Artificial Sequence: Synthetic coding sequence
  source 1..2253: mol_type = other DNA
atgcaccggcagaggaccaggaccatgagcagcctggccgccaagaggctgggcatgaacagaagacctgctggcagcggcggcggcggcggggaggccgccacctggggccaccgcttctggaggccccaggagcggcccacagacaggaaccagggcgagatggcccacacctgccggggcaccatcaacctgagcacagcccacatcgacacagaggacagctgtggcatcctgctgaccagcggggcccggagctaccacctgaaggccagcagcgaggtggaccggcagcagtggatcacagccctggagctggccaaggccaaggctgtgcgggtgatgaacacccacagtgatgacagcggagatgatgatgaggccaccaccccagctgacaagtctgagctgcaccacaccctgaagaacctgagcctgaagctggatgacctgagcacctgcaatgacctgattgccaagcatggagctgccctgcagaggagcctgacagagctggatggcctgaagatccccagcgagagcggggagaagctgaaggtggtgaatgaaagagccaccctcttccgcatcaccagcaatgccatgatcaatgcctgccgggacttcctggagctggccgagatccacagcaggaagtggcagagggccctgcagtatgagcaggagcagagggtgcacctggaggagaccatcgagcagctggccaagcagcacaacagcctggagcgggccttccacagcgcccctggccgcccagccaaccccagcaagagcttcatcgagggcagcctgctgacccccaagggagaagattctgaagaagatgaggacacagagtactttgatgccatggaggacagcaccagcttcatcaccgtcatcacagaggccaaggaggacaggaaggccgagggcagcacaggcaccagctctgtggactggagcagcgctgacaacgtgctggatggagccagcctggtgcccaagggcagcagcaaggtgaagagaagagtgcgcatccccaacaagcccaactacagcctgaacctgtggagcatcatgaagaactgcatcggccgggagctgagccgcatccccatgcctgtgaacttcaatgagcccctgtccatgctgcagaggctgacagaggacctggagtaccaccacctgctggacaaggctgtgcactgcaccagctctgtggagcagatgtgcctggtggccgccttctctgtgtcctcctacagcaccaccgtgcacagaattgccaagcccttcaaccccatgctgggggagacctttgagctggaccggctggatgacatgggcctgcggagcctgtgtgagcaggtgagccaccacccccccagcgctgcccactacgtgttcagcaagcacggctggagcctgtggcaggagatcaccatcagcagcaagttccggggcaagtacatcagcatcatgcccctgggcgccatccacctggagttccaggccagcggcaaccactacgtgtggaggaagagcaccagcacagtgcacaacatcatcgtgggcaagctgtggattgaccagagcggggacatcgagatcgtgaaccacaagaccaatgaccgctgccagctgaagttcctgccctacagctacttcagcaaggaggccgccaggaaggtgactggagtggtgtctgacagccagggcaaggcccactacgtgctgagcggctcctgggatgagcagatggagtgcagcaaggtgatgcacagcagccccagcagccccagcagtgatggcaagcagaagacagtgtaccagaccctgagcgccaagctgctgtggaagaagtaccccctgcctgaaaatgctgagaacatgtactacttcagcgagctggccctgaccctgaatgaacatgaggagggcgtggcccccacagacagccggctgcggccagaccagaggctgatggagaagggccgctgggatgaggccaacacagagaagcagaggctggaggagaagcagaggctgagcagaagaagaaggctggaggcctgtggccctggcagcagctgcagcagcgaggaggagaaggaggctgatgcctacacccccctgtggtttgagaagaggctggaccccctgactggagagatggcctgtgtgtacaagggcggctactgggaggccaaggagaagcaggactggcacatgtgccccaacatcttctag

SEQ ID NO: 162956 - DNA, 1980 bp, synthetic construct
  misc_feature 1..1980: note = Description of Artificial Sequence: Synthetic coding sequence
  source 1..1980: mol_type = other DNA
atgaagggccggggctgctgggacacagcctctgtgcgctccttctgcagcagcggctgcctgaacaagttcaagaaggatgattctggagatgatgatgaggccaccaccccagctgacaagtctgagctgcaccacaccctgaagaacctgagcctgaagctggatgacctgagcacctgcaatgacctgattgccaagcacggggccgccctgcagaggagcctgacagagctggatggcctgaagatccccagcgagagcggggagaagctgaaggtggtgaatgaaagagccaccctcttccgcatcaccagcaatgccatgatcaatgcctgccgggacttcctggagctggccgagatccacagcaggaagtggcagagggccctgcagtatgagcaggagcagagggtgcacctggaggagaccatcgagcagctggccaagcagcacaacagcctggagcgggccttccacagcgcccctggccggcctgccaaccccagcaagagcttcatcgagggcagcctgctgacccccaagggggaggacagcgaggaggatgaggacacagagtactttgatgccatggaggacagcaccagcttcatcaccgtcatcacagaggccaaggaggacagcaggaaggccgagggcagcacaggcaccagctctgtggactggagcagcgctgacaacgtgctggatggagccagcctggtgcccaagggcagcagcaaggtgaagagaagagtgcgcatccccaacaagcccaactacagcctgaacctgtggagcatcatgaagaactgcatcggccgggagctgagccgcatccccatgcctgtgaacttcaatgagcccctgtccatgctgcagaggctgacagaggacctggagtaccaccacctgctggacaaggctgtgcactgcaccagctctgtggagcagatgtgcctggtggccgccttctctgtgtcctcctacagcaccaccgtgcacagaattgccaagcccttcaaccccatgctgggggagacctttgagctggaccggctggatgacatgggcctgcggagcctgtgtgagcaggtgagccaccacccccccagcgctgcccactacgtgttcagcaagcacggctggagcctgtggcaggagatcaccatcagcagcaagttccggggcaagtacatcagcatcatgcccctgggcgccatccacctggagttccaggccagcggcaaccactacgtgtggaggaagagcaccagcacagtgcacaacatcatcgtgggcaagctgtggattgaccagagcggggacatcgagatcgtgaaccacaagaccaatgaccgctgccagctgaagttcctgccctacagctacttcagcaaggaggccgccaggaaggtgactggagtggtgtctgacagccagggcaaggcccactacgtgctgagcggctcctgggatgagcagatggagtgcagcaaggtgatgcacagcagccccagcagccccagcagtgatggcaagcagaagacagtgtaccagaccctgagcgccaagctgctgtggaagaagtaccccctgcctgaaaatgctgagaacatgtactacttcagcgagctggccctgaccctgaatgaacatgaggagggcgtggcccccacagacagccggctgcggccagaccagaggctgatggagaagggccgctgggatgaggccaacacagagaagcagaggctggaggagaagcagaggctgagcagaagaagaaggctggaggcctgtggccctggcagcagctgcagcagcgaggaggccgagaaggaggctgatgcctacacccccctgtggtttgagaagaggctggaccccctgaccggggagatggcctgtgtgtacaagggcggctactgggaggccaaggagaagcaggactggcacatgtgccccaacatcttctag

SEQ ID NO: 162957 - DNA, 1383 bp, synthetic construct
  misc_feature 1..1383: note = Description of Artificial Sequence: Synthetic coding sequence
  source 1..1383: mol_type = other DNA
atggaggacagcaccagcttcatcaccgtcatcacagaggccaaggaggacaggaaggccgagggcagcacaggcaccagctctgtggactggagcagcgctgacaacgtgctggatggagccagcctggtgcccaagggcagcagcaaggtgaagagaagagtgcgcatccccaacaagcccaactacagcctgaacctgtggagcatcatgaagaactgcatcggccgggagctgagccgcatccccatgcctgtgaacttcaatgagcccctgtccatgctgcagaggctgacagaggacctggagtaccaccacctgctggacaaggctgtgcactgcaccagctctgtggagcagatgtgcctggtggccgccttctctgtgtcctcctacagcaccaccgtgcacagaattgccaagcccttcaaccccatgctgggggagacctttgagctggaccggctggatgacatgggcctgcggagcctgtgtgagcaggtgagccaccacccccccagcgctgcccactacgtgttcagcaagcacggctggagcctgtggcaggagatcaccatcagcagcaagttccggggcaagtacatcagcatcatgcccctgggcgccatccacctggagttccaggccagcggcaaccactacgtgtggaggaagagcaccagcacagtgcacaacatcatcgtgggcaagctgtggattgaccagagcggggacatcgagatcgtgaaccacaagaccaatgaccgctgccagctgaagttcctgccctacagctacttcagcaaggaggccgccaggaaggtgactggagtggtgtctgacagccagggcaaggcccactacgtgctgagcggctcctgggatgagcagatggagtgcagcaaggtgatgcacagcagccccagcagccccagcagtgatggcaagcagaagacagtgtaccagaccctgagcgccaagctgctgtggaagaagtaccccctgcctgaaaatgctgagaacatgtactacttcagcgagctggccctgaccctgaatgaacatgaggagggcgtggcccccacagacagccggctgcggccagaccagaggctgatggagaagggccgctgggatgaggccaacacagagaagcagaggctggaggagaagcagaggctgagcagaagaagaaggctggaggcctgtggccctggcagcagctgcagcagcgaggaggagaaggaggctgatgcctacacccccctgtggtttgagaagaggctggaccccctgactggagagatggcctgtgtgtacaagggcggctactgggaggccaaggagaagcaggactggcacatgtgccccaacatcttctag

SEQ ID NO: 162958 - DNA, 2295 bp, synthetic construct
  misc_feature 1..2295: note = Description of Artificial Sequence: Synthetic coding sequence
  source 1..2295: mol_type = other DNA
atggagagagctgtgcagggcacagatggcggcggcggcagcaacagcagcagccgcagcagcagccgggccaccagcgctggcagcagccccagctgcagcctggccggccggggcgtgagcagccgctctgctgctgctggcctgggcggcggcggcagccgcagcagccctggctctgtggccgccagccccagcggcggcggcggcagaagaagagagcccgccctggagggcgtgctgagcaagtacaccaacctgctgcagggctggcagaaccgctactttgtgctggactttgaggccggcatcctgcagtactttgtgaatgagcagagcaagcaccagaagccccggggcgtgctgagcctgagcggggccatcgtgtccctgagtgatgaggccccccacatgctggtggtgtacagcgccaatggagagatgttcaagctgcgggcagcagatgccaaggagaagcagttctgggtgacccagctgcgggcctgtgccaagtaccacatggagatgaacagcaagagcgcccccagcagccgcagccgcagcctgaccctgctgccccacggcacccccaacagcgccagcccctgcagccagaggcacctgtctgtgggcgcccctggggtggtgaccatcacccaccacaagagccctgctgctgcccggcgggccaagagccagtacagcggccagctgcacgaggtgcgggagatgatgaaccaggtggagggccagcagaagaacctggtgcacgccatcgagagcctgcccggcagcggccccctgacagccctggaccaggacctgctgctgctgaaggccaccagcgctgccaccctgagctgcctgggagaatgtctgaacctgctgcagcagagcgtgcaccaggccggccagcccagccagaagccaggggccagcgagaacatcctgggctggcacggcagcaagagccacagcacagagcagctgaagaatggcaccctgggcagcctgcccagcgccagcgccaacatcacctgggccatcctgcccaacagcgcagaagatgagcagaccagccagcctgagcctgagcccaacagcggcagcgagctggtgctgtctgaagatgagaagagtgacaatgaagacaaggaggagacagagctgggcgtgatggaggaccagaggagcatcatcctgcacctgatcagccagctgaagctgggcatggacctgaccaaggtggtgctgcccaccttcatcctggagaagaggagcctgctggagatgtatgctgacttcatggcccacccagacctgctgctggccatcacagctggggccaccccagaggagagggtcatctgctttgtggagtactacctgacagccttccacgagggcaggaaaggagccctggccaagaagccctacaaccccatcattggagagaccttccactgctcctgggaggtgcccaaggacagagtgaagcccaagaggacagccagccgcagccctgccagctgccacgagcaccccatggctgatgaccccagcaagagctacaagctgcgctttgtggccgagcaggtgagccaccacccccccatcagctgcttctactgtgaatgtgaggagaagaggctgtgtgtgaacacccacgtgtggaccaagagcaagttcatgggcatgtctgtgggcgtgtccatgattggagagggcgtgctgcggctgctggagcacggggaggagtatgtgttcaccctgcccagcgcctatgcccggagcatcctgaccatcccctgggtggagctgggcggcaaggtgtccatcaactgtgccaagacaggctacagcgccaccgtcatcttccacaccaagcccttctacggcggcaaggtgcaccgggtgacagctgaggtgaagcacaaccccaccaacaccatcgtgtgcaaggcccacggggagtggaatggcaccctggagttcacctacaacaatggagagaccaaggtgattgacaccaccaccctgcctgtgtaccccaagaagatccggcccctggagaagcagggccccatggagagcaggaacctgtggagggaggtgacccgctacctgcggctgggggacattgatgctgccacagagcagaagaggcacctggaggagaagcagagggtggaggagaggaagcgggagaacctgcggaccccctggaagcccaagtacttcatccaggagggagatggctgggtgtacttcaaccccctgtggaaggcccactag

SEQ ID NO: 162959 - DNA, 2103 bp, synthetic construct
  misc_feature 1..2103: note = Description of Artificial Sequence: Synthetic coding sequence
  source 1..2103: mol_type = other DNA
atggagagagctgtgcagggcacagatggcggcggcggcagcaacagcagcagccgcagcagcagccgggccaccagcgctggcagcagccccagctgcagcctggccggccggggcgtgagcagccgctctgctgctgctggcctgggcggcggcggcagccgcagcagccctggctctgtggccgccagccccagcggcggcggcggcagaagaagagagcccgccctggagggcgtgctgagcaagtacaccaacctgctgcagggctggcagaaccgctactttgtgctggactttgaggccggcatcctgcagtactttgtgaatgagcagagcaagcaccagaagccccggggcgtgctgagcctgagcggggccatcgtgtccctgagtgatgaggccccccacatgctggtggtgtacagcgccaatggagagatgttcaagctgcgggcagcagatgccaaggagaagcagttctgggtgacccagctgcgggcctgtgccaagtaccacatggagatgaacagcaagatgatgaaccaggtggagggccagcagaagaacctggtgcacgccatcgagagcctgcccggcagcggccccctgacagccctggaccaggacctgctgctgctgaaggccaccagcgctgccaccctgagctgcctgggagaatgtctgaacctgctgcagcagagcgtgcaccaggccggccagcccagccagaagccaggggccagcgagaacatcctgggctggcacggcagcaagagccacagcacagagcagctgaagaatggcaccctgggcagcctgcccagcgccagcgccaacatcacctgggccatcctgcccaacagcgcagaagatgagcagaccagccagcctgagcctgagcccaacagcggcagcgagctggtgctgtctgaagatgagaagagtgacaatgaagacaaggaggagacagagctgggcgtgatggaggaccagaggagcatcatcctgcacctgatcagccagctgaagctgggcatggacctgaccaaggtggtgctgcccaccttcatcctggagaagaggagcctgctggagatgtatgctgacttcatggcccacccagacctgctgctggccatcacagctggggccaccccagaggagagggtcatctgctttgtggagtactacctgacagccttccacgagggcaggaaaggagccctggccaagaagccctacaaccccatcattggagagaccttccactgctcctgggaggtgcccaaggacagagtgaagcccaagaggacagccagccgcagccctgccagctgccacgagcaccccatggctgatgaccccagcaagagctacaagctgcgctttgtggccgagcaggtgagccaccacccccccatcagctgcttctactgtgaatgtgaggagaagaggctgtgtgtgaacacccacgtgtggaccaagagcaagttcatgggcatgtctgtgggcgtgtccatgattggagagggcgtgctgcggctgctggagcacggggaggagtatgtgttcaccctgcccagcgcctatgcccggagcatcctgaccatcccctgggtggagctgggcggcaaggtgtccatcaactgtgccaagacaggctacagcgccaccgtcatcttccacaccaagcccttctacggcggcaaggtgcaccgggtgacagctgaggtgaagcacaaccccaccaacaccatcgtgtgcaaggcccacggggagtggaatggcaccctggagttcacctacaacaatggagagaccaaggtgattgacaccaccaccctgcctgtgtaccccaagaagatccggcccctggagaagcagggccccatggagagcaggaacctgtggagggaggtgacccgctacctgcggctgggggacattgatgctgccacagagcagaagaggcacctggaggagaagcagagggtggaggagaggaagcgggagaacctgcggaccccctggaagcccaagtacttcatccaggagggagatggctgggtgtacttcaaccccctgtggaaggcccactag

SEQ ID NO: 162960 - DNA, 2244 bp, synthetic construct
  misc_feature 1..2244: note = Description of Artificial Sequence: Synthetic coding sequence
  source 1..2244: mol_type = other DNA
atgcagggcggggagcctgtgtccaccatgaaggtgtctgagagcgagggcaagctggagggccaggccacagctgtgacccccaacaagaacagcagctgtggcggcggcatcagcagcagcagcagcagccggggcggcagcgccaagggctggcagtacagcgaccacatggagaatgtgtatggctacctgatgaagtacaccaacctggtgacaggctggcagtaccgcttctttgtgctgaacaatgaggccggcctgctggagtactttgtgaatgagcagagcaggaaccagaagccccggggcaccctgcagctggccggggctgtgatcagccccagtgatgaggacagccacaccttcaccgtgaatgctgccagcggggagcagtacaagctgcgggccacagatgccaaggagcggcagcactgggtgtcccggctgcagatctgcacccagcaccacacagaggccatcggcaagaacaacccccccctgaagagccgctccttcagcctggccagcagcagcaacagccccatcagccagaggcggcccagccagaatgccatctccttcttcaacgtgggccacagcaagctgcagagcctgagcaagaggaccaacctgcccccagaccacctggtggaggtgcgggagatgatgagccatgctgagggccagcagagggacctgatcagaagaattgaatgtctgcccaccagcggccacctgagcagcctggaccaggacctgctgatgctgaaggccacctccatggccaccatgaactgcctgaatgactgcttccacatcctgcagctgcagcacgccagccaccagaagggcagcctgcccagcggcaccaccatcgagtggctggagcccaagatcagcctgagcaaccactacaagaatggagctgaccagccctttgccacagaccagagcaagcctgtggccgtgcctgaggagcagcctgtggccgagagcggcctgctggcccgggagcctgaggagatcaatgctgatgatgaaattgaggacacctgtgaccacaaggaggatgacctgggcgctgtggaggagcagaggagcgtcatcctgcacctgctgagccagctgaagctgggcatggacctgaccagggtggtgctgcccaccttcatcctggagaagaggagcctgctggagatgtatgctgacttcatgagccacccagacctcttcatcgccatcaccaatggagccacagctgaggacaggatgatccgctttgtggagtactacctgaccagcttccacgagggcaggaaaggagccatcgccaagaagccctacaaccccatcattggagagaccttccactgctcctggaagatgcccaagtctgaggtggccagctctgtgttcagcagcagcagcacccagggcgtgaccaaccacgcccccctgagcggggagagcctgacccaggtgggcagtgactgctacacagtgcgctttgtggccgagcaggtgagccaccacccccctgtgtctggcttctatgcagaatgtacagagaggaagatgtgtgtgaatgcccacgtgtggaccaagagcaagttcctgggcatgagcattggagtgaccatggtgggggagggcatcctgagcctgctggagcacggggaggagtacaccttcagcctgccctgtgcctatgcccggagcatcctgactgtgccctgggtggagctgggcggcaaggtgtctgtgaactgtgccaagacaggctacagcgccagcatcaccttccacaccaagcccttctacggcggcaagctgcaccgggtgacagctgaggtgaagcacaacatcaccaacacagtggtgtgccgggtgcagggcgagtggaacagcgtgctggagttcacctacagcaatggagagaccaagtatgtggacctgaccaagctggccgtgaccaagaagagggtgcggcccctggagaagcaggacccctttgagagccggcggctgtggaagaatgtgacagacagcctgcgggagagcgagattgacaaggccacagagcacaagcacaccctggaggagcggcagaggacagaggagcggcacaggacagagaccggcaccccctggaagaccaagtacttcatcaaggagggagatggctgggtgtaccacaagcccctgtggaagatcatccccaccacccagcctgctgagtag

SEQ ID NO: 162961 - DNA, 2853 bp, synthetic construct
  misc_feature 1..2853: note = Description of Artificial Sequence: Synthetic coding sequence
  source 1..2853: mol_type = other DNA
atgaacacagaagctgagcagcagctgctgcaccacgccagaaatggaaatgctgaggaggtgcggcagctgctggagaccatggccagaaatgaggtgattgctgacatcaactgcaagggccgcagcaagagcaacctgggctggacccccctgcacctggcctgctacttcggccaccggcaggtggtgcaggacctgctgaaggccggggctgaggtgaatgtgctgaatgacatgggagacacccccctgcaccgggccgccttcaccggcaggaaggagctggtgatgctgctgctggagtacaatgctgacaccaccatcgtgaatggaagtggccagacagccaaggaggtgacccatgctgaggagatccgctccatgctggaggccgtggagaggacccagcagaggaagctggaggagctgctgctggccgccgcccgggagggcaagaccacagagctgacagccctgctgaaccggcccaaccccccagatgtgaactgcagcgaccagctgggcaacacccccctgcactgtgccgcctaccgggcccacaagcagtgtgccctgaagctgctgcggagcggggctgaccccaacctgaagaacaagaatgaccagaagcccctggacctggcccagggcgctgagatgaagcacatcctggtgggcaacaaggtgatctacaaggccctgaagagatatgagggccccctgtggaagagcagccgcttcttcggctggaggctcttctgggtggtgctggagcacggcgtgctgtcctggtacaggaagcagccagatgctgtgcacaacatctaccggcagggctgcaagcacctgacccaggccgtgtgcaccgtgaagagcacagacagctgcctcttcttcatcaagtgctttgatgacaccatccacggcttccgggtgcccaagaacagcctgcagcagagccgggaggactggctggaggccatcgaggagcacagcgcctacagcacccactactgcagccaggaccagctgacagatgaggaggaggaggacacagtgtctgctgctgacctgaagaagagcctggagaaggcccagagctgccagcagaggctggaccgggagatcagcaacttcctgaagatgatcaaggaatgtgacatggccaaggagatgctgcccagcttcctgcagaaggtggaggtggtgtctgaggccagccgggagacctgtgtggccctgacagactgcctgaacctcttcaccaagcaggagggcgtgaggaacttcaagctggagcaggagcaggagaagaacaagatcctgtctgaggccctggagaccctggccacagagcaccacgagctggagcagagcctggtgaagggcagccccccagccagcatcctgtctgaagatgagttctatgatgccctgagtgacagcgagagcgagaggagcctgagccggctggaggccgtgacagcccggagctttgaggaggagggggagcacctgggcagcaggaagcacaggatgtctgaggagaaggactgtggcggcggagatgccctgagcaatggcatcaagaagcacaggaccagcctgcccagccccatgttcagcagaaatgacttcagcatctggagcatcctgaggaaatgtattggcatggagctgagcaagatcaccatgcctgtgatcttcaatgagcccctgtccttcctgcagaggctgacagagtacatggagcacacctacctgatccacaaggccagcagcctgagtgaccctgtggagaggatgcagtgtgtggccgcctttgctgtgtctgctgtggccagccagtgggagaggacaggcaagcccttcaaccccctgctgggggagacctatgagctggtgagagatgacctgggcttccgcctcatcagcgagcaggtgagccaccacccccccatcagcgccttccacgccgagggcctgaacaatgacttcatcttccacggcagcatctaccccaagctgaagttctggggcaagtctgtggaggccgagcccaagggcaccatcaccctggagctgctggagcacaatgaggcctacacctggaccaaccccacctgctgcgtgcacaacatcatcgtgggcaagctgtggattgagcagtatggaaatgtggagatcatcaaccacaagacaggagacaagtgtgtgctgaacttcaagccctgtggcctgtttgggaaggagctgcacaaggtggagggctacatccaggacaagagcaagaagaagctgtgtgccctgtatggcaagtggacagaatgtctgtacagcgtggaccctgccacctttgatgcctacaagaagaatgacaagaagaacacagaggagaagaagaacagcaagcagatgagcaccagcgaggagctggatgagatgcctgtgcctgattctgagagcgtcttcatcatccctggctctgtgctgctgtggagaattgccccccggccccccaacagcgcccagatgtacaacttcaccagctttgccatggtgctgaatgaggtggacaaggacatggagagcgtcatccccaagacagactgccgcctgcggccagacatccgggccatggagaatggagaaattgaccaggccagcgaggagaagaagaggctggaggagaagcagagagctgccaggaagaacagaagcaagtctgaggaggactggaagacccgctggttccaccagggccccaacccctacaatggagcccaggactggatctacagcggcagctactgggacaggaactacttcaacctgcctgacatctactag

SEQ ID NO: 162962 - DNA, 1707 bp, synthetic construct
  misc_feature 1..1707: note = Description of Artificial Sequence: Synthetic coding sequence
  source 1..1707: mol_type = other DNA
atgatcaaggaatgtgacatggccaaggagatgctgcccagcttcctgcagaaggtggaggtggtgtctgaggccagccgggagacctgtgtggccctgacagactgcctgaacctcttcaccaagcaggagggcgtgaggaacttcaagctggagcaggagcaggagaagaacaagatcctgtctgaggccctggagaccctggccacagagcaccacgagctggagcagagcctggtgaagggcagccccccagccagcatcctgtctgaagatgagttctatgatgccctgagtgacagcgagagcgagaggagcctgagccggctggaggccgtgacagcccggagctttgaggaggagggggagcacctgggcagcaggaagcacaggatgtctgaggagaaggactgtggcggcggagatgccctgagcaatggcatcaagaagcacaggaccagcctgcccagccccatgttcagcagaaatgacttcagcatctggagcatcctgaggaaatgtattggcatggagctgagcaagatcaccatgcctgtgatcttcaatgagcccctgtccttcctgcagaggctgacagagtacatggagcacacctacctgatccacaaggccagcagcctgagtgaccctgtggagaggatgcagtgtgtggccgcctttgctgtgtctgctgtggccagccagtgggagaggacaggcaagcccttcaaccccctgctgggggagacctatgagctggtgagagatgacctgggcttccgcctcatcagcgagcaggtgagccaccacccccccatcagcgccttccacgccgagggcctgaacaatgacttcatcttccacggcagcatctaccccaagctgaagttctggggcaagtctgtggaggccgagcccaagggcaccatcaccctggagctgctggagcacaatgaggcctacacctggaccaaccccacctgctgcgtgcacaacatcatcgtgggcaagctgtggattgagcagtatggaaatgtggagatcatcaaccacaagacaggagacaagtgtgtgctgaacttcaagccctgtggcctgtttgggaaggagctgcacaaggtggagggctacatccaggacaagagcaagaagaagctgtgtgccctgtatggcaagtggacagaatgtctgtacagcgtggaccctgccacctttgatgcctacaagaagaatgacaagaagaacacagaggagaagaagaacagcaagcagatgagcaccagcgaggagctggatgagatgcctgtgcctgattctgagagcgtcttcatcatccctggctctgtgctgctgtggagaattgccccccggccccccaacagcgcccagatgtacaacttcaccagctttgccatggtgctgaatgaggtggacaaggacatggagagcgtcatccccaagacagactgccgcctgcggccagacatccgggccatggagaatggagaaattgaccaggccagcgaggagaagaagaggctggaggagaagcagagagctgccaggaagaacagaagcaagtctgaggaggactggaagacccgctggttccaccagggccccaacccctacaatggagcccaggactggatctacagcggcagctactgggacaggaactacttcaacctgcctgacatctactag

SEQ ID NO: 162963 - DNA, 303 bp, synthetic construct
  misc_feature 1..303: note = Description of Artificial Sequence: Synthetic coding sequence
  source 1..303: mol_type = other DNA
atgaacacagaagctgagcagcagctgctgcaccacgccagaaatggaaatgctgaggaggtgcggcagctgctggagaccatggccagaaatgaggtgattgctgacatcaactgcaagggccgcagcaagagcaacctgggctggacccccctgcacctggcctgctacttcggccaccggcaggtggtgcaggacctgctgaaggccggggctgaggtgaatgtgctgaatgacatgggagacacccccctgcaccgggccgccttcaccggcaggaagatctgcagccagggcagctag

SEQ ID NO: 162964 - DNA, 1314 bp, synthetic construct
  misc_feature 1..1314: note = Description of Artificial Sequence: Synthetic coding sequence
  source 1..1314: mol_type = other DNA
atgtctgaggagaaggactgtggcggcggagatgccctgagcaatggcatcaagaagcacaggaccagcctgcccagccccatgttcagcagaaatgacttcagcatctggagcatcctgaggaagtgcatcggcatggagctgagcaagatcaccatgcctgtgatcttcaatgagcccctgtccttcctgcagaggctgacagagtacatggagcacacctacctgatccacaaggccagcagcctgagtgaccctgtggagaggatgcagtgtgtggccgcctttgctgtgtctgctgtggccagccagtgggagaggacaggcaagcccttcaaccccctgctgggggagacctatgagctggtgagagatgacctgggcttccgcctcatcagcgagcaggtgagccaccacccccccatcagcgccttccacgccgagggcctgaacaatgacttcatcttccacggcagcatctaccccaagctgaagttctggggcaagtctgtggaggccgagcccaagggcaccatcaccctggagctgctggagcacaatgaggcctacacctggaccaaccccacctgctgcgtgcacaacatcatcgtgggcaagctgtggattgagcagtatggaaatgtggagatcatcaaccacaagacaggagacaagtgtgtgctgaacttcaagccctgtggcctgtttgggaaggagctgcacaaggtggagggctacatccaggacaagagcaagaagaagctgtgtgccctgtatggcaagtggacagagtgcctgtacagcgtggaccctgccacctttgatgcctacaagaagaatgacaagaagaacacagaggagaagaagaacagcaagcagatgagcaccagcgaggagctggatgagatgcctgtgcctgacagcgagagcgtcttcatcatccctggctctgtgctgctgtggagaattgcccccaggcctcccaacagcgcccagatgtacaacttcaccagctttgccatggtgctgaatgaggtggacaaggacatggagagcgtcatccccaagacagactgccgcctgcggccagacatccgggccatggagaatggagaaattgaccaggccagcgaggagaagaagaggctggaggagaagcagagagctgccaggaagaacagaagcaagtctgaggaggactggaagacccgctggttccaccagggccccaacccctacaacggggcccaggactggatctacagcggcagctactgggacaggaactacttcaacctgcctgacatctactag

SEQ ID NO: 162965 - DNA, 345 bp, synthetic construct
  misc_feature 1..345: note = Description of Artificial Sequence: Synthetic coding sequence
  source 1..345: mol_type = other DNA
atgcagagcgtggccgcctttgctgtgtctgctgtggccagccagtgggagaggacaggcaagcccttcaaccccctgctgggggagacctatgagctgatccgggaggacctgggcttccgcttcatcagcgagcaggtgagccaccacccccccatcagcgccttccacagcgagggcctgaaccacgacttcctgttccacggcagcatctaccccaagctgaagttctggggcaagtctgtggaggccgagccccggggcaccatcaccctggagctgctgaatgtgaaccagaggcacctgcgggccaagcacaagagccccaccaatgccggccgctag

SEQ ID NO: 162966 - DNA, 1443 bp, synthetic construct
  misc_feature 1..1443: note = Description of Artificial Sequence: Synthetic coding sequence
  source 1..1443: mol_type = other DNA
atgaatggagaggaggagttctttgatgctgtgacaggctttgacagcgacaacagcagcggggagttcagcgaggccaaccagaaggtgacaggcatgattgacctggacaccagcaagaacaaccgcatcggcaagacaggagagcggcccagccaggagaatggcatccagaagcacaggaccagcctgcctgcccccatgttcagcagaagtgacttctctgtgtggaccatcctgaagaagtgtgtgggcctggagctgagcaagatcaccatgcccatcgccttcaatgagcccctgtccttcctgcagaggatcacagagtacatggagcacgtgtacctgatccaccgggccagctgccagccccagcccctggagaggatgcagagcgtggccgcctttgctgtgtctgctgtggccagccagtgggagaggacaggcaagcccttcaaccccctgctgggggagacctatgagctgatccgggaggacctgggcttccgcttcatcagcgagcaggtgagccaccacccccccatcagcgccttccacagcgagggcctgaaccacgacttcctgttccacggcagcatctaccccaagctgaagttctggggcaagtctgtggaggccgagccccggggcaccatcaccctggagctgctgaagcacaatgaggcctacacctggaccaaccccacctgctgcgtgcacaacgtcatcatcggcaagctgtggattgagcagtatggcaccgtggagatcctgaaccacaggacaggccacaagtgtgtgctgcacttcaagccctgtggcctgtttgggaaggagctgcacaaggtggagggccacatccaggacaagaacaagaagaagctgttcatgatctacggcaagtggacagagtgcctgtggggcattgatcctgtgtcctatgagagcttcaagaagcaggagcggcggggggaccacctgaggaaggccaagctggatgaggacagcggcaaggctgacagtgatgtggctgatgatgtgcctgtggcccaggagaccgtgcaggtgattcctggcagcaagctgctgtggaggatcaacacccggccccccaacagcgcccagatgtacaacttcaccagcttcaccgtgtccctgaatgagctggagaccggcatggagaagaccctgcccccaacagactgccgcctgcggccagacatccggggcatggagaatggaaacatggacctggccagccaggagaaggagcggctggaggagaagcagcgggaggcccggcgggagcgggccaaggaggaggccgagtggcagacccgctggttctacccaggcaacaacccctacacaggcaccccagactggctgtatgctggggactactttgaaagaaacttcagtgactgcccagacatctactag

SEQ ID NO: 162967 - DNA, 1407 bp, synthetic construct
  misc_feature 1..1407: note = Description of Artificial Sequence: Synthetic coding sequence
  source 1..1407: mol_type = other DNA
atgaatggagaggaggagttctttgatgctgtgacagaggccaaccagaaggtgacaggcatgattgacctggacaccagcaagaacaaccgcatcggcaagacaggagagcggcccagccaggagaatggcatccagaagcacaggaccagcctgcctgcccccatgttcagcagaagtgacttctctgtgtggaccatcctgaagaagtgtgtgggcctggagctgagcaagatcaccatgcccatcgccttcaatgagcccctgtccttcctgcagaggatcacagagtacatggagcacgtgtacctgatccaccgggccagctgccagccccagcccctggagaggatgcagagcgtggccgcctttgctgtgtctgctgtggccagccagtgggagaggacaggcaagcccttcaaccccctgctgggggagacctatgagctgatccgggaggacctgggcttccgcttcatcagcgagcaggtgagccaccacccccccatcagcgccttccacagcgagggcctgaaccacgacttcctgttccacggcagcatctaccccaagctgaagttctggggcaagtctgtggaggccgagccccggggcaccatcaccctggagctgctgaagcacaatgaggcctacacctggaccaaccccacctgctgcgtgcacaacgtcatcatcggcaagctgtggattgagcagtatggcaccgtggagatcctgaaccacaggacaggccacaagtgtgtgctgcacttcaagccctgtggcctgtttgggaaggagctgcacaaggtggagggccacatccaggacaagaacaagaagaagctgttcatgatctacggcaagtggacagagtgcctgtggggcattgatcctgtgtcctatgagagcttcaagaagcaggagcggcggggggaccacctgaggaaggccaagctggatgaggacagcggcaaggctgacagtgatgtggctgatgatgtgcctgtggcccaggagaccgtgcaggtgattcctggcagcaagctgctgtggaggatcaacacccggccccccaacagcgcccagatgtacaacttcaccagcttcaccgtgtccctgaatgagctggagaccggcatggagaagaccctgcccccaacagactgccgcctgcggccagacatccggggcatggagaatggaaacatggacctggccagccaggagaaggagcggctggaggagaagcagcgggaggcccggcgggagcgggccaaggaggaggccgagtggcagacccgctggttctacccaggcaacaacccctacacaggcaccccagactggctgtatgctggggactactttgaaagaaacttcagtgactgcccagacatctactag

SEQ ID NO: 162968 - DNA, 1113 bp, synthetic construct
  misc_feature 1..1113: note = Description of Artificial Sequence: Synthetic coding sequence
  source 1..1113: mol_type = other DNA
atgcccatcgccttcaatgagcccctgtccttcctgcagaggatcacagagtacatggagcacgtgtacctgatccaccgggccagctgccagccccagcccctggagaggatgcagagcgtggccgcctttgctgtgtctgctgtggccagccagtgggagaggacaggcaagcccttcaaccccctgctgggggagacctatgagctgatccgggaggacctgggcttccgcttcatcagcgagcaggtgagccaccacccccccatcagcgccttccacagcgagggcctgaaccacgacttcctgttccacggcagcatctaccccaagctgaagttctggggcaagtctgtggaggccgagccccggggcaccatcaccctggagctgctgaagcacaatgaggcctacacctggaccaaccccacctgctgcgtgcacaacgtcatcatcggcaagctgtggattgagcagtatggcaccgtggagatcctgaaccacaggacaggccacaagtgtgtgctgcacttcaagccctgtggcctgtttgggaaggagctgcacaaggtggagggccacatccaggacaagaacaagaagaagctgttcatgatctacggcaagtggacagagtgcctgtggggcattgatcctgtgtcctatgagagcttcaagaagcaggagcggcggggggaccacctgaggaaggccaagctggatgaggacagcggcaaggctgacagtgatgtggctgatgatgtgcctgtggcccaggagaccgtgcaggtgattcctggcagcaagctgctgtggaggatcaacacccggccccccaacagcgcccagatctggccagccaggagaagaagtggctggaggaggagccgggagaagcacggcggcagcggcccccggcggcggcagagcggccggcggggcggcagcacccaggccatcacccccaccctgggcccccccaccggctgcatgcagggcatcaccctgagcggcatcagccccacagcccagatcagcacagagggcctggagggccctggggcccgggaccggcggctgacccggctggacttcctggagtggcccctgtag

SEQ ID NO: 162969 - DNA, 339 bp, synthetic construct
  misc_feature 1..339: note = Description of Artificial Sequence: Synthetic coding sequence
  source 1..339: mol_type = other DNA
tctgtggccgcctttgctgtgtctgctgtggccagccagtgggagaggacaggcaagcccttcaaccccctgctgggggagacctatgagctgatccgggaggacctgggcttccgcttcatcagcgagcaggtgagccaccacccccccatcagcgccttccacagcgagggcctgaaccacgacttcctgttccacggcagcatctaccccaagctgaagttctggggcaagtctgtggaggccgagccccggggcaccatcaccctggagctgctgaatgtgaaccagaggcacctgcgggccaagcacaagagccccaccaatgccggccgctag

SEQ ID NO: 162970 - DNA, 2664 bp, synthetic construct
  misc_feature 1..2664: note = Description of Artificial Sequence: Synthetic coding sequence
  source 1..2664: mol_type = other DNA
atgatgtctgatgagaagaacctgggcgtgtcccagaagctggtgagccccagccgcagcaccagcagctgcagcagcaagcagggcagccggcaggacagctgggaggtggtggagggcctgcggggggagatgaactacacccaggagccccctgtgcagaagggcttcctgctgaagaagaggaagtggcccctgaagggctggcacaagcgcttcttctacctggacaagggcatcctgaagtatgccaagagccagacagacatcgagcgggagaagctgcacggctgcattgatgtgggcctgtctgtgatgtctgtgaagaagagcagcaaatgtattgacctggacacagaggagcacatctaccacctgaaggtgaagtctgaggaggtgtttgatgagtgggtgtccaagctgcggcaccacaggatgtaccggcagaatgagatcgccatgttcccccatgaggtgaaccacttcttcagcggcagcaccatcacagacagcagcagtggagtgtttgacagcatcagcagcaggaagaggagcagcatcagcaagcagaacctcttccagacaggcagcaatgtgtccttcagctgtggcggggagaccagggtgcccctgtggctgcagagcagcgaggacatggagaagtgcagcaaggacctggcccactgccacgcctacctggtggagatgagccagctgctgcagagcatggatgtgctgcacaggacctacagcgccccagccatcaatgccatccagggcggcagctttgagagccccaagaaggagaagaggagccaccggcgctggaggagccgggccatcggcaaggatgccaagggcaccctgcaggtgcccaagcccttcagcggccctgtgcggctgcacagcagcaaccccaacctgagcaccctggactttggagaggagaagaactacagtgatggcagcgagaccagcagcgagttcagcaagatgcaggaggacctgtgccacatcgcccacaaggtgtacttcaccctgcggagcgccttcaacatcatgtctgctgagcgggagaagctgaagcagctgatggagcaggatgccagcagcagccccagcgcccaggtgattggcctgaagaatgccctgagcagcgccctggcccagaacacagacctgaaggagcggctgcggcgcatccatgctgagagcctgctgctggacagccctgctgtggccaagagcggggacaacctggccgaggagaacagcagagatgagaacagagccctggtgcaccagctgagcaatgaaagccggctgagcatcacagacagcctgtctgagttctttgatgcccaggaggtgctgctgagccccagcagcagtgaaaatgagatcagtgatgatgacagctatgtgtctgacatcagtgacaacctgagcctggacaacctgagcaatgacctggacaatgaaaggcagaccctgggccctgtgctggacagcggccgggaggccaagagcagaagaaggacctgcctgcctgccccctgccccagcagcagcaacatcagcctgtggaacatcctgaggaacaacatcggcaaggacctgagcaaggtggccatgcctgtggagctgaatgagcccctgaacaccctgcagaggctgtgtgaggagctggagtacagcgagctgctggacaaggccgcccagatccccagccccctggagaggatggtgtatgtggccgcctttgccatcagcgcctatgccagcagctactaccgggccggcagcaagcccttcaaccctgtgctgggggagacctatgagtgcatccgggaggacaagggcttccagttcttcagcgagcaggtgagccaccacccccccatcagcgcctgccacgccgagagcaggaactttgtgttctggcaggatgtgcgctggaagaacaagttctggggcaagtccatggagatcgtgcccatcggcaccacccacgtgaccctgcctgtgtttggagaccactttgagtggaacaaggtgaccagctgcatccacaacatcctgagcggccagcgctggattgagcactatggagagatcgtcatcaagaacctgcatgatgacagctgctactgcaaggtgaacttcatcaaggccaagtactggagcaccaatgcccatgaaattgagggcaccgtgtttgacagaagtggcaaggctgtgcaccggctgtttgggaagtggcatgagagcatctactgcggcggcggcagcagcagcgcctgtgtgtggagggccaaccccatgcccaagggctatgagcagtactacagcttcacccagtttgccctggagctgaatgagatggaccccagcagcaagagcctgctgcccccaacagacacccgcttccggccagaccagcgcttcctggaggagggcaacctggaggaggccgagatccagaagcagagaattgagcagctgcagcgggagcggcggcgggtgctggaggagaaccacgtggagcaccagccccgcttcttcaggaagagtgatgatgacagctgggtgtccaatggcacctacctggagctgaggaaggacctgggcttcagcaagctggaccaccctgtgctgtggtag

SEQ ID NO: 162971 - DNA, 2571 bp, synthetic construct
  misc_feature 1..2571: note = Description of Artificial Sequence: Synthetic coding sequence
  source 1..2571: mol_type = other DNA
atgatgtctgatgagaagaacctgggcgtgtcccagaagctggtgagccccagccgcagcaccagcagctgcagcagcaagcagggcagccggcaggacagctgggaggtggtggagggcctgcggggggagatgaactacacccaggagccccctgtgcagaagggcttcctgctgaagaagaggaagtggcccctgaagggctggcacaagcgcttcttctacctggacaagggcatcctgaagtatgccaagagccagacagacatcgagcgggagaagctgcacggctgcattgatgtgggcctgtctgtgatgtctgtgaagaagagcagcaaatgtattgacctggacacagaggagcacatctaccacctgaaggtgaagtctgaggaggtgtttgatgagtgggtgtccaagctgcggcaccacaggatgtaccggcagaatgagatcgccatgttcccccatgaggtgaaccacttcttcagcggcagcaccatcacagacagcagcagtggagtgtttgacagcatcagcagcaggaagaggagcagcatcagcaagcagaacctcttccagacaggcagcaatgtgtccttcagctgtggcggggagaccagggtgcccctgtggctgcagagcagcgaggacatggagaagtgcagcaaggacctggcccactgccacgcctacctggtggagatgagccagctgctgcagagcatggatgtgctgcacaggacctacagcgccccagccatcaatgccatccaggtgcccaagcccttcagcggccctgtgcggctgcacagcagcaaccccaacctgagcaccctggactttggagaggagaagaactacagtgatggcagcgagaccagcagcgagttcagcaagatgcaggaggacctgtgccacatcgcccacaaggtgtacttcaccctgcggagcgccttcaacatcatgtctgctgagcgggagaagctgaagcagctgatggagcaggatgccagcagcagccccagcgcccaggtgattggcctgaagaatgccctgagcagcgccctggcccagaacacagacctgaaggagcggctgcggcgcatccacgccgagagcctgctgctggacagccctgctgtggccaagagcggggacaacctggccgaggagaacagcagagatgaaaatagagccctggtgcaccagctgagcaatgaaagccggctgagcatcacagacagcctgtctgagttctttgatgcccaggaggtgctgctgagccccagcagcagtgaaaatgagatcagtgatgatgacagctatgtgtctgacatcagtgacaacctgagcctggacaacctgagcaatgacctggacaatgaaaggcagaccctgggccctgtgctggacagcggccgggaggccaagagcagaagaaggacctgcctgcctgccccctgccccagcagcagcaacatcagcctgtggaacatcctgaggaacaacatcggcaaggacctgagcaaggtggccatgcctgtggagctgaatgagcccctgaacaccctgcagaggctgtgtgaggagctggagtacagcgagctgctggacaaggccgcccagatccccagccccctggagaggatggtgtatgtggccgcctttgccatcagcgcctatgccagcagctactacagagctggcagcaagcccttcaaccctgtgctgggggagacctatgagtgcatcagagaagataaaggcttccagttcttcagcgagcaggtgagccaccacccccccatcagcgcctgccacgccgagagcaggaactttgtgttctggcaggatgtgcgctggaagaacaagttctggggcaagtccatggagatcgtgcccatcggcaccacccacgtgaccctgcctgtgtttggagaccactttgagtggaacaaggtgaccagctgcatccacaacatcctgagcggccagcgctggattgagcactacggggagatcgtcatcaagaacctgcatgatgacagctgctactgcaaggtgaacttcatcaaggccaagtactggagcaccaatgcccacgagattgagggcaccgtgtttgacagaagtggcaaggctgtgcaccggctgtttgggaagtggcatgagagcatctactgcggcggcggcagcagcagcgcctgtgtgtggagggccaaccccatgcccaagggctatgagcagtactacagcttcacccagtttgccctggagctgaatgagatggaccccagcagcaagagcctgctgcccccaacagacacccgcttccggccagaccagcgcttcctggaggagggcaacctggaggaggccgagatccagaagcagagaattgagcagctgcagcgggagaggagaagagtgctggaggagaaccacgtggagcaccagccccgcttcttcaggaagagtgatgatgacagctgggtgtccaatggcacctacctggagctgaggaaggacctgggcttcagcaagctggaccaccctgtgctgtggtag

SEQ ID NO: 162972 - DNA, 2556 bp, synthetic construct
  misc_feature 1..2556: note = Description of Artificial Sequence: Synthetic coding sequence
  source 1..2556: mol_type = other DNA
atgatgtctgatgagaagaacctgggcgtgtcccagaagctggtgagccccagccgcagcaccagcagctgcagcagcaagcagggcagccggcaggacagctgggaggtggtggagggcctgcggggggagatgaactacacccaggagccccctgtgcagaagggcttcctgctgaagaagaggaagtggcccctgaagggctggcacaagcgcttcttctacctggacaagggcatcctgaagtatgccaagagccagacagacatcgagcgggagaagctgcacggctgcattgatgtgggcctgtctgtgatgtctgtgaagaagagcagcaaatgtattgacctggacacagaggagcacatctaccacctgaaggtgaagtctgaggaggtgtttgatgagtgggtgtccaagctgcggcaccacaggatgtaccggcagaatgagatcgccatgttcccccatgaggtgaaccacttcttcagcggcagcaccatcacagacagcagcagtggagtgtttgacagcatcagcagcaggaagaggagcagcatcagcaagcagaacctcttccagacaggcagcaatgtgtccttcagctgtggcggggagaccagggtgcccctgtggctgcagagcagcgaggacatggagaagtgcagcaaggacctggcccactgccacgcctacctggtggagatgagccagctgctgcagagcatggatgtgctgcacaggacctacagcgccccagccatcaatgccatccagggcggcagctttgagagccccaagaaggagaagaggagccaccggcgctggaggagccgggccatcggcaaggatgccaagggcaccctgcaggtgcccaagcccttcagcggccctgtgcggctgcacagcagcaaccccaacctgagcaccctggactttggagaggagaagaactacagtgatggcagcgagaccagcagcgagttcagcaagatgcaggaggacctgtgccacatcgcccacaaggtgtacttcaccctgcggagcgccttcaacatcatgtctgctgagcgggagaagctgaagcagctgatggagcaggatgccagcagcagccccagcgcccaggtgattggcctgaagaatgccctgagcagcgagaacagcagagatgagaacagagccctggtgcaccagctgagcaatgaaagccggctgagcatcacagacagcctgtctgagttctttgatgcccaggaggtgctgctgagccccagcagcagtgaaaatgagatcagtgatgatgacagctatgtgtctgacatcagtgacaacctgagcctggacaacctgagcaatgacctggacaatgaaaggcagaccctgggccctgtgctggacagcggccgggaggccaagagcagaagaaggacctgcctgcctgccccctgccccagcagcagcaacatcagcctgtggaacatcctgaggaacaacatcggcaaggacctgagcaaggtggccatgcctgtggagctgaatgagcccctgaacaccctgcagaggctgtgtgaggagctggagtacagcgagctgctggacaaggccgcccagatccccagccccctggagaggatggtgtatgtggccgcctttgccatcagcgcctatgccagcagctactaccgggccggcagcaagcccttcaaccctgtgctgggggagacctatgagtgcatccgggaggacaagggcttccagttcttcagcgagcaggtgagccaccacccccccatcagcgcctgccacgccgagagcaggaactttgtgttctggcaggatgtgcgctggaagaacaagttctggggcaagtccatggagatcgtgcccatcggcaccacccacgtgaccctgcctgtgtttggagaccactttgagtggaacaaggtgaccagctgcatccacaacatcctgagcggccagcgctggattgagcactatggagagatcgtcatcaagaacctgcatgatgacagctgctactgcaaggtgaacttcatcaaggccaagtactggagcaccaatgcccatgaaattgagggcaccgtgtttgacagaagtggcaaggctgtgcaccggctgtttgggaagtggcatgagagcatctactgcggcggcggcagcagcagcgcctgtgtgtggagggccaaccccatgcccaagggctatgagcagtactacagcttcacccagtttgccctggagctgaatgagatggaccccagcagcaagagcctgctgcccccaacagacacccgcttccggccagaccagcgcttcctggaggagggcaacctggaggaggccgagatccagaagcagagaattgagcagctgcagcgggagcggcggcgggtgctggaggagaaccacgtggagcaccagccccgcttcttcaggaagagtgatgatgacagctgggtgtccaatggcacctacctggagctgaggaaggacctgggcttcagcaagctggaccaccctgtgctgtggtag

SEQ ID NO: 162973 - DNA, 2556 bp, synthetic construct; identical to SEQ ID NO: 162972
  misc_feature 1..2556: note = Description of Artificial Sequence: Synthetic coding sequence
  source 1..2556: mol_type = other DNA

SEQ ID NO: 162974 - DNA, 2571 bp, synthetic construct; identical to SEQ ID NO: 162971
  misc_feature 1..2571: note = Description of Artificial Sequence: Synthetic coding sequence
  source 1..2571: mol_type = other DNA

SEQ ID NO: 162975 - DNA, 2463 bp, synthetic construct
  misc_feature 1..2463: note = Description of Artificial Sequence: Synthetic coding sequence
  source 1..2463: mol_type = other DNA
atgatgtctgatgagaagaacctgggcgtgtcccagaagctggtgagccccagccgcagcaccagcagctgcagcagcaagcagggcagccggcaggacagctgggaggtggtggagggcctgcggggggagatgaactacacccaggagccccctgtgcagaagggcttcctgctgaagaagaggaagtggcccctgaagggctggcacaagcgcttcttctacctggacaagggcatcctgaagtatgccaagagccagacagacatcgagcgggagaagctgcacggctgcattgatgtgggcctgtctgtgatgtctgtgaagaagagcagcaaatgtattgacctggacacagaggagcacatctaccacctgaaggtgaagtctgaggaggtgtttgatgagtgggtgtccaagctgcggcaccacaggatgtaccggcagaatgagatcgccatgttcccccatgaggtgaaccacttcttcagcggcagcaccatcacagacagcagcagtggagtgtttgacagcatcagcagcaggaagaggagcagcatcagcaagcagaacctcttccagacaggcagcaatgtgtccttcagctgtggcggggagaccagggtgcccctgtggctgcagagcagcgaggacatggagaagtgcagcaaggacctggcccactgccacgcctacctggtggagatgagccagctgctgcagagcatggatgtgctgcacaggacctacagcgccccagccatcaatgccatccaggtgcccaagcccttcagcggccctgtgcggctgcacagcagcaaccccaacctgagcaccctggactttggagaggagaagaactacagtgatggcagcgagaccagcagcgagttcagcaagatgcaggaggacctgtgccacatcgcccacaaggtgtacttcaccctgcggagcgccttcaacatcatgtctgctgagcgggagaagctgaagcagctgatggagcaggatgccagcagcagccccagcgcccaggtgattggcctgaagaatgccctgagcagcgagaacagcagagatgaaaatagagccctggtgcaccagctgagcaatgaaagccggctgagcatcacagacagcctgtctgagttctttgatgcccaggaggtgctgctgagccccagcagcagtgaaaatgagatcagtgatgatgacagctatgtgtctgacatcagtgacaacctgagcctggacaacctgagcaatgacctggacaatgaaaggcagaccctgggccctgtgctggacagcggccgggaggccaagagcagaagaaggacctgcctgcctgccccctgccccagcagcagcaacatcagcctgtggaacatcctgaggaacaacatcggcaaggacctgagcaaggtggccatgcctgtggagctgaatgagcccctgaacaccctgcagaggctgtgtgaggagctggagtacagcgagctgctggacaaggccgcccagatccccagccccctggagaggatggtgtatgtggccgcctttgccatcagcgcctatgccagcagctactacagagctggcagcaagcccttcaaccctgtgctgggggagacctatgagtgcatcagagaagataaaggcttccagttcttcagcgagcaggtgagccaccacccccccatcagcgcctgccacgccgagagcaggaactttgtgttctggcaggatgtgcgctggaagaacaagttctggggcaagtccatggagatcgtgcccatcggcaccacccacgtgaccctgcctgtgtttggagaccactttgagtggaacaaggtgaccagctgcatccacaacatcctgagcggccagcgctggattgagcactacggggagatcgtcatcaagaacctgcatgatgacagctgctactgcaaggtgaacttcatcaaggccaagtactggagcaccaatgcccacgagattgagggcaccgtgtttgacagaagtggcaaggctgtgcaccggctgtttgggaagtggcatgagagcatctactgcggcggcggcagcagcagcgcctgtgtgtggagggccaaccccatgcccaagggctatgagcagtactacagcttcacccagtttgccctggagctgaatgagatggaccccagcagcaagagcctgctgcccccaacagacacccgcttccggccagaccagcgcttcctggaggagggcaacctggaggaggccgagatccagaagcagagaattgagcagctgcagcgggagaggagaagagtgctggaggagaaccacgtggagcaccagccccgcttcttcaggaagagtgatgatgacagctgggtgtccaatggcacctacctggagctgaggaaggacctgggcttcagcaagctggaccaccctgtgctgtggtag

SEQ ID NO: 162976 - DNA, 339 bp, synthetic construct
  misc_feature 1..339: note = Description of Artificial Sequence: Synthetic coding sequence
  source 1..339: mol_type = other DNA
atgatgtctgatgagaagaacctgggcgtgtcccagaagctggtgagccccagccgcagcaccagcagctgcagcagcaagcagggcagccggcaggacagctgggaggtggtggagggcctgcggggggagatgaactacacccaggagccccctgtgcagaagggcttcctgctgaagaagaggaagtggcccctgaagggctggcacaagcgcttcttctacctggacaagggcatcctgaagtatgccaagagccagacagacatcgagcgggagaagctgcacggctgcattgatgtgggcctgtctgtgatgtctgtgaagaagagcagctag

SEQ ID NO: 162977 - DNA, 186 bp, synthetic construct
  misc_feature 1..186: note = Description of Artificial Sequence: Synthetic coding sequence
  source 1..186: mol_type = other DNA
atgatgtctgatgagaagaacctgggcgtgtcccagaagctggtgagccccagccgcagcaccagcagctgcagcagcaagcagggcagccggcaggacagctgggaggtggtggagggcctgcggggggagatgaactacacccaggagccccctgtgcagaagggcttcctgctgaagaagtag

SEQ ID NO: 162978 - DNA, 2463 bp, synthetic construct; identical to SEQ ID NO: 162975
  misc_feature 1..2463: note = Description of Artificial Sequence: Synthetic coding sequence
  source 1..2463: mol_type = other DNA

SEQ ID NO: 162979 - DNA, 270 bp, synthetic construct
  misc_feature 1..270: note = Description of Artificial Sequence: Synthetic coding sequence
  source 1..270: mol_type = other DNA
atgatgtctgatgagaagaacctgggcgtgtcccagaagctggtgagccccagccgcagcaccagcagctgcagcagcaagcagggcagccggcaggacagctgggaggtggtggagggcctgcggggggagatgaactacacccaggagccccctgtgcagaagggcttcctgctgaagaagaggaagtggcccctgaagggctggcacaagcgcttcttctacctggacaagggcatcctgaagtatgccaagagccagacagactag

SEQ ID NO: 162980 - DNA, 2640 bp, synthetic construct
  misc_feature 1..2640: note = Description of Artificial Sequence: Synthetic coding sequence
  source 1..2640: mol_type = other DNA
atgaaggaggaggccttcctgcggcggcgcttcagcctgtgcccccccagcagcaccccccagaaggtggaccccaggaagctgaccaggaacctgctgctgagcggggacaatgagctgtaccccctgagccctgggaaggacatggagcccaacggccccagcctgcccagagatgagggcccccccacccccagcagcgccaccaaggtgcccccagctgagtaccgcctgtgcaatggaagtgacaaggaatgtgtgagccccacagcccgggtgaccaagaaggagaccctgaaggcccagaaggagaactaccggcaggagaagaagagggccacccggcagctgctgagcgccctgacagaccccagcgtggtgatcatggctgacagcctgaagatccggggcaccctgaagtcctggaccaagctgtggtgtgtgctgaagccaggagtgctgctgatctacaagacccccaaggtgggccagtgggtgggcaccgtgctgctgcactgctgtgagctgattgagcggcccagcaagaaggatggcttctgcttcaagctgttccaccccctggaccagagcgtgtgggccgtgaagggccccaagggggagagcgtgggcagcatcacccagcccctgcccagcagctacctgatcttccgggccgccagcgagagtgatggccgctgctggctggatgccctggagctggccctgcgctgcagcagcctgctgcggctgggcacctgcaagccaggaagagatggagagcccggcaccagcccagatgccagccccagcagcctgtgtggcctgcctgccagcgccaccgtgcacccagaccaggacctcttccccctgaatggcagcagcctggagaatgatgccttcagtgacaagtcagaaagagaaaatcctgaggagagtgacacagagacccaggaccacagcaggaagacagaaagtggcagtgaccagagcgagacccctggggcccctgtgcggcggggcaccacctacgtggagcaggtgcaggaggagctgggggagctgggggaggccagccaggtggagaccgtgtctgaggagaacaagagcctgatgtggaccctgctgaagcagctgcggcccggcatggacctgagccgggtggtgctgcccacctttgtgctggagcccaggagcttcctgaacaagctgagtgactactactaccacgccgacctgctgagcagagctgctgtggaggaggatgcctacagcaggatgaagctggtgctgcgctggtacctgagcggcttctacaagaagcccaagggcatcaagaagccctacaaccccatcctgggggagaccttccgctgctgctggttccacccccagacagacagcaggaccttctacatcgccgagcaggtgagccaccacccccctgtgtctgccttccacgtgagcaacaggaaggatggcttctgcatcagcggcagcatcacagccaagagccgcttctacggcaacagcctgagcgccctgctggatggcaaggccaccctgaccttcctgaacagagctgaggactacaccctgaccatgccctatgcccactgcaagggcatcctgtatggcaccatgaccctggagctgggcggcaaggtgaccattgaatgtgccaagaacaacttccaggcccagctggagttcaagctgaagcccttcttcggcggcagcaccagcatcaaccagatcagcggcaagatcaccagcggggaggaggtgctggccagcctgagcggccactgggacagagatgtgttcatcaaggaggagggcagcggcagcagcgccctcttctggacccccagcggggaggtgcggcggcagaggctgcggcagcacacagtgcccctggaggagcagacagagctggagagcgagcggctgtggcagcacgtgacccgggccatcagcaagggggaccagcaccgggccacccaggagaagtttgccctggaggaggcccagaggcagagggcccgggagcggcaggagagcctgatgccctggaagccccagctgttccacctggaccccatcacccaggagtggcactaccgctatgaggaccacagcccctgggaccccctgaaggacatcgcccagtttgagcaggacggcatcctgcggaccctgcagcaggaggccgtggcccggcagaccaccttcctgggcagccctggccccaggcatgagaggagcggccctgaccagaggctgaggaaggccagtgaccagcccagcggccacagccaggccacagagagcagcggcagcaccccagagagctgcccagagctgagtgatgaggagcaggatggagactttgtgcctggaggagagagcccctgcccccgctgcaggaaggaggcccggcggctgcaggccctgcacgaggccatcctgagcatccgggaggcccagcaggagctgcaccgccacctgagcgccatgctgagcagcacagcccgggccgcccaggcccccaccccaggcctgctgcagagccccaggtcctggttcctgctgtgtgtgttcctggcctgccagctgttcatcaaccacatcctgaagtag

SEQ ID NO: 162981 - DNA, 2436 bp, synthetic construct
  misc_feature 1..2436: note = Description of Artificial Sequence: Synthetic coding sequence
  source 1..2436: mol_type = other DNA
atgaaggaggaggccttcctgcggcggcgcttcagcctgtgcccccccagcagcaccccccagaaggtggaccccaggaagctgaccaggaacctgctgctgagcggggacaatgagctgtaccccctgagccctgggaaggacatggagcccaacggccccagcctgcccagagatgagggcccccccacccccagcagcgccaccaaggtgcccccagctgagtaccgcctgtgcaatggaagtgacaaggaatgtgtgagccccacagcccgggtgaccaagaaggagaccctgaaggcccagaaggagaactaccggcaggagaagaagagggccacccggcagctgctgagcgccctgacagaccccagcgtggtgatcatggctgacagcctgaagggccccaagggggagagcgtgggcagcatcacccagcccctgcccagcagctacctgatcttccgggccgccagcgagagtgatggccgctgctggctggatgccctggagctggccctgcgctgcagcagcctgctgcggctgggcacctgcaagccaggaagagatggagagcccggcaccagcccagatgccagccccagcagcctgtgtggcctgcctgccagcgccaccgtgcacccagaccaggacctcttccccctgaatggcagcagcctggagaatgatgccttcagtgacaagtcagaaagagaaaatcctgaggagagtgacacagagacccaggaccacagcaggaagacagaaagtggcagtgaccagagcgagacccctggggcccctgtgcggcggggcaccacctacgtggagcaggtgcaggaggagctgggggagctgggggaggccagccaggtggagaccgtgtctgaggagaacaagagcctgatgtggaccctgctgaagcagctgcggcccggcatggacctgagccgggtggtgctgcccacctttgtgctggagcccaggagcttcctgaacaagctgagtgactactactaccacgccgacctgctgagcagagctgctgtggaggaggatgcctacagcaggatgaagctggtgctgcgctggtacctgagcggcttctacaagaagcccaagggcatcaagaagccctacaaccccatcctgggggagaccttccgctgctgctggttccacccccagacagacagcaggaccttctacatcgccgagcaggtgagccaccacccccctgtgtctgccttccacgtgagcaacaggaaggatggcttctgcatcagcggcagcatcacagccaagagccgcttctacggcaacagcctgagcgccctgctggatggcaaggccaccctgaccttcctgaacagagctgaggactacaccctgaccatgccctatgcccactgcaagggcatcctgtatggcaccatgaccctggagctgggcggcaaggtgaccattgaatgtgccaagaacaacttccaggcccagctggagttcaagctgaagcccttcttcggcggcagcaccagcatcaaccagatcagcggcaagatcaccagcggggaggaggtgctggccagcctgagcggccactgggacagagatgtgttcatcaaggaggagggcagcggcagcagcgccctcttctggacccccagcggggaggtgcggcggcagaggctgcggcagcacacagtgcccctggaggagcagacagagctggagagcgagcggctgtggcagcacgtgacccgggccatcagcaagggggaccagcaccgggccacccaggagaagtttgccctggaggaggcccagaggcagagggcccgggagcggcaggagagcctgatgccctggaagccccagctgttccacctggaccccatcacccaggagtggcactaccgctatgaggaccacagcccctgggaccccctgaaggacatcgcccagtttgagcaggacggcatcctgcggaccctgcagcaggaggccgtggcccggcagaccaccttcctgggcagccctggccccaggcatgagaggagcggccctgaccagaggctgaggaaggccagtgaccagcccagcggccacagccaggccacagagagcagcggcagcaccccagagagctgcccagagctgagtgatgaggagcaggatggagactttgtgcctggaggagagagcccctgcccccgctgcaggaaggaggcccggcggctgcaggccctgcacgaggccatcctgagcatccgggaggcccagcaggagctgcaccgccacctgagcgccatgctgagcagcacagcccgggccgcccaggcccccaccccaggcctgctgcagagccccaggtcctggttcctgctgtgtgtgttcctggcctgccagctgttcatcaaccacatcctgaagtag

SEQ ID NO: 162982 - DNA, 1320 bp, synthetic construct
  misc_feature 1..1320: note = Description of Artificial Sequence: Synthetic coding sequence
  source 1..1320: mol_type = other DNA
atggacctgagccgggtggtgctgcccacctttgtgctggagcccaggagcttcctgaacaagctgagtgactactactaccacgccgacctgctgagcagagctgctgtggaggaggatgcctacagcaggatgaagctggtgctgcgctggtacctgagcggcttctacaagaagcccaagggcatcaagaagccctacaaccccatcctgggggagaccttccgctgctgctggttccacccccagacagacagcaggaccttctacatcgccgagcaggtgagccaccacccccctgtgtctgccttccacgtgagcaacaggaaggatggcttctgcatcagcggcagcatcacagccaagagccgcttctacggcaacagcctgagcgccctgctggatggcaaggccaccctgaccttcctgaacagagctgaggactacaccctgaccatgccctatgcccactgcaagggcatcctgtatggcaccatgaccctggagctgggcggcaaggtgaccattgaatgtgccaagaacaacttccaggcccagctggagttcaagctgaagcccttctttggaggcagcaccagcatcaaccagatcagcggcaagatcaccagcggggaggaggtgctggccagcctgagcggccactgggacagagatgtgttcatcaaggaggagggcagcggcagcagcgccctcttctggaccccatctggagaggtgcggcggcagaggctgcggcagcacacagtgcccctggaggagcagacagagctggagagcgagcggctgtggcagcacgtgacccgggccatcagcaaaggagaccagcaccgggccacccaggagaagtttgccctggaggaggcccagaggcagagggcccgggagcggcaggagagcctgatgccctggaagccccagctgttccacctggaccccatcacccaggagtggcactaccgctatgaggaccacagcccctgggaccccctgaaggacatcgcccagtttgagcaggacggcatcctgcggaccctgcagcaggaggccgtggcccggcagaccaccttcctgggcagccctggccccaggcatgagaggagcggccctgaccagaggctgaggaaggccagtgaccagcccagcggccacagccaggccacagagagcagcggcagcaccccagagagctgcccagagctgcacggcaccggcagcactggaacagaccccaggcctcctgctgagccccccatcctggtgcctgccctgcgggtgcctggggtgtctgctgtgcactag

SEQ ID NO: 162983 - DNA, 2436 bp, synthetic construct; identical to SEQ ID NO: 162981
  misc_feature 1..2436: note = Description of Artificial Sequence: Synthetic coding sequence
  source 1..2436: mol_type = other DNA

SEQ ID NO: 162984 - DNA, 375 bp, synthetic construct
  misc_feature 1..375: note = Description of Artificial Sequence: Synthetic coding sequence
  source 1..375: mol_type = other DNA
atgaaggaggaggccttcctgcggcggcgcttcagcctgtgcccccccagcagcaccccccagaaggtggaccccaggaagctgaccaggaacctgctgctgagcggggacaatgagctgtaccccctgagccctgggaaggacatggagcccaacggccccagcctgcccagagatgagggcccccccacccccagcagcgccaccaaggtgcccccagctgagtaccgcctgtgcaatggaagtgacaaggaatgtgtgagccccacagcccgggtgaccaagaaggagaccctgaaggcccagaaggagaactaccggcaggagaagaagagggccacccggcagctgctgagcgccctgacagacccctag

SEQ ID NO: 162985 - DNA, 297 bp, synthetic construct
  misc_feature 1..297: note = Description of Artificial Sequence: Synthetic coding sequence
  source 1..297: mol_type = other DNA
atgaaggaggaggccttcctgcggcggcgcttcagcctgtgcccccccagcagcaccccccagaaggtggaccccaggaagctgaccaggaacctgctgctgagcggggacaatgagctgtaccccctgagccctgggaaggacatggagcccaacggccccagcctgcccagagatgagggcccccccacccccagcagcgccaccaaggtgcccccagctgagtaccgcctgtgcaatggaagtgacaaggaatgtgtgagccccacagcccgggtgaccaagaaggagacctag

SEQ ID NO: 162986 - DNA, 420 bp, synthetic construct
  misc_feature 1..420: note = Description of Artificial Sequence: Synthetic coding sequence
  source 1..420: mol_type = other DNA
atgaaggaggaggccttcctgcggcggcgcttcagcctgtgcccccccagcagcaccccccagaaggtggaccccaggaagctgaccaggaacctgctgctgagcggggacaatgagctgtaccccctgagccctgggaaggacatggagcccaacggccccagcctgcccagagatgagggcccccccacccccagcagcgccaccaaggtgcccccagctgagtaccgcctgtgcaatggaagtgacaaggaatgtgtgagccccacagcccgggtgaccaagaaggagaccctgaaggcccagaaggagaactaccggcaggagaagaagagggccacccggcagctgctgagcgccctgacagaccccagcgtggtgatcatggctgacagcctgaagatccggggcaccctgtag

SEQ ID NO: 162987 - DNA, 273 bp, synthetic construct
  misc_feature 1..273: note = Description of Artificial Sequence: Synthetic coding sequence
  source 1..273: mol_type = other DNA
atgaaggaggaggccttcctgcggcggcgcttcagcctgtgcccccccagcagcaccccccagaaggtggaccccaggaagctgaccaggaacctgctgctgagcggggacaatgagctgtaccccctgagccctgggaaggacatggagcccaacggccccagcctgcccagagatgagggcccccccacccccagcagcgccaccaaggtgcccccagctgagtaccgcctgtgcaatggaagtgacaaggaatgtgtgagccccacctag

SEQ ID NO: 162988 - DNA, 210 bp, synthetic construct
  misc_feature 1..210: note = Description of Artificial Sequence: Synthetic coding sequence
  source 1..210: mol_type = other DNA
atgaaggaggaggccttcctgcggcggcgcttcagcctgtgcccccccagcagcaccccccagaaggtggaccccaggaagctgaccaggaacctgctgctgagcggggacaatgagctgtaccccctgagccctgggaaggacatggagcccaacggccccagcctgcccagagatgagggcccccccacccccagcagcgccacctag

SEQ ID NO: 162989 - DNA, 1299 bp, synthetic construct
  misc_feature 1..1299: note = Description of Artificial Sequence: Synthetic coding sequence
  source 1..1299: mol_type = other DNA
tacaaccccatcctgggggagaccttccgctgctgctggttccacccccagacagacagcaggaccttctacatcgccgagcaggtgagccaccacccccctgtgtctgccttccacgtgagcaacaggaaggatggcttctgcatcagcggcagcatcacagccaagagccgcttctacggcaacagcctgagcgccctgctggatggcaaggccaccctgaccttcctgaacagagctgaggactacaccctgaccatgccctatgcccactgcaagggcatcctgtatggcaccatgaccctggagctgggcggcaaggtgaccattgaatgtgccaagaacaacttccaggcccagctggagttcaagctgaagcccttctttggaggcagcaccagcatcaaccagatcagcggcaagatcaccagcggggaggaggtgctggccagcctgagcggccactgggacagagatgtgttcatcaaggaggagggcagcggcagcagcgccctcttctggaccccatctggagaggtgcggcggcagaggctgcggcagcacacagtgcccctggaggagcagacagagctggagagcgagcggctgtggcagcacgtgacccgggccatcagcaaaggagaccagcaccgggccacccaggagaagtttgccctggaggaggcccagaggcagagggcccgggagcggcaggagagcctgatgccctggaagccccagctgttccacctggaccccatcacccaggagtggcactaccgctatgaggaccacagcccctgggaccccctgaaggacatcgcccagtttgagcaggacggcatcctgcggaccctgcagcaggaggccgtggcccggcagaccaccttcctgggcagccctggccccaggcatgagaggagcggccctgaccagaggctgaggaaggccagtgaccagcccagcggccacagccaggccacagagagcagcggcagcaccccagagagctgcccagagctgagtgatgaggagcaggatggagactttgtgcctggaggagagagcccctgcccccgctgcaggaaggaggcccggcggctgcaggccctgcacgaggccatcctgagcatccgggaggcccagcaggagctgcaccgccacctgagcgccatgctgagcagcacagcccgggccgcccaggcccccaccccaggcctgctgcagagccccaggtcctggttcctgctgtgtgtgttcctggcctgccagctgttcatcaaccacatcctgaagtag

SEQ ID NO: 162990 - DNA, 1533 bp, synthetic construct
  misc_feature 1..1533: note = Description of Artificial Sequence: Synthetic coding sequence
  source 1..1533: mol_type = other DNA
atgtgtgtgccccaccggcagggccaccaggagggggacagccagggcgctgagggggagctgcctgctggggaggagcccaggagcttcctgaacaagctgagtgactactactaccacgccgacctgctgagcagagctgctgtggaggaggatgcctacagcaggatgaagctggtgctgcgctggtacctgagcggcttctacaagaagcccaagggcatcaagaagccctacaaccccatcctgggggagaccttccgctgctgctggttccacccccagacagacagcaggaccttctacatcgccgagcaggtgagccaccacccccctgtgtctgccttccacgtgagcaacaggaaggatggcttctgcatcagcggcagcatcacagccaagagccgcttctacggcaacagcctgagcgccctgctggatggcaaggccaccctgaccttcctgaacagagctgaggactacaccctgaccatgccctatgcccactgcaagggcatcctgtatggcaccatgaccctggagctgggcggcaaggtgaccattgaatgtgccaagaacaacttccaggcccagctggagttcaagctgaagcccttctttggaggcagcaccagcatcaaccagatcagcggcaagatcaccagcggggaggaggtgctggccagcctgagcggccactgggacagagatgtgttcatcaaggaggagggcagcggcagcagcgccctcttctggaccccatctggagaggtgcggcggcagaggctgcggcagcacacagtgcccctggaggagcagacagagctggagagcgagcggctgtggcagcacgtgacccgggccatcagcaaaggagaccagcaccgggccacccaggagaagtttgccctggaggaggcccagaggcagagggcccgggagcggcaggagagcctgatgccctggaagccccagctgttccacctggaccccatcacccaggagtggcactaccgctatgaggaccacagcccctgggaccccctgaaggacatcgcccagtttgagcaggacggcatcctgcggaccctgcagcaggaggccgtggcccggcagaccaccttcctgggcagccctggccccaggcatgagaggagcggccctgaccagaggctgaggaaggccagtgaccagcccagcggccacagccaggccacagagagcagcggcagcaccccagagagctgcccagagctgagtgatgaggagcaggatggagactttgtgcctggaggagagagcccctgcccccgctgcaggaaggaggcccggcggctgcaggccctgcacgaggccatcctgagcatccgggaggcccagcaggagctgcaccgccacctgagcgccatgctgagcagcacagcccgggccgcccaggcccccaccccaggcctgctgcagagccccaggtcctggttcctgctgtgtgtgttcctggcctgccagctgttcatcaaccacatcctgaagtag

SEQ ID NO: 162991 - DNA, 2805 bp, synthetic construct
  misc_feature 1..2805: note = Description of Artificial Sequence: Synthetic coding sequence
  source 1..2805: mol_type = other DNA
atgagcagtgatgagaagggcatcagccctgcccacaagaccagcacccccacccacaggtctgccagcagcagcaccagcagccagagggacagccggcagagcatccacatcctggagaggacagccagcagcagcacagagcccagcgtgtcccggcagctgctggagcctgagcctgtgcccctgagcaaggaggccgacagctgggagatcatcgagggcctgaagattggccagaccaacgtgcagaagccagacaagcatgagggcttcatgctgaagaagaggaagtggcccctgaagggctggcacaagcgcttctttgtgctggacaatggcatgctgaagtacagcaaggcccccctggacatccagaagggcaaggtgcacggcagcattgatgtgggcctgtctgtgatgagcatcaagaagaaggccaggagaattgacctggacacagaggagcacatctaccacctgaaggtgaagagccaggactggtttgatgcctgggtgtccaagctgcggcaccaccggctgtaccggcagaatgaaattgtgcgcagccccagagatgccagcttccacatcttccccagcaccagcacagctgagagcagccctgctgccaacgtgtctgtgatggatggcaagatgcagcccaacagcttcccctggcagagccccctgccctgcagcaacagcctgcctgccacctgcaccaccggccagagcaaggtggccgcctggctgcaggacagcgaggagatggacagatgtgccgaggacctggcccactgccagagcaacctggtggagctgagcaagctgctgcagaacctggagatcctgcagaggacccagagcgcccccaacttcacagacatgcaggccaactgtgtggacatcagcaagaaggacaagagggtgacccggcgctggaggaccaagtctgtgtccaaggacaccaagatccagctgcaggtgcccttcagcgccaccatgagccctgtgcggctgcacagcagcaaccccaacctgtgtgccgacatcgagttccagaccccacccagccacctgacagaccccctggagagcagcacagactacaccaagctgcaggaggagttctgcctgattgcccagaaggtgcacagcctgctgaagagcgccttcaacagcatcgccatcgagaaggagaagctgaagcagatggtgtctgagcaggaccacagcaagggccacagcacccagatggcccggctgcggcagagcctgagccaggccctgaaccagaatgctgagctgcggagccggctgaaccgcatccacagcgagagcatcatctgtgaccaggtggtgtctgtgaacatcatccccagcccagatgaggccggggagcagatccacgtgtccctgcccctgagccagcaggtggccaatgaaagccggctgtccatgtctgagagcgtgtctgagttctttgatgcccaggaggtgctgctgagcgccagcagcagtgaaaatgaggccagtgatgatgagagctacatcagtgatgtgtctgacaacatcagcgaggacaacacctctgtggccgacaacatcagccggcagatcctgaatggagagctgactggaggagccttcagaaatggaagaagagcctgcctgcctgccccctgcccagacaccagcaacatcaacctgtggaacatcctgaggaacaacatcggcaaggacctgagcaaggtgtccatgcctgtggagctgaatgagcccctgaacaccctgcagcacctgtgtgaggagatggagtacagcgagctgctggacaaggccagcgagacagatgacccctatgaaagaatggtgctggtggccgcctttgctgtgtctggctactgcagcacctacttccgggccggcagcaagcccttcaaccctgtgctgggggagacctatgagtgcatcagagaagataaaggcttccgcttcttcagcgagcaggtgagccaccacccccccatcagcgcctgccactgtgagagcaagaactttgtgttctggcaggacatccgctggaagaacaagttctggggcaagtccatggagatcctgcctgtgggcaccctgaatgtgatgctgcccaagtacggggactactacgtgtggaacaaggtgaccacctgcatccacaacatcctgagcggccgccgctggattgagcactacggggaggtgaccatccggaacaccaagagctctgtgtgcatctgcaagctgacctttgtgaaggtgaactactggaacagcaacatgaatgaggtgcagggcgtggtgattgaccaggagggcaaggctgtgtaccgcctgtttgggaagtggcatgagggcctgtactgcggcgtggcccccagcgccaagtgcatctggaggcctggctccatgcccaccaactatgagctgtactacggcttcaccaggtttgccatcgagctgaatgagctggaccctgtgctgaaggacctgctgcccccaacagatgcccgcttccggccagaccagcgcttcctggaggagggcaacctggaggccgccgccagcgagaagcagagggtggaggagctgcagaggagcagaagacgctacatggaggagaacaacctggagcacatccccaagttcttcaagaaggtgattgatgccaaccagcgggaggcctgggtgtccaatgacacctactgggagctgaggaaggaccccggcttcagcaaggtggacagccctgtgctgtggtag

SEQ ID NO: 162992 - DNA, 2817 bp, synthetic construct
  misc_feature 1..2817: note = Description of Artificial Sequence: Synthetic coding sequence
  source 1..2817: mol_type = other DNA
atgcaccagctgagcctcatccggggcaacagaggccgcagcatccacatcctggagaggacagccagcagcagcacagagcccagcgtgtcccggcagctgctggagcctgagcctgtgcccctgagcaaggaggccgacagctgggagatcatcgagggcctgaagattggccagaccaacgtgcagaagccagacaagcatgagggcttcatgctgaagaagaggaagtggcccctgaagggctggcacaagcgcttctttgtgctggacaatggcatgctgaagtacagcaaggcccccctggacatccagaagggcaaggtgcacggcagcattgatgtgggcctgtctgtgatgagcatcaagaagaaggccaggagaattgacctggacacagaggagcacatctaccacctgaaggtgaagagccaggactggtttgatgcctgggtgtccaagctgcggcaccaccggctgtaccggcagaatgagatcgtgcgcagccccagagatgccagcttccacatcttccccagcaccagcacagctgagagcagccctgctgccaacgtgtctgtgatggatggcaagatgcagcccaacagcttcccctggcagagccccctgccctgcagcaacagcctgcctgccacctgcaccaccggccagagcaaggtggccgcctggctgcaggacagcgaggagatggacagatgtgccgaggacctggcccactgccagagcaacctggtggagctgagcaagctgctgcagaacctggagatcctgcagaggacccagagcgcccccaacttcacagacatgcaggccaactgtgtggacatcagcaagaaggacaagagggtgacccggcgctggaggaccaagtctgtgtccaaggacaccaagatccagctgcaggagggccccccagccaagggccagttcagcaccacccggcggcggcagaggctggccgctgctgtggccaccaccgtgcccttcagcgccaccatgagccctgtgcggctgcacagcagcaaccccaacctgtgtgccgacatcgagttccagaccccacccagccacctgacagaccccctggagagcagcacagactacaccaagctgcaggaggagttctgcctgattgcccagaaggtgcacagcctgctgaagagcgccttcaacagcatcgccatcgagaaggagaagctgaagcagatggtgtctgagcaggaccacagcaagggccacagcacccagatggcccggctgcggcagagcctgagccaggccctgaaccagaatgctgagctgcggagccggctgaaccgcatccacagcgagagcatcatctgtgaccaggtggtgtctgtgaacatcatccccagcccagatgaggccggggagcagatccacgtgtccctgcccctgagccagcaggtggccaatgaaagccggctgtccatgtctgagagcgtgtctgagttctttgatgcccaggaggtgctgctgagcgccagcagcagtgaaaatgaggccagtgatgatgagagctacatcagtgatgtgtctgacaacatcagcgaggacaacacctctgtggccgacaacatcagccggcagatcctgaatggagagctgactggaggagccttcagaaatggaagaagagcctgcctgcctgccccctgcccagacaccagcaacatcaacctgtggaacatcctgaggaacaacatcggcaaggacctgagcaaggtgtccatgcctgtggagctgaatgagcccctgaacaccctgcagcacctgtgtgaggagatggagtacagcgagctgctggacaaggccagcgagacagatgacccctatgaaagaatggtgctggtggccgcctttgctgtgtctggctactgcagcacctacttccgggccggcagcaagcccttcaaccctgtgctgggggagacctatgagtgcatcagagaagataaaggcttccgcttcttcagcgagcaggtgagccaccacccccccatcagcgcctgccactgtgagagcaagaactttgtgttctggcaggacatccgctggaagaacaagttctggggcaagtccatggagatcctgcctgtgggcaccctgaatgtgatgctgcccaagtacggggactactacgtgtggaacaaggtgaccacctgcatccacaacatcctgagcggccgccgctggattgagcactacggggaggtgaccatccggaacaccaagagctctgtgtgcatctgcaagctgacctttgtgaaggtgaactactggaacagcaacatgaatgaggtgcagggcgtggtgattgaccaggagggcaaggctgtgtaccgcctgtttgggaagtggcatgagggcctgtactgcggcgtggcccccagcgccaagtgcatctggaggcctggctccatgcccaccaactatgagctgtactacggcttcaccaggtttgccatcgagctgaatgagctggaccctgtgctgaaggacctgctgcccccaacagatgcccgcttccggccagaccagcgcttcctggaggagggcaacctggaggccgccgccagcgagaagcagagggtggaggagctgcagaggagcagaagacgctacatggaggagaacaacctggagcacatccccaagttcttcaagaaggtgattgatgccaaccagcgggaggcctgggtgtccaatgacacctactgggagctgaggaaggaccccggcttcagcaaggtggacagccctgtgctgtggtag

SEQ ID NO: 162993 - DNA, 2697 bp, synthetic construct
  misc_feature 1..2697: note = Description of Artificial Sequence: Synthetic coding sequence
  source 1..2697: mol_type = other DNA
atgagcagtgatgagaagggcatcagccctgcccacaagaccagcacccccacccacaggtctgccagcagcagcaccagcagccagagggacagccggcagagcatccacatcctggagaggacagccagcagcagcacagagcccagcgtgtcccggcagctgctggagcctgagcctgtgcccctgagcaaggaggccgacagctgggagatcatcgagggcctgaagattggccagaccaacgtgcagaagccagacaagcatgagggcttcatgctgaagaagaggaagtggcccctgaagggctggcacaagcgcttctttgtgctggacaatggcatgctgaagtacagcaaggcccccctggacatccagaagggcaaggtgcacggcagcattgatgtgggcctgtctgtgatgagcatcaagaagaaggccaggagaattgacctggacacagaggagcacatctaccacctgaaggtgaagagccaggactggtttgatgcctgggtgtccaagctgcggcaccaccggctgtaccggcagaatgaaattgtgcgcagccccagagatgccagcttccacatcttccccagcaccagcacagctgagagcagccctgctgccaacgtgtctgtgatggatggcaagatgcagcccaacagcttcccctggcagagccccctgccctgcagcaacagcctgcctgccacctgcaccaccggccagagcaaggtggccgcctggctgcaggacagcgaggagatggacagatgtgccgaggacctggcccactgccagagcaacctggtggagctgagcaagctgctgcagaacctggagatcctgcagaggacccagagcgcccccaacttcacagacatgcaggccaactgtgtggacatcagcaagaaggacaagagggtgacccggcgctggaggaccaagtctgtgtccaaggacaccaagatccagctgcaggtgcccttcagcgccaccatgagccctgtgcggctgcacagcagcaaccccaacctgtgtgccgacatcgagttccagaccccacccagccacctgacagaccccctggagagcagcacagactacaccaagctgcaggaggagttctgcctgattgcccagaaggtgcacagcctgctgaagagcgccttcaacagcatcgccatcgagaaggagaagctgaagcagatggtgtctgagcaggaccacagcaagggccacagcacccagatggcccggctgcggcagagcctgagccaggccggggagcagatccacgtgtccctgcccctgagccagcaggtggccaatgaaagccggctgtccatgtctgagagcgtgtctgagttctttgatgcccaggaggtgctgctgagcgccagcagcagtgaaaatgaggccagtgatgatgagagctacatcagtgatgtgtctgacaacatcagcgaggacaacacctctgtggccgacaacatcagccggcagatcctgaatggagagctgactggaggagccttcagaaatggaagaagagcctgcctgcctgccccctgcccagacaccagcaacatcaacctgtggaacatcctgaggaacaacatcggcaaggacctgagcaaggtgtccatgcctgtggagctgaatgagcccctgaacaccctgcagcacctgtgtgaggagatggagtacagcgagctgctggacaaggccagcgagacagatgacccctatgaaagaatggtgctggtggccgcctttgctgtgtctggctactgcagcacctacttccgggccggcagcaagcccttcaaccctgtgctgggggagacctatgagtgcatcagagaagataaaggcttccgcttcttcagcgagcaggtgagccaccacccccccatcagcgcctgccactgtgagagcaagaactttgtgttctggcaggacatccgctggaagaacaagttctggggcaagtccatggagatcctgcctgtgggcaccctgaatgtgatgctgcccaagtacggggactactacgtgtggaacaaggtgaccacctgcatccacaacatcctgagcggccgccgctggattgagcactacggggaggtgaccatccggaacaccaagagctctgtgtgcatctgcaagctgacctttgtgaaggtgaactactggaacagcaacatgaatgaggtgcagggcgtggtgattgaccaggagggcaaggctgtgtaccgcctgtttgggaagtggcatgagggcctgtactgcggcgtggcccccagcgccaagtgcatctggaggcctggctccatgcccaccaactatgagctgtactacggcttcaccaggtttgccatcgagctgaatgagctggaccctgtgctgaaggacctgctgcccccaacagatgcccgcttccggccagaccagcgcttcctggaggagggcaacctggaggccgccgccagcgagaagcagagggtggaggagctgcagaggagcagaagacgctacatggaggagaacaacctggagcacatccccaagttcttcaagaaggtgattgatgccaaccagcgggaggcctgggtgtccaatgacacctactgggagctgaggaaggaccccggcttcagcaaggtggacagccctgtgctgtggtag

SEQ ID NO: 162994 - DNA, 573 bp, synthetic construct
  misc_feature 1..573: note = Description of Artificial Sequence: Synthetic coding sequence
  source 1..573: mol_type = other DNA
atggatggcaagatgcagcccaacagcttcccctggcagagccccctgccctgcagcaacagcctgcctgccacctgcaccaccggccagagcaaggtggccgcctggctgcaggacagcgaggagatggacagatgtgccgaggacctggcccactgccagagcaacctggtggagctgagcaagctgctgcagaacctggagatcctgcagaggacccagagcgcccccaacttcacagacatgcaggccaactgtgtggacatcagcaagaaggacaagagggtgacccggcgctggaggaccaagtctgtgtccaaggacaccaagatccagctgcaggtgcccttcagcgccaccatgagccctgtgcggctgcacagcagcaaccccaacctgtgtgccgacatcgagttccagaccccaccacccaaccacttcggcatcctgtctgtgctgctgcagccctacagcctgaagaagaagaagaagaagaagaagaagagcacccccagcctggagagccgcatcaagggagctgagtacaagatccagagcctgaccagcctgtag

SEQ ID NO: 162995 - DNA, 2880 bp, synthetic construct
  misc_feature 1..2880: note = Description of Artificial Sequence: Synthetic coding sequence
  source 1..2880: mol_type = other DNA
atgagcagtgatgagaagggcatcagccctgcccacaagaccagcacccccacccacaggtctgccagcagcagcaccagcagccagagggacagccggcagagcatccacatcctggagaggacagccagcagcagcacagagcccagcgtgtcccggcagctgctggagcctgagcctgtgcccctgagcaaggaggccgacagctgggagatcatcgagggcctgaagattggccagaccaacgtgcagaagccagacaagcatgagggcttcatgctgaagaagaggaagtggcccctgaagggctggcacaagcgcttctttgtgctggacaatggcatgctgaagtacagcaaggcccccctggacatccagaagggcaaggtgcacggcagcattgatgtgggcctgtctgtgatgagcatcaagaagaaggccaggagaattgacctggacacagaggagcacatctaccacctgaaggtgaagagccaggactggtttgatgcctgggtgtccaagctgcggcaccaccggctgtaccggcagaatgaaattgtgcgcagccccagagatgccagcttccacatcttccccagcaccagcacagctgagagcagccctgctgccaacgtgtctgtgatggatggcaagatgcagcccaacagcttcccctggcagagccccctgccctgcagcaacagcctgcctgccacctgcaccaccggccagagcaaggtggccgcctggctgcaggacagcgaggagatggacagatgtgccgaggacctggcccactgccagagcaacctggtggagctgagcaagctgctgcagaacctggagatcctgcagaggacccagagcgcccccaacttcacagacatgcaggccaactgtgtggacatcagcaagaaggacaagagggtgacccggcgctggaggaccaagtctgtgtccaaggacaccaagatccagctgcaggagggccccccagccaagggccagttcagcaccacccggcggcggcagaggctggccgctgctgtggccaccaccgtgcccttcagcgccaccatgagccctgtgcggctgcacagcagcaaccccaacctgtgtgccgacatcgagttccagaccccacccagccacctgacagaccccctggagagcagcacagactacaccaagctgcaggaggagttctgcctgattgcccagaaggtgcacagcctgctgaagagcgccttcaacagcatcgccatcgagaaggagaagctgaagcagatggtgtctgagcaggaccacagcaagggccacagcacccagatggcccggctgcggcagagcctgagccaggccctgaaccagaatgctgagctgcggagccggctgaaccgcatccacagcgagagcatcatctgtgaccaggtggtgtctgtgaacatcatccccagcccagatgaagctggggagcagatccacgtgtccctgcccctgagccagcaggtggccaatgaaagccggctgtccatgtctgagagcgtgtctgagttctttgatgcccaggaggtgctgctgagcgccagcagcagtgaaaatgaggccagtgatgatgagagctacatcagtgatgtgtctgacaacatcagcgaggacaacacctctgtggccgacaacatcagccggcagatcctgaatggagagctgaccggcggggccttcagaaatggccggcgggcctgcctgcctgccccctgcccagacaccagcaacatcaacctgtggaacatcctgaggaacaacatcggcaaggacctgagcaaggtgtccatgcctgtggagctgaatgagcccctgaacaccctgcagcacctgtgtgaggagatggagtacagcgagctgctggacaaggccagcgagacagatgacccctatgaaagaatggtgctggtggccgcctttgctgtgtctggctactgcagcacctacttccgggccggcagcaagcccttcaaccctgtgctgggggagacctatgagtgcatccgggaggacaagggcttccgcttcttcagcgagcaggtgagccaccacccccccatcagcgcctgccactgtgagagcaagaactttgtgttctggcaggacatccgctggaagaacaagttctggggcaagtccatggagatcctgcctgtgggcaccctgaatgtgatgctgcccaagtatggagactactacgtgtggaacaaggtgaccacctgcatccacaacatcctgtctggaagacgctggattgagcactatggagaggtgaccatccggaacaccaagagctctgtgtgcatctgcaagctgacctttgtgaaggtgaactactggaacagcaacatgaatgaggtgcagggcgtggtgattgaccaggagggcaaggctgtgtaccgcctgtttgggaagtggcatgagggcctgtactgcggcgtggcccccagcgccaagtgcatctggaggcctggctccatgcccaccaactatgagctgtactacggcttcaccaggtttgccatcgagctgaatgagctggaccctgtgctgaaggacctgctgcccccaacagatgcccgcttccggccagaccagcgcttcctggaggagggcaacctggaggccgccgccagcgagaagcagagggtggaggagctgcagaggagcagaagacgctacatggaggagaacaacctggagcacatccccaagttcttcaagaaggtgattgatgccaaccagcgggaggcctgggtgtccaatgacacctactgggagctgaggaaggaccccggcttcagcaaggtggacagccctgtgctgtggtag

SEQ ID NO: 162996 - DNA, 2712 bp, synthetic construct
  misc_feature 1..2712: note = Description of Artificial Sequence: Synthetic coding sequence
  source 1..2712: mol_type = other DNA
atgagcagtgatgagaagggcatcagccctgcccacaagaccagcacccccacccacaggtctgccagcagcagcaccagcagccagagggacagccggcagagcatccacatcctggagaggacagccagcagcagcacagagcccagcgtgtcccggcagctgctggagcctgagcctgtgcccctgagcaaggaggccgacagctgggagatcatcgagggcctgaagattggccagaccaacgtgcagaagccagacaagcatgagggcttcatgctgaagaagaggaagtggcccctgaagggctggcacaagcgcttctttgtgctggacaatggcatgctgaagtacagcaaggcccccctggacatccagaagggcaaggtgcacggcagcattgatgtgggcctgtctgtgatgagcatcaagaagaaggccaggagaattgacctggacacagaggagcacatctaccacctgaaggtgaagagccaggactggtttgatgcctgggtgtccaagctgcggcaccaccggctgtaccggcagaatgaaattgtgcgcagccccagagatgccagcttccacatcttccccagcaccagcacagctgagagcagccctgctgccaacgtgtctgtgatggatggcaagatgcagcccaacagcttcccctggcagagccccctgccctgcagcaacagcctgcctgccacctgcaccaccggccagagcaaggtggccgcctggctgcaggacagcgaggagatggacagatgtgccgaggacctggcccactgccagagcaacctggtggagctgagcaagctgctgcagaacctggagatcctgcagaggacccagagcgcccccaacttcacagacatgcaggtgcccttcagcgccaccatgagccctgtgcggctgcacagcagcaaccccaacctgtgtgccgacatcgagttccagaccccacccagccacctgacagaccccctggagagcagcacagactacaccaagctgcaggaggagttctgcctgattgcccagaaggtgcacagcctgctgaagagcgccttcaacagcatcgccatcgagaaggagaagctgaagcagatggtgtctgagcaggaccacagcaagggccacagcacccagatggcccggctgcggcagagcctgagccaggccctgaaccagaatgctgagctgcggagccggctgaaccgcatccacagcgagagcatcatctgtgaccaggtggtgtctgtgaacatcatccccagcccagatgaagctggggagcagatccacgtgtccctgcccctgagccagcaggtggccaatgaaagccggctgtccatgtctgagagcgtgtctgagttctttgatgcccaggaggtgctgctgagcgccagcagcagtgaaaatgaggccagtgatgatgagagctacatcagtgatgtgtctgacaacatcagcgaggacaacacctctgtggccgacaacatcagccggcagatcctgaatggagagctgaccggcggggccttcagaaatggccggcgggcctgcctgcctgccccctgcccagacaccagcaacatcaacctgtggaacatcctgaggaacaacatcggcaaggacctgagcaaggtgtccatgcctgtggagctgaatgagcccctgaacaccctgcagcacctgtgtgaggagatggagtacagcgagctgctggacaaggccagcgagacagatgacccctatgaaagaatggtgctggtggccgcctttgctgtgtctggctactgcagcacctacttccgggccggcagcaagcccttcaaccctgtgctgggggagacctatgagtgcatccgggaggacaagggcttccgcttcttcagcgagcaggtgagccaccacccccccatcagcgcctgccactgtgagagcaagaactttgtgttctggcaggacatccgctggaagaacaagttctggggcaagtccatggagatcctgcctgtgggcaccctgaatgtgatgctgcccaagtatggagactactacgtgtggaacaaggtgaccacctgcatccacaacatcctgtctggaagacgctggattgagcactatggagaggtgaccatccggaacaccaagagctctgtgtgcatctgcaagctgacctttgtgaaggtgaactactggaacagcaacatgaatgaggtgcagggcgtggtgattgaccaggagggcaaggctgtgtaccgcctgtttgggaagtggcatgagggcctgtactgcggcgtggcccccagcgccaagtgcatctggaggcctggctccatgcccaccaactatgagctgtactacggcttcaccaggtttgccatcgagctgaatgagctggaccctgtgctgaaggacctgctgcccccaacagatgcccgcttccggccagaccagcgcttcctggaggagggcaacctggaggccgccgccagcgagaagcagagggtggaggagctgcagaggagcagaagacgctacatggaggagaacaacctggagcacatccccaagttcttcaagaaggtgattgatgccaaccagcgggaggcctgggtgtccaatgacacctactgggagctgaggaaggaccccggcttcagcaaggtggacagccctgtgctgtggtag

SEQ ID NO: 162997 - DNA, 2529 bp, synthetic construct
  misc_feature 1..2529: note = Description of Artificial Sequence: Synthetic coding sequence
  source 1..2529: mol_type = other DNA
atggacttccaggagcgggacccccccttcctgcctgagagcgcccagagcagcaagcccagcagcgcccagcaggccagcgagctgtgggaggtggtggaggagccccgggtgcggctgggcacagagggcgtgatgcctgagcggcaggagggccacctgctgaagaagaggaagtggcccctgaagggctggcacaagcgctactttgtgctggaggatggcatcctgcactacgccaccacccggcaggacatcaccaagggcaagctgcacggcagcattgatgtgcggctgtctgtgatgagcatcaacaagaaggcccagagaattgacctggacacagaggacaacatctaccacctgaagatcaagagccaggacctcttccagagctgggtggcccagctgcgggcccaccggctggcccaccggctggacatgccccggggcagcctgcccagcacagcccacaggaaggtgcctggggcccagctgcccacagctgccacagccagcgccctgcccggcctgggcccccgggagaaggtgtcctcctggctgcgggacagtgatggcctggaccgctgcagccatgagctgtctgagtgccagggcaagctgcaggagctgcaccggctgctgcagagcctggagagcctgcaccgcatccccagcgcccctgtgatccccacccaccaggcctctgtgaccacagagcggcccaagaagggcaagaggaccagcaggatgtggtgcacccagagctttgccaaggatgacaccatcggccgggtgggccgcctgcacggctctgtgcccaacctgagccgctacctggagagccgggacagcagcggcacccggggcctgcccccaacagattatgcccacctgcagaggagcttctgggccctggcccagaaggtgcacagcagcctgagctctgtgctggccgccctgaccatggagcgggaccagctgcgggacatgcaccagggcagcgagctgagcaggatgggcgtgtctgaggccagcacaggccagaggcggctgcacagcctgagcaccagcagtgacaccacagctgacagcttcagcagcctgaaccctgaggagcaggaggccctgtacatgaagggccgggagctgaccccccagctgagccagaccagcatcctgagcctggccgacagccacacagagttctttgatgcctgtgaggtgctgctgagcgccagcagcagtgaaaatgaaggcagcgaggaggaggagagctgcaccagcgagatcaccaccagcctgtctgaggagatgctggacctgcggggagctgagcgctgccagaagggcggctgtgtgcccggccggcccatgggccccccaagaagacgctgcctgcctgctgccagcggccctggagcagatgtgtccctgtggaacatcctgaggaacaacatcggcaaggacctgagcaaggtgtccatgcctgtgcagctgaatgagcccctgaacaccctgcagaggctgtgtgaggagctggagtacagcagcctgctggaccaggccagcagaattgctgacccctgtgagaggatggtgtacatcgccgcctttgctgtgtctgcctacagcagcacctaccacagagctggctgcaagcccttcaaccctgtgctgggggagacctatgaatgtgagaggccagaccggggcttccgcttcatcagcgagcaggtgagccaccacccccccatcagcgcctgccacgccgagagcgagaactttgccttctggcaggacatgaagtggaagaacaagttctggggcaagagcctggagatcgtgcctgtgggcaccgtgaatgtgtccctgcccaggtttggagaccactttgagtggaacaaggtgaccagctgcatccacaacgtgctgagcggccagcgctggattgagcactacggggaggtgctgatccggaacacccaggacagcagctgccactgcaagatcaccttctgcaaggccaagtactggagcagcaatgtgcatgaggtgcagggcgctgtgctgagccgcagcggccgggtgctgcaccggctgtttgggaagtggcatgagggcctgtaccggggccccaccccaggcggccagtgcatctggaagcccaacagcatgcccccagaccacgagaggaactttggcttcacccagtttgccctggagctgaatgagctgacagctgagctgaagaggagcctgcccagcacagacacccggctgcggccagaccagcgctacctggaggagggcaacatccaggccgctgaggcccagaagagaagaattgagcagctgcagagggacaggaggaaggtgatggaggagaacaacatcgtgcaccaggcccgcttcttccggcggcagacagacagcagcggcaaggagtggtgggtgaccaacaacacctactggaggctgcgggcagagcccggctacggcaacatggatggagctgtgctgtggtag

SEQ ID NO: 162998 - DNA, 2529 bp, synthetic construct; identical to SEQ ID NO: 162997
  misc_feature 1..2529: note = Description of Artificial Sequence: Synthetic coding sequence
  source 1..2529: mol_type = other DNA

SEQ ID NO: 162999 - DNA, 2670 bp, synthetic construct
  misc_feature 1..2670: note = Description of Artificial Sequence: Synthetic coding sequence
  source 1..2670: mol_type = other DNA
atggagggcggcctggctgatggagagccagacaggaccagcctgctgggggacagcaaggatgtgctgggccccagcacagtggtggccaacagtgatgagagccagctgctgacccctgggaagatgagccagaggcagggcaaggaggcctaccccacccccaccaaggacctgcaccagcccagcctgagccctgccagcccccacagccagggctttgagcggggcaaggaggacatcagccagaacaaggatgagagcagcctgtccatgagcaagagcaagtctgagagcaagctgtacaatggaagtgagaaggacagcagcaccagcagcaagctgaccaagaaggagagcctgaaggtgcagaagaagaactaccgggaggagaagaagagggccaccaaggagctgctgagcaccatcacagaccccagcgtgattgtgatggctgactggctgaagatccggggcaccctgaagtcctggaccaagctgtggtgtgtgctgaagccaggagtgctgctgatctacaagacccagaagaatggccagtgggtgggcaccgtgctgctgaatgcctgtgagatcatcgagcggcccagcaagaaggatggcttctgcttcaagctgttccaccccctggagcagagcatctgggccgtgaagggccccaagggggaggccgtgggcagcatcacccagcccctgcccagcagctacctgatcatccgggccaccagcgagagtgatggccgctgctggatggatgccctggagctggccctgaagtgcagcagcctgctgaagaggaccatgatccgggagggcaaggagcatgacctgtctgtgtccagtgacagcacccacgtgaccttctacggcctgctgcgggccaacaacctgcacagcggggacaacttccagctgaatgacagcgagattgaaaggcagcacttcaaggaccaggacatgtacagcgacaagagtgacaaggaaaatgaccaggagcatgatgaaagtgacaatgaggtgatgggcaagtctgaggagagtgacacagacaccagcgagcggcaggatgacagctacatcgagcctgagcctgtggagcccctgaaggagaccacctacacagagcagagccatgaggagctgggggaggccggggaggccagccagacagagaccgtgtctgaggagaacaagagcctcatctggaccctgctgaagcaggtgcggcccggcatggacctgagcaaggtggtgctgcccaccttcatcctggagcccaggagcttcctggacaagctgagtgactactactaccacgccgacttcctgtctgaggccgccctggaggagaacccctacttccggctgaagaaggtggtgaagtggtacctgagcggcttctacaagaagcccaagggcctgaagaagccctacaaccccatcctgggggagaccttccgctgcctgtggatccaccccaggaccaacagcaagaccttctacatcgccgagcaggtgagccaccacccccccatcagcgccttctacgtgagcaacaggaaggatggcttctgcctgagcggcagcatcctggccaagagcaagttctacggcaacagcctgagcgccatcctggagggggaggcccggctgaccttcctgaacagaggagaggactatgtgatgaccatgccctatgcccactgcaagggcatcctgtatggcaccatgaccctggagctgggcggcaccgtgaacatcacctgccagaagacaggctacagcgccatcctggagttcaagctgaagcccttcctgggcagcagtgactgtgtgaaccagatcagcggcaagctgaagctgggcaaggaggtgctggccaccctggagggccactgggacagcgaggtgttcatcacagacaagaagacagacaacagcgaggtgttctggaaccccaccccagacatcaagcagtggaggctcatccgccacacagtgaagtttgaggagcagggcgactttgaaagtgagaagctgtggcagagggtgacccgggccatcaatgccaaggaccagacagaggccacccaggagaagtatgtgctggaggaggcccagaggcaggccgcccgggacaggaagaccaagaatgaggagtggagctgcaagctgtttgagctggaccccctgaccggggagtggcactacaagtttgctgacacccggccctgggaccccctgaatgacatgatccagtttgagaaggatggagtcatccagaccaaggtgaagcacaggacccccatggtgtctgtgcccaagatgaagcacaagcccacccggcagcagaagaaggtggccaagggctacagcagccctgagccagacatccaggacagcagcggcagcgaggcccagagcgtgaagcccagcaccaggaggaagaagggcatcgagctgggggacatccagagcagcattgagagcatcaagcagacccaggaggagatcaagaggaacatcatggccctgaggaaccacctggtgagcagcaccccagccacagactacttcctgcagcagaaggactacttcatcatcttcctgctgatcctgctgcaggtgatcatcaacttcatgttcaagtag

SEQ ID NO: 163000 - DNA, 2544 bp, synthetic construct
  misc_feature 1..2544: note = Description of Artificial Sequence: Synthetic coding sequence
  source 1..2544: mol_type = other DNA
atgagccagaggcagggcaaggaggcctaccccacccccaccaaggacctgcaccagcccagcctgagccctgccagcccccacagccagggctttgagcggggcaaggaggacatcagccagaacaaggatgagagcagcctgtccatgagcaagagcaagtctgagagcaagctgtacaatggaagtgagaaggacagcagcaccagcagcaagctgaccaagaaggagagcctgaaggtgcagaagaagaactaccgggaggagaagaagagggccaccaaggagctgctgagcaccatcacagaccccagcgtgattgtgatggctgactggctgaagatccggggcaccctgaagtcctggaccaagctgtggtgtgtgctgaagccaggagtgctgctgatctacaagacccagaagaatggccagtgggtgggcaccgtgctgctgaatgcctgtgagatcatcgagcggcccagcaagaaggatggcttctgcttcaagctgttccaccccctggagcagagcatctgggccgtgaagggccccaagggggaggccgtgggcagcatcacccagcccctgcccagcagctacctgatcatccgggccaccagcgagagtgatggccgctgctggatggatgccctggagctggccctgaagtgcagcagcctgctgaagaggaccatgatccgggagggcaaggagcatgacctgtctgtgtccagtgacagcacccacgtgaccttctacggcctgctgcgggccaacaacctgcacagcggggacaacttccagctgaatgacagcgagattgaaaggcagcacttcaaggaccaggacatgtacagcgacaagagtgacaaggaaaatgaccaggagcatgatgaaagtgacaatgaggtgatgggcaagtctgaggagagtgacacagacaccagcgagcggcaggatgacagctacatcgagcctgagcctgtggagcccctgaaggagaccacctacacagagcagagccatgaggagctgggggaggccggggaggccagccagacagagaccgtgtctgaggagaacaagagcctcatctggaccctgctgaagcaggtgcggcccggcatggacctgagcaaggtggtgctgcccaccttcatcctggagcccaggagcttcctggacaagctgagtgactactactaccacgccgacttcctgtctgaggccgccctggaggagaacccctacttccggctgaagaaggtggtgaagtggtacctgagcggcttctacaagaagcccaagggcctgaagaagccctacaaccccatcctgggggagaccttccgctgcctgtggatccaccccaggaccaacagcaagaccttctacatcgccgagcaggtgagccaccacccccccatcagcgccttctacgtgagcaacaggaaggatggcttctgcctgagcggcagcatcctggccaagagcaagttctacggcaacagcctgagcgccatcctggagggggaggcccggctgaccttcctgaacagaggagaggactatgtgatgaccatgccctatgcccactgcaagggcatcctgtatggcaccatgaccctggagctgggcggcaccgtgaacatcacctgccagaagacaggctacagcgccatcctggagttcaagctgaagcccttcctgggcagcagtgactgtgtgaaccagatcagcggcaagctgaagctgggcaaggaggtgctggccaccctggagggccactgggacagcgaggtgttcatcacagacaagaagacagacaacagcgaggtgttctggaaccccaccccagacatcaagcagtggaggctcatccgccacacagtgaagtttgaggagcagggcgactttgaaagtgagaagctgtggcagagggtgacccgggccatcaatgccaaggaccagacagaggccacccaggagaagtatgtgctggaggaggcccagaggcaggccgcccgggacaggaagaccaagaatgaggagtggagctgcaagctgtttgagctggaccccctgaccggggagtggcactacaagtttgctgacacccggccctgggaccccctgaatgacatgatccagtttgagaaggatggagtcatccagaccaaggtgaagcacaggacccccatggtgtctgtgcccaagatgaagcacaagcccacccggcagcagaagaaggtggccaagggctacagcagccctgagccagacatccaggacagcagcggcagcgaggcccagagcgtgaagcccagcaccaggaggaagaagggcatcgagctgggggacatccagagcagcattgagagcatcaagcagacccaggaggagatcaagaggaacatcatggccctgaggaaccacctggtgagcagcaccccagccacagactacttcctgcagcagaaggactacttcatcatcttcctgctgatcctgctgcaggtgatcatcaacttcatgttcaagtag

SEQ ID NO: 163001 - DNA, 2544 bp, synthetic construct; identical to SEQ ID NO: 163000
  misc_feature 1..2544: note = Description of Artificial Sequence: Synthetic coding sequence
  source 1..2544: mol_type = other DNA

SEQ ID NO: 163002 - DNA, 2187 bp, synthetic construct
  misc_feature 1..2187: note = Description of Artificial Sequence: Synthetic coding sequence
  source 1..2187: mol_type = other DNA
atggagggcggcctggctgatggagagccagacaggaccagcctgctgggggacagcaaggatgtgctgggccccagcacagtggtggccaacagtgatgagagccagctgctgacccctgggaagatgagccagaggcagggcaaggaggcctaccccacccccaccaaggacctgcaccagcccagcctgagccctgccagcccccacagccagggctttgagcggggcaaggaggacatcagccagaacaaggatgagagcagcctgtccatgagcaagagcaagtctgagagcaagctgtacaatggaagtgagaaggacagcagcaccagcagcaagctgaccaagaaggagagcctgaaggtgcagaagaagaactaccgggaggagaagaagagggccaccaaggagctgctgagcaccatcacagaccccagcgtgattgtgatggctgactggctgaagatccggggcaccctgaagtcctggaccaagctgtggtgtgtgctgaagccaggagtgctgctgatctacaagacccagaagaatggccagtgggtgggcaccgtgctgctgaatgcctgtgagatcatcgagcggcccagcaagaaggatggcttctgcttcaagctgttccaccccctggagcagagcatctgggccgtgaagggccccaagggggaggccgtgggcagcatcacccagcccctgcccagcagctacctgatcatccgggccaccagcgagagtgatggccgctgctggatggatgccctggagctggccctgaagtgcagcagcctgctgaagaggaccatgatccgggagggcaaggagcatgacctgtctgtgtccagtgacagcacccacgtgaccttctacggcctgctgcgggccaacaacctgcacagcggggacaacttccagctgaatgacagcgagattgaaaggcagcacttcaaggaccaggacatgtacagcgacaagagtgacaaggaaaatgaccaggagcatgatgaaagtgacaatgaggtgatgggcaagtctgaggagagtgacacagacaccagcgagcggcaggatgacagctacatcgagcctgagcctgtggagcccctgaaggagaccacctacacagagcagagccatgaggagctgggggaggccggggaggccagccagacagagaccgtgtctgaggagaacaagagcctcatctggaccctgctgaagcaggtgcggcccggcatggacctgagcaaggtggtgctgcccaccttcatcctggagcccaggagcttcctggacaagctgagtgactactactaccacgccgacttcctgtctgaggccgccctggaggagaacccctacttccggctgaagaaggtggtgaagtggtacctgagcggcttctacaagaagcccaagggcctgaagaagccctacaaccccatcctgggggagaccttccgctgcctgtggatccaccccaggaccaacagcaagaccttctacatcgccgagcaggtgagccaccacccccccatcagcgccttctacgtgagcaacaggaaggatggcttctgcctgagcggcagcatcctggccaagagcaagttctacggcaacagcctgagcgccatcctggagggggaggcccggctgaccttcctgaacagaggagaggactatgtgatgaccatgccctatgcccactgcaagggcatcctgtatggcaccatgaccctggagctgggcggcaccgtgaacatcacctgccagaagacaggctacagcgccatcctggagttcaagctgaagcccttcctgggcagcagtgactgtgtgaaccagatcagcggcaagctgaagctgggcaaggaggtgctggccaccctggagggccactgggacagcgaggtgttcatcacagacaagaagacagacaacagcgaggtgttctggaaccccaccccagacatcaagcagtggaggctcatccgccacacagtgaagtttgaggagcagggcgactttgaaagtgagaagctgtggcagagggtgacccgggccatcaatgccaaggaccagacagaggccacccaggagaagtatgtgctggaggaggcccagaggcaggccgcccgggacaggaagaccaagaatgagaagaagaagtag

SEQ ID NO: 163003 - DNA, 2625 bp, synthetic construct
  misc_feature 1..2625: note = Description of Artificial Sequence: Synthetic coding sequence
  source 1..2625: mol_type = other DNA
atggagggcggcctggctgatggagagccagacaggaccagcgccaacagtgatgagagccagctgctgaccccaggcaagatgagccagaggcagggcaaggaggcctaccccacccccaccaaggacctgcaccagcccagcctgagccctgccagcccccacagccagggctttgagcggggcaaggaggacatcagccagaacaaggatgagagcagcctgtccatgagcaagagcaagtctgagagcaagctgtacaacggcagcgagaaggacagcagcaccagcagcaagctgaccaagaaggagagcctgaaggtgcagaagaagaactaccgggaggagaagaagagggccaccaaggagctgctgagcaccatcacagaccccagcgtcatcgtgatggctgactggctgaagatccggggcaccctgaagtcctggaccaagctgtggtgtgtgctgaagccaggagtgctgctgatctacaagacccagaagaatggccagtgggtgggcaccgtgctgctgaatgcctgtgagatcatcgagcggcccagcaagaaggatggcttctgcttcaagctgttccaccccctggagcagagcatctgggccgtgaagggccccaagggggaggccgtgggcagcatcacccagcccctgcccagcagctacctgatcatccgggccaccagcgagagtgatggccgctgctggatggatgccctggagctggccctgaagtgcagcagcctgctgaagaggaccatgatccgggagggcaaggagcatgacctgtctgtgtccagtgacagcacccacgtgaccttctacggcctgctgcgggccaacaacctgcacagcggggacaacttccagctgaatgattctgaaattgagcggcagcacttcaaggaccaggacatgtacagcgacaagagtgacaaggaaaatgaccaggagcatgatgaaagtgacaatgaggtgatgggcaagtctgaggagagtgacacagacaccagcgagcggcaggatgacagctacatcgagcctgagcctgtggagcccctgaaggagaccacctacacagagcagagccatgaggagctgggggaggccggggaggccagccagacagaaacagtgtctgaggagaacaagagcctcatctggaccctgctgaagcaggtgcggcccggcatggacctgagcaaggtggtgctgcccaccttcatcctggagcccaggagcttcctggacaagctgagtgactactactaccacgccgacttcctgtctgaggccgccctggaggagaacccctacttccggctgaagaaggtggtgaagtggtacctgagcggcttctacaagaagcccaagggcctgaagaagccctacaaccccatcctgggggagaccttccgctgcctgtggatccaccccaggaccaacagcaagaccttctacatcgccgagcaggtgagccaccacccccccatcagcgccttctacgtgagcaacaggaaggatggcttctgcctgagcggcagcatcctggccaagagcaagttctacggcaacagcctgagcgccatcctggagggggaggcccggctgaccttcctgaacagaggagaagattatgtgatgaccatgccctatgcccactgcaagggcatcctgtatggcaccatgaccctggagctgggcggcaccgtgaacatcacctgccagaagacaggctacagcgccatcctggagttcaagctgaagcccttcctgggcagcagtgactgtgtgaaccagatcagcggcaagctgaagctgggcaaggaggtgctggccaccctggagggccactgggacagcgaggtgttcatcacagacaagaagacagacaacagcgaggtgttctggaaccccaccccagacatcaagcagtggaggctcatccgccacacagtgaagtttgaggagcagggcgactttgagagcgagaagctgtggcagagggtgacccgggccatcaatgccaaggaccagacagaggccacccaggagaagtatgtgctggaggaggcccagaggcaggccgcccgggacaggaagaccaagaatgaggagtggagctgcaagctgtttgagctggaccccctgactggagagtggcactacaagtttgctgacacccggccctgggaccccctgaatgacatgatccagtttgagaaggatggagtcatccagaccaaggtgaagcacaggacccccatggtgtctgtgcccaagatgaagcacaagcccacccggcagcagaagaaggtggccaagggctacagcagccctgagccagacatccaggacagcagcggcagcgaggcccagagcgtgaagcccagcaccaggaggaagaagggcatcgagctgggggacatccagagcagcattgagagcatcaagcagacccaggaggagatcaagaggaacatcatggccctgaggaaccacctggtgagcagcaccccagccacagactacttcctgcagcagaaggactacttcatcatcttcctgctgatcctgctgcaggtgatcatcaacttcatgttcaagtag

SEQ ID NO: 163004 - DNA, 162 bp, synthetic construct
  misc_feature 1..162: note = Description of Artificial Sequence: Synthetic coding sequence
  source 1..162: mol_type = other DNA
atggagggcggcctggctgatggagagccagacaggaccagcctgctgggggacagcaaggatgtgctgggccccagcaccaacagtgatgagagccagctgctgaccccaggcaagatgagccagaggcagggcaaggaggcctaccccacccccacctag

SEQ ID NO: 163005 - DNA, 231 bp, synthetic construct
  misc_feature 1..231: note = Description of Artificial Sequence: Synthetic coding sequence
  source 1..231: mol_type = other DNA
atgagccagaggcagggcaaggaggcctaccccacccccaccaaggacctgcaccagcccagcctgagccctgccagcccccacagccagggctttgagcggggcaaggaggacatcagccagaacaaggatgagagcagcctgtccatgagcaagagcaagtctgagagcaagctgtacaatggaagtgagaaggacagcagcaccagcagcaagctgaccaagaagtag

SEQ ID NO: 163006 - DNA, 177 bp, synthetic construct
  misc_feature 1..177: note = Description of Artificial Sequence: Synthetic coding sequence
  source 1..177: mol_type = other DNA
atggagggcggcctggctgatggagagccagacaggaccagcctgctgggggacagcaaggatgtgctgggccccagcacagtggtggccaacagtgatgagagccagctgctgacccctgggaagatgagccagaggcagggcaaggaggcctaccccacccccaccaaggactag

SEQ ID NO: 163007 - DNA, 336 bp, synthetic construct
  misc_feature 1..336: note = Description of Artificial Sequence: Synthetic coding sequence
  source 1..336: mol_type = other DNA
atgagccagaggcagggcaaggaggcctaccccacccccaccaaggacctgcaccagcccagcctgagccctgccagcccccacagccagggctttgagcggggcaaggaggacatcagccagaacaaggatgagagcagcctgtccatgagcaagagcaagtctgagagcaagctgtacaatggaagtgagaaggacagcagcaccagcagcaagctgaccaagaaggagagcctgaaggtgcagaagaagaactaccgggaggagaagaagagggccaccaaggagctgctgagcaccatcacagaccccagcgtgattgtgatggctgactag

SEQ ID NO: 163008 - DNA, 2226 bp, synthetic construct
  misc_feature 1..2226: note = Description of Artificial Sequence: Synthetic coding sequence
  source 1..2226: mol_type = other DNA
atgccctaccgccgggtgaccagcggccgcctgctgagcctggccgcccccaagatggccagcatcatggagggccccctgagcaagtggaccaacgtgatgaagggctggcagtaccgctggtttgtgctggactacaatgccggcctgctgagctactacaccagcaaggacaagatgatgaggggcagcagaagaggctgtgtgcggctgcggggggccgtcatcggcattgatgatgaagatgacagcaccttcaccatcaccgtggaccagaagaccttccacttccaggccagagatgctgatgagcgggagaagtggatccacgccctggaggagaccatcctgcggcacaccctgcagctgcagggcctggacagcggctttgtgcccagcgtgcaggactttgacaagaagctgacagaagcagatgcctacctgcagatcctgattgagcagctgaagctgtttgatgacaagctgcagaactgcaaggaggatgagcagaggaagaagattgagaccctgaaggagaccaccaacagcatggtggagagcatcaagcactgcatcgtgctgctgcagatcgccaagagcaccatcaaccctgtggatgccatctaccagcccagccccctggagcccgtcatcagcaccatgcccagccagacagtgctgcccccagagcctgtgcagctgtgcaagtctgagcagaggcccagcagcctgcctgtgggccctgtgctggccaccctgggccaccaccagacccccacccccaacagcacaggcagcggccacagcccccccagcagcagcctgaccagccccagccacgtgaacctgagccccaacacagtgcctgagttctcctacagcagcagtgaagatgagttctatgatgctgatgagttccaccagagcggcagcagccccaagaggctgattgacagcagcggcagcgcctctgtgctgacccacagcagcagcggcaacagcctgaagaggccagacaccacagagagcctgaacagcagcctgagcaatggcaccagtgatgctgacctgtttgacagccatgatgacagagatgatgatgctgaggccggctctgtggaggagcacaagagcgtcatcatgcacctgctgagccaggtgcggctgggcatggacctgaccaaggtggtgctgcccaccttcatcctggagaggaggagcctgctggagatgtatgctgacttctttgcccacccagacctgtttgtgtccatcagtgaccagaaggaccccaaggacaggatggtgcaggtggtgaagtggtacctgagcgccttccacgccggcaggaaaggatctgtggccaagaagccctacaaccccatcctgggggagatcttccagtgccactggaccctgcccaatgacacagaagaaaatacagagctggtgtctgagggccctgtgccctgggtgtccaagaacagcgtgacctttgtggccgagcaggtgagccaccacccccccatcagcgccttctatgcagagtgcttcaacaagaagatccagttcaatgcccacatctggaccaagagcaagttcctgggcatgagcattggagtgcacaacatcggccagggctgtgtgtcctgcctggactatgatgagcactacatcctgaccttccccaacggctacggccgcagcatcctgactgtgccctgggtggagctgggcggggagtgcaacatcaactgcagcaagacaggctacagcgccaacatcatcttccacaccaagcccttctatggaggcaagaagcaccgcatcacagctgagatcttcagccccaatgacaagaagagcttctgcagcattgaaggagagtggaatggagtgatgtatgccaagtatgccaccggggagaacacagtgtttgtggacaccaagaagctgcccatcatcaagaagaaggtgaggaagctggaggaccagaatgaatatgagagccgcagcctgtggaaggatgtgaccttcaacctgaagatccgggacattgatgctgccacagaggccaagcaccggctggaggagcggcagagagctgaggcccgggagaggaaggagaaggagatccagtgggagaccaggctcttccatgaagatggagagtgctgggtgtatgatgagcccctgctgaagaggctgggcgccgccaagcactag

SEQ ID NO: 163009 - DNA, 1881 bp, synthetic construct
  misc_feature 1..1881: note = Description of Artificial Sequence: Synthetic coding sequence
  source 1..1881: mol_type = other DNA
atggccttcctgctggccacctgtggcggcctggacagcggctttgtgcccagcgtgcaggactttgacaagaagctgacagaagcagatgcctacctgcagatcctgattgagcagctgaagctgtttgatgacaagctgcagaactgcaaggaggatgagcagaggaagaagattgagaccctgaaggagaccaccaacagcatggtggagagcatcaagcactgcatcgtgctgctgcagatcgccaagagcaccatcaaccctgtggatgccatctaccagcccagccccctggagcctgtgatcagcaccatgcccagccagacagtgctgcccccagagcctgtgcagctgtgcaagtctgagcagaggcccagcagcctgcctgtgggccctgtgctggccaccctgggccaccaccagacccccacccccaacagcactggaagtggccacagcccccccagcagcagcctgaccagccccagccacgtgaacctgagccccaacacagtgcctgagttctcctacagcagcagtgaagatgagttctatgatgctgatgagttccaccagagcggcagcagccccaagaggctgattgacagcagcggcagcgcctctgtgctgacccacagcagcagcggcaacagcctgaagaggccagacaccacagagagcctgaacagcagcctgagcaatggcaccagtgatgctgacctgtttgacagccatgatgacagagatgatgatgctgaggccggctctgtggaggagcacaagagcgtcatcatgcacctgctgagccaggtgcggctgggcatggacctgaccaaggtggtgctgcccaccttcatcctggagcggcgcagcctgctggagatgtatgctgacttctttgcccacccagacctgtttgtgtccatcagtgaccagaaggaccccaaggacaggatggtgcaggtggtgaagtggtacctgagcgccttccacgccggcaggaagggctctgtggccaagaagccctacaaccccatcctgggggagatcttccagtgccactggaccctgcccaatgacacagaggagaacacagagctggtgtctgagggccctgtgccctgggtgtccaagaacagcgtgacctttgtggccgagcaggtgagccaccacccccccatcagcgccttctatgcagagtgcttcaacaagaagatccagttcaatgcccacatctggaccaagagcaagttcctgggcatgagcattggagtgcacaacatcggccagggctgtgtgtcctgcctggactatgatgagcactacatcctgaccttccccaacggctacggccgcagcatcctgactgtgccctgggtggagctgggcggggagtgcaacatcaactgcagcaagacaggctacagcgccaacatcatcttccacaccaagcccttctacggcggcaagaagcaccgcatcacagctgagatcttcagccccaatgacaagaagagcttctgcagcattgaaggagagtggaatggagtgatgtatgccaagtatgccactggagaaaatacagtgtttgtggacaccaagaagctgcccatcatcaagaagaaggtgaggaagctggaggaccagaatgaatatgagagccgcagcctgtggaaggatgtgaccttcaacctgaagatccgggacattgatgctgccacagaggccaagcaccggctggaggagcggcagagagctgaggcccgggagaggaaggagaaggagatccagtgggagaccaggctcttccatgaagatggagagtgctgggtgtatgatgagcccctgctgaagaggctgggcgccgccaagcactag

SEQ ID NO: 163010 - DNA, 2265 bp, synthetic construct
  misc_feature 1..2265: note = Description of Artificial Sequence: Synthetic coding sequence
  source 1..2265: mol_type = other DNA
atgccctaccgccgggtgaccagcggccgcctgctgagcctggccgcccccaagatggccagcatcatggagggccccctgagcaagtggaccaacgtgatgaagggctggcagtaccgctggtttgtgctggactacaatgccggcctgctgagctactacaccagcaaggacaagatgatgaggggcagcagaagaggctgtgtgcggctgcggggggccgtcatcggcattgatgatgaagatgacagcaccttcaccatcaccgtggaccagaagaccttccacttccaggccagagatgctgatgagcgggagaagtggatccacgccctggaggagaccatcctgcggcacaccctgcagctgcagggcctggacagcggctttgtgcccagcgtgcaggactttgacaagaagctgacagaagcagatgcctacctgcagatcctgattgagcagctgaagctgtttgatgacaagctgcagaactgcaaggaggatgagcagaggaagaagattgagaccctgaaggagaccaccaacagcatggtggagagcatcaagcactgcatcgtgctgctgcagatcgccaaggaccagagcaatgctgagaagcatgctgatggcatgatcagcaccatcaaccctgtggatgccatctaccagcccagccccctggagcctgtgatcagcaccatgcccagccagacagtgctgcccccagagcctgtgcagctgtgcaagtctgagcagaggcccagcagcctgcctgtgggccctgtgctggccaccctgggccaccaccagacccccacccccaacagcactggaagtggccacagcccccccagcagcagcctgaccagccccagccacgtgaacctgagccccaacacagtgcctgagttctcctacagcagcagtgaagatgagttctatgatgctgatgagttccaccagagcggcagcagccccaagaggctgattgacagcagcggcagcgcctctgtgctgacccacagcagcagcggcaacagcctgaagaggccagacaccacagagagcctgaacagcagcctgagcaatggcaccagtgatgctgacctgtttgacagccatgatgacagagatgatgatgctgaggccggctctgtggaggagcacaagagcgtcatcatgcacctgctgagccaggtgcggctgggcatggacctgaccaaggtggtgctgcccaccttcatcctggagcggcgcagcctgctggagatgtatgctgacttctttgcccacccagacctgtttgtgtccatcagtgaccagaaggaccccaaggacaggatggtgcaggtggtgaagtggtacctgagcgccttccacgccggcaggaagggctctgtggccaagaagccctacaaccccatcctgggggagatcttccagtgccactggaccctgcccaatgacacagaggagaacacagagctggtgtctgagggccctgtgccctgggtgtccaagaacagcgtgacctttgtggccgagcaggtgagccaccacccccccatcagcgccttctatgcagagtgcttcaacaagaagatccagttcaatgcccacatctggaccaagagcaagttcctgggcatgagcattggagtgcacaacatcggccagggctgtgtgtcctgcctggactatgatgagcactacatcctgaccttccccaacggctacggccgcagcatcctgactgtgccctgggtggagctgggcggggagtgcaacatcaactgcagcaagacaggctacagcgccaacatcatcttccacaccaagcccttctacggcggcaagaagcaccgcatcacagctgagatcttcagccccaatgacaagaagagcttctgcagcattgaaggagagtggaatggagtgatgtatgccaagtatgccactggagaaaatacagtgtttgtggacaccaagaagctgcccatcatcaagaagaaggtgaggaagctggaggaccagaatgaatatgagagccgcagcctgtggaaggatgtgaccttcaacctgaagatccgggacattgatgctgccacagaggccaagcaccggctggaggagcggcagagagctgaggcccgggagaggaaggagaaggagatccagtgggagaccaggctcttccatgaagatggagagtgctgggtgtatgatgagcccctgctgaagaggctgggcgccgccaagcactag

SEQ ID NO: 163011 - DNA, 2172 bp, synthetic construct
  misc_feature 1..2172: note = Description of Artificial Sequence: Synthetic coding sequence
  source 1..2172: mol_type = other DNA
atggccagcatcatggagggccccctgagcaagtggaccaacgtgatgaagggctggcagtaccgctggtttgtgctggactacaatgccggcctgctgagctactacaccagcaaggacaagatgatgaggggcagcagaagaggctgtgtgcggctgcggggggccgtcatcggcattgatgatgaagatgacagcaccttcaccatcaccgtggaccagaagaccttccacttccaggccagagatgctgatgagcgggagaagtggatccacgccctggaggagaccatcctgcggcacaccctgcagctgcagggcctggacagcggctttgtgcccagcgtgcaggactttgacaagaagctgacagaagcagatgcctacctgcagatcctgattgagcagctgaagctgtttgatgacaagctgcagaactgcaaggaggatgagcagaggaagaagattgagaccctgaaggagaccaccaacagcatggtggagagcatcaagcactgcatcgtgctgctgcagatcgccaagagcaccatcaaccctgtggatgccatctaccagcccagccccctggagcccgtcatcagcaccatgcccagccagacagtgctgcccccagagcctgtgcagctgtgcaagtctgagcagaggcccagcagcctgcctgtgggccctgtgctggccaccctgggccaccaccagacccccacccccaacagcacaggcagcggccacagcccccccagcagcagcctgaccagccccagccacgtgaacctgagccccaacacagtgcctgagttctcctacagcagcagtgaagatgagttctatgatgctgatgagttccaccagagcggcagcagccccaagaggctgattgacagcagcggcagcgcctctgtgctgacccacagcagcagcggcaacagcctgaagaggccagacaccacagagagcctgaacagcagcctgagcaatggcaccagtgatgctgacctgtttgacagccatgatgacagagatgatgatgctgaggccggctctgtggaggagcacaagagcgtcatcatgcacctgctgagccaggtgcggctgggcatggacctgaccaaggtggtgctgcccaccttcatcctggagaggaggagcctgctggagatgtatgctgacttctttgcccacccagacctgtttgtgtccatcagtgaccagaaggaccccaaggacaggatggtgcaggtggtgaagtggtacctgagcgccttccacgccggcaggaaaggatctgtggccaagaagccctacaaccccatcctgggggagatcttccagtgccactggaccctgcccaatgacacagaagaaaatacagagctggtgtctgagggccctgtgccctgggtgtccaagaacagcgtgacctttgtggccgagcaggtgagccaccacccccccatcagcgccttctatgcagagtgcttcaacaagaagatccagttcaatgcccacatctggaccaagagcaagttcctgggcatgagcattggagtgcacaacatcggccagggctgtgtgtcctgcctggactatgatgagcactacatcctgaccttccccaacggctacggccgcagcatcctgactgtgccctgggtggagctgggcggggagtgcaacatcaactgcagcaagacaggctacagcgccaacatcatcttccacaccaagcccttctatggaggcaagaagcaccgcatcacagctgagatcttcagccccaatgacaagaagagcttctgcagcattgaaggagagtggaatggagtgatgtatgccaagtatgccaccggggagaacacagtgtttgtggacaccaagaagctgcccatcatcaagaagaaggtgaggaagctggaggaccagaatgaatatgagagccgcagcctgtggaaggatgtgaccttcaacctgaagatccgggacattgatgctgccacagaggccaagcaccggctggaggagcggcagagagctgaggcccgggagaggaaggagaaggagatccagtgggagaccaggctcttccatgaagatggagagtgctgggtgtatgatgagcccctgctgaagaggctgggcgccgccaagcactag

SEQ ID NO: 163012 - DNA, 2211 bp, synthetic construct
  misc_feature 1..2211: note = Description of Artificial Sequence: Synthetic coding sequence
  source 1..2211: mol_type = other DNA
atggccagcatcatggagggccccctgagcaagtggaccaacgtgatgaagggctggcagtaccgctggtttgtgctggactacaatgccggcctgctgagctactacaccagcaaggacaagatgatgaggggcagcagaagaggctgtgtgcggctgcggggggccgtcatcggcattgatgatgaagatgacagcaccttcaccatcaccgtggaccagaagaccttccacttccaggccagagatgctgatgagcgggagaagtggatccacgccctggaggagaccatcctgcggcacaccctgcagctgcagggcctggacagcggctttgtgcccagcgtgcaggactttgacaagaagctgacagaagcagatgcctacctgcagatcctgattgagcagctgaagctgtttgatgacaagctgcagaactgcaaggaggatgagcagaggaagaagattgagaccctgaaggagaccaccaacagcatggtggagagcatcaagcactgcatcgtgctgctgcagatcgccaaggaccagagcaatgctgagaagcatgctgatggcatgatcagcaccatcaaccctgtggatgccatctaccagcccagccccctggagcctgtgatcagcaccatgcccagccagacagtgctgcccccagagcctgtgcagctgtgcaagtctgagcagaggcccagcagcctgcctgtgggccctgtgctggccaccctgggccaccaccagacccccacccccaacagcactggaagtggccacagcccccccagcagcagcctgaccagccccagccacgtgaacctgagccccaacacagtgcctgagttctcctacagcagcagtgaagatgagttctatgatgctgatgagttccaccagagcggcagcagccccaagaggctgattgacagcagcggcagcgcctctgtgctgacccacagcagcagcggcaacagcctgaagaggccagacaccacagagagcctgaacagcagcctgagcaatggcaccagtgatgctgacctgtttgacagccatgatgacagagatgatgatgctgaggccggctctgtggaggagcacaagagcgtcatcatgcacctgctgagccaggtgcggctgggcatggacctgaccaaggtggtgctgcccaccttcatcctggagcggcgcagcctgctggagatgtatgctgacttctttgcccacccagacctgtttgtgtccatcagtgaccagaaggaccccaaggacaggatggtgcaggtggtgaagtggtacctgagcgccttccacgccggcaggaagggctctgtggccaagaagccctacaaccccatcctgggggagatcttccagtgccactggaccctgcccaatgacacagaggagaacacagagctggtgtctgagggccctgtgccctgggtgtccaagaacagcgtgacctttgtggccgagcaggtgagccaccacccccccatcagcgccttctatgcagagtgcttcaacaagaagatccagttcaatgcccacatctggaccaagagcaagttcctgggcatgagcattggagtgcacaacatcggccagggctgtgtgtcctgcctggactatgatgagcactacatcctgaccttccccaacggctacggccgcagcatcctgactgtgccctgggtggagctgggcggggagtgcaacatcaactgcagcaagacaggctacagcgccaacatcatcttccacaccaagcccttctacggcggcaagaagcaccgcatcacagctgagatcttcagccccaatgacaagaagagcttctgcagcattgaaggagagtggaatggagtgatgtatgccaagtatgccactggagaaaatacagtgtttgtggacaccaagaagctgcccatcatcaagaagaaggtgaggaagctggaggaccagaatgaatatgagagccgcagcctgtggaaggatgtgaccttcaacctgaagatccgggacattgatgctgccacagaggccaagcaccggctggaggagcggcagagagctgaggcccgggagaggaaggagaaggagatccagtgggagaccaggctcttccatgaagatggagagtgctgggtgtatgatgagcccctgctgaagaggctgggcgccgccaagcactag

SEQ ID NO: 163013 - DNA, 1716 bp, synthetic construct
  misc_feature 1..1716: note = Description of Artificial Sequence: Synthetic coding sequence
  source 1..1716: mol_type = other DNA
atggtggagagcatcaagcactgcatcgtgctgctgcagatcgccaaggaccagagcaatgctgagaagcatgctgatggcatgatcagcaccatcaaccctgtggatgccatctaccagcccagccccctggagcccgtcatcagcaccatgcccagccagacagtgctgcccccagagcctgtgcagctgtgcaagtctgagcagaggcccagcagcctgcctgtgggccctgtgctggccaccctgggccaccaccagacccccacccccaacagcacaggcagcggccacagcccccccagcagcagcctgaccagccccagccacgtgaacctgagccccaacacagtgcctgagttctcctacagcagcagtgaagatgagttctatgatgctgatgagttccaccagagcggcagcagccccaagaggctgattgacagcagcggcagcgcctctgtgctgacccacagcagcagcggcaacagcctgaagaggccagacaccacagagagcctgaacagcagcctgagcaatggcaccagtgatgctgacctgtttgacagccatgatgacagagatgatgatgctgaggccggctctgtggaggagcacaagagcgtcatcatgcacctgctgagccaggtgcggctgggcatggacctgaccaaggtggtgctgcccaccttcatcctggagaggaggagcctgctggagatgtatgctgacttctttgcccacccagacctgtttgtgtccatcagtgaccagaaggaccccaaggacaggatggtgcaggtggtgaagtggtacctgagcgccttccacgccggcaggaaaggatctgtggccaagaagccctacaaccccatcctgggggagatcttccagtgccactggaccctgcccaatgacacagaagaaaatacagagctggtgtctgagggccctgtgccctgggtgtccaagaacagcgtgacctttgtggccgagcaggtgagccaccacccccccatcagcgccttctatgcagagtgcttcaacaagaagatccagttcaatgcccacatctggaccaagagcaagttcctgggcatgagcattggagtgcacaacatcggccagggctgtgtgtcctgcctggactatgatgagcactacatcctgaccttccccaacggctacggccgcagcatcctgactgtgccctgggtggagctgggcggggagtgcaacatcaactgcagcaagacaggctacagcgccaacatcatcttccacaccaagcccttctatggaggcaagaagcaccgcatcacagctgagatcttcagccccaatgacaagaagagcttctgcagcattgaaggagagtggaatggagtgatgtatgccaagtatgccaccggggagaacacagtgtttgtggacaccaagaagctgcccatcatcaagaagaaggtgaggaagctggaggaccagaatgaatatgagagccgcagcctgtggaaggatgtgaccttcaacctgaagatccgggacattgatgctgccacagaggccaagcaccggctggaggagcggcagagagctgaggcccgggagaggaaggagaaggagatccagtgggagaccaggctcttccatgaagatggagagtgctgggtgtatgatgagcccctgctgaagaggctgggcgccgccaagcactag

SEQ ID NO: 163014 - DNA, 2241 bp, synthetic construct
  misc_feature 1..2241: note = Description of Artificial Sequence: Synthetic coding sequence
  source 1..2241: mol_type = other DNA
atggccagcatcatggagggccccctgagcaagtggaccaacgtgatgaagggctggcagtaccgctggtttgtgctggactacaatgccggcctgctgagctactacaccagcaaggacaagatgatgaggggcagcagaagaggctgtgtgcggctgcggggggccgtcatcggcattgatgatgaagatgacagcaccttcaccatcaccgtggaccagaagaccttccacttccaggccagagatgctgatgagcgggagaagtggatccacgccctggaggagaccatcctgcggcacaccctgcagctgcagatcagcaccaccctggccttcttccagagcagcggcatcagccctgtgctggagttcagcaagatcatcggcctggacagcggctttgtgcccagcgtgcaggactttgacaagaagctgacagaagcagatgcctacctgcagatcctgattgagcagctgaagctgtttgatgacaagctgcagaactgcaaggaggatgagcagaggaagaagattgagaccctgaaggagaccaccaacagcatggtggagagcatcaagcactgcatcgtgctgctgcagatcgccaagagcaccatcaaccctgtggatgccatctaccagcccagccccctggagcctgtgatcagcaccatgcccagccagacagtgctgcccccagagcctgtgcagctgtgcaagtctgagcagaggcccagcagcctgcctgtgggccctgtgctggccaccctgggccaccaccagacccccacccccaacagcactggaagtggccacagcccccccagcagcagcctgaccagccccagccacgtgaacctgagccccaacacagtgcctgagttctcctacagcagcagtgaagatgagttctatgatgctgatgagttccaccagagcggcagcagccccaagaggctgattgacagcagcggcagcgcctctgtgctgacccacagcagcagcggcaacagcctgaagaggccagacaccacagagagcctgaacagcagcctgagcaatggcaccagtgatgctgacctgtttgacagccatgatgacagagatgatgatgctgaggccggctctgtggaggagcacaagagcgtcatcatgcacctgctgagccaggtgcggctgggcatggacctgaccaaggtggtgctgcccaccttcatcctggagcggcgcagcctgctggagatgtatgctgacttctttgcccacccagacctgtttgtgtccatcagtgaccagaaggaccccaaggacaggatggtgcaggtggtgaagtggtacctgagcgccttccacgccggcaggaagggctctgtggccaagaagccctacaaccccatcctgggggagatcttccagtgccactggaccctgcccaatgacacagaggagaacacagagctggtgtctgagggccctgtgccctgggtgtccaagaacagcgtgacctttgtggccgagcaggtgagccaccacccccccatcagcgccttctatgcagagtgcttcaacaagaagatccagttcaatgcccacatctggaccaagagcaagttcctgggcatgagcattggagtgcacaacatcggccagggctgtgtgtcctgcctggactatgatgagcactacatcctgaccttccccaacggctacggccgcagcatcctgactgtgccctgggtggagctgggcggggagtgcaacatcaactgcagcaagacaggctacagcgccaacatcatcttccacaccaagcccttctacggcggcaagaagcaccgcatcacagctgagatcttcagccccaatgacaagaagagcttctgcagcattgaaggagagtggaatggagtgatgtatgccaagtatgccactggagaaaatacagtgtttgtggacaccaagaagctgcccatcatcaagaagaaggtgaggaagctggaggaccagaatgaatatgagagccgcagcctgtggaaggatgtgaccttcaacctgaagatccgggacattgatgctgccacagaggccaagcaccggctggaggagcggcagagagctgaggcccgggagaggaaggagaaggagatccagtgggagaccaggctcttccatgaagatggagagtgctgggtgtatgatgagcccctgctgaagaggctgggcgccgccaagcactag

SEQ ID NO: 163015 - DNA, 2160 bp, synthetic construct
  misc_feature 1..2160: note = Description of Artificial Sequence: Synthetic coding sequence
  source 1..2160: mol_type = other DNA
atggccagcatcatggagggccccctgagcaagtggaccaacgtgatgaagggctggcagtaccgctggtttgtgctggactacaatgccggcctgctgagctactacacaggagctgtgattggaattgatgatgaagatgacagcaccttcaccatcaccgtggaccagaagaccttccacttccaggccagagatgctgatgagcgggagaagtggattcatgccctggaggagaccatcctgcggcacaccctgcagctgcagggcctggacagcggctttgtgcccagcgtgcaggactttgacaagaagctgacagaagcagatgcctacctgcagatcctgattgagcagctgaagctgtttgatgacaagctgcagaactgcaaggaggatgagcagaggaagaagattgagaccctgaaggagaccaccaacagcatggtggagagcatcaagcactgcatcgtgctgctgcagatcgccaaggaccagagcaatgctgagaagcatgctgatggcatgatcagcaccatcaaccctgtggatgccatctaccagcccagccccctggagcccgtcatcagcaccatgcccagccagacagtgctgcccccagagcctgtgcagctgtgcaagtctgagcagaggcccagcagcctgcctgtgggccctgtgctggccaccctgggccaccaccagacccccacccccaacagcacaggcagcggccacagcccccccagcagcagcctgaccagccccagccacgtgaacctgagccccaacacagtgcctgagttctcctacagcagcagtgaagatgagttctatgatgctgatgagttccaccagagcggcagcagccccaagaggctgattgacagcagcggcagcgcctctgtgctgacccacagcagcagcggcaacagcctgaagaggccagacaccacagagagcctgaacagcagcctgagcaatggcaccagtgatgctgacctgtttgacagccatgatgacagagatgatgatgctgaggccggctctgtggaggagcacaagagcgtcatcatgcacctgctgagccaggtgcggctgggcatggacctgaccaaggtggtgctgcccaccttcatcctggagaggaggagcctgctggagatgtatgctgacttctttgcccacccagacctgtttgtgtccatcagtgaccagaaggaccccaaggacaggatggtgcaggtggtgaagtggtacctgagcgccttccacgccggcaggaaaggatctgtggccaagaagccctacaaccccatcctgggggagatcttccagtgccactggaccctgcccaatgacacagaagaaaatacagagctggtgtctgagggccctgtgccctgggtgtccaagaacagcgtgacctttgtggccgagcaggtgagccaccacccccccatcagcgccttctatgcagagtgcttcaacaagaagatccagttcaatgcccacatctggaccaagagcaagttcctgggcatgagcattggagtgcacaacatcggccagggctgtgtgtcctgcctggactatgatgagcactacatcctgaccttccccaacggctacggccgcagcatcctgactgtgccctgggtggagctgggcggggagtgcaacatcaactgcagcaagacaggctacagcgccaacatcatcttccacaccaagcccttctatggaggcaagaagcaccgcatcacagctgagatcttcagccccaatgacaagaagagcttctgcagcattgaaggagagtggaatggagtgatgtatgccaagtatgccaccggggagaacacagtgtttgtggacaccaagaagctgcccatcatcaagaagaaggtgaggaagctggaggaccagaatgaatatgagagccgcagcctgtggaaggatgtgaccttcaacctgaagatccgggacattgatgctgccacagaggccaagcaccggctggaggagcggcagagagctgaggcccgggagaggaaggagaaggagatccagtgggagaccaggctcttccatgaagatggagagtgctgggtgtatgatgagcccctgctgaagaggctgggcgccgccaagcactag

SEQ ID NO: 163016 - DNA, 1677 bp, synthetic construct
  misc_feature 1..1677: note = Description of Artificial Sequence: Synthetic coding sequence
  source 1..1677: mol_type = other DNA
atggtggagagcatcaagcactgcatcgtgctgctgcagatcgccaagagcaccatcaaccctgtggatgccatctaccagcccagccccctggagcctgtgatcagcaccatgcccagccagacagtgctgcccccagagcctgtgcagctgtgcaagtctgagcagaggcccagcagcctgcctgtgggccctgtgctggccaccctgggccaccaccagacccccacccccaacagcactggaagtggccacagcccccccagcagcagcctgaccagccccagccacgtgaacctgagccccaacacagtgcctgagttctcctacagcagcagtgaagatgagttctatgatgctgatgagttccaccagagcggcagcagccccaagaggctgattgacagcagcggcagcgcctctgtgctgacccacagcagcagcggcaacagcctgaagaggccagacaccacagagagcctgaacagcagcctgagcaatggcaccagtgatgctgacctgtttgacagccatgatgacagagatgatgatgctgaggccggctctgtggaggagcacaagagcgtcatcatgcacctgctgagccaggtgcggctgggcatggacctgaccaaggtggtgctgcccaccttcatcctggagcggcgcagcctgctggagatgtatgctgacttctttgcccacccagacctgtttgtgtccatcagtgaccagaaggaccccaaggacaggatggtgcaggtggtgaagtggtacctgagcgccttccacgccggcaggaagggctctgtggccaagaagccctacaaccccatcctgggggagatcttccagtgccactggaccctgcccaatgacacagaggagaacacagagctggtgtctgagggccctgtgccctgggtgtccaagaacagcgtgacctttgtggccgagcaggtgagccaccacccccccatcagcgccttctatgcagagtgcttcaacaagaagatccagttcaatgcccacatctggaccaagagcaagttcctgggcatgagcattggagtgcacaacatcggccagggctgtgtgtcctgcctggactatgatgagcactacatcctgaccttccccaacggctacggccgcagcatcctgactgtgccctgggtggagctgggcggggagtgcaacatcaactgcagcaagacaggctacagcgccaacatcatcttccacaccaagcccttctacggcggcaagaagcaccgcatcacagctgagatcttcagccccaatgacaagaagagcttctgcagcattgaaggagagtggaatggagtgatgtatgccaagtatgccactggagaaaatacagtgtttgtggacaccaagaagctgcccatcatcaagaagaaggtgaggaagctggaggaccagaatgaatatgagagccgcagcctgtggaaggatgtgaccttcaacctgaagatccgggacattgatgctgccacagaggccaagcaccggctggaggagcggcagagagctgaggcccgggagaggaaggagaaggagatccagtgggagaccaggctcttccatgaagatggagagtgctgggtgtatgatgagcccctgctgaagaggctgggcgccgccaagcactag

SEQ ID NO: 163017 - DNA, 99 bp, synthetic construct
  misc_feature 1..99: note = Description of Artificial Sequence: Synthetic coding sequence
  source 1..99: mol_type = other DNA
atggtggagagcatcaagcactgcatcgtgctgctgcagatcgccaaggaccagagcaatgctgagaagcatgctgatggcatgattgtgtccctgtag

SEQ ID NO: 163018 - DNA, 1677 bp, synthetic construct; identical to SEQ ID NO: 163016
  misc_feature 1..1677: note = Description of Artificial Sequence: Synthetic coding sequence
  source 1..1677: mol_type = other DNA

SEQ ID NO: 163019 - DNA, 1968 bp, synthetic construct
  misc_feature 1..1968: note = Description of Artificial Sequence: Synthetic coding sequence
  source 1..1968: mol_type = other DNA
atgggctgctgctgctgctggctggtgttcacagaggccagagatgctgatgagcgggagaagtggatccacgccctggaggagaccatcctgcggcacaccctgcagctgcagggcctggacagcggctttgtgcccagcgtgcaggactttgacaagaagctgacagaagcagatgcctacctgcagatcctgattgagcagctgaagctgtttgatgacaagctgcagaactgcaaggaggatgagcagaggaagaagattgagaccctgaaggagaccaccaacagcatggtggagagcatcaagcactgcatcgtgctgctgcagatcgccaagagcaccatcaaccctgtggatgccatctaccagcccagccccctggagcccgtcatcagcaccatgcccagccagacagtgctgcccccagagcctgtgcagctgtgcaagtctgagcagaggcccagcagcctgcctgtgggccctgtgctggccaccctgggccaccaccagacccccacccccaacagcacaggcagcggccacagcccccccagcagcagcctgaccagccccagccacgtgaacctgagccccaacacagtgcctgagttctcctacagcagcagtgaagatgagttctatgatgctgatgagttccaccagagcggcagcagccccaagaggctgattgacagcagcggcagcgcctctgtgctgacccacagcagcagcggcaacagcctgaagaggccagacaccacagagagcctgaacagcagcctgagcaatggcaccagtgatgctgacctgtttgacagccatgatgacagagatgatgatgctgaggccggctctgtggaggagcacaagagcgtcatcatgcacctgctgagccaggtgcggctgggcatggacctgaccaaggtggtgctgcccaccttcatcctggagaggaggagcctgctggagatgtatgctgacttctttgcccacccagacctgtttgtgtccatcagtgaccagaaggaccccaaggacaggatggtgcaggtggtgaagtggtacctgagcgccttccacgccggcaggaaaggatctgtggccaagaagccctacaaccccatcctgggggagatcttccagtgccactggaccctgcccaatgacacagaagaaaatacagagctggtgtctgagggccctgtgccctgggtgtccaagaacagcgtgacctttgtggccgagcaggtgagccaccacccccccatcagcgccttctatgcagagtgcttcaacaagaagatccagttcaatgcccacatctggaccaagagcaagttcctgggcatgagcattggagtgcacaacatcggccagggctgtgtgtcctgcctggactatgatgagcactacatcctgaccttccccaacggctacggccgcagcatcctgactgtgccctgggtggagctgggcggggagtgcaacatcaactgcagcaagacaggctacagcgccaacatcatcttccacaccaagcccttctatggaggcaagaagcaccgcatcacagctgagatcttcagccccaatgacaagaagagcttctgcagcattgaaggagagtggaatggagtgatgtatgccaagtatgccaccggggagaacacagtgtttgtggacaccaagaagctgcccatcatcaagaagaaggtgaggaagctggaggaccagaatgaatatgagagccgcagcctgtggaaggatgtgaccttcaacctgaagatccgggacattgatgctgccacagaggccaagcaccggctggaggagcggcagagagctgaggcccgggagaggaaggagaaggagatccagtgggagaccaggctcttccatgaagatggagagtgctgggtgtatgatgagcccctgctgaagaggctgggcgccgccaagcactag

SEQ ID NO: 163020 - DNA, 330 bp, synthetic construct
  misc_feature 1..330: note = Description of Artificial Sequence: Synthetic coding sequence
  source 1..330: mol_type = other DNA
atggtggagagcatcaagcactgcatcgtgctgctgcagatcgccaagagcaccatcaaccctgtggatgccatctaccagcccagccccctggagcctgtgatcagcaccatgcccagccagacagtgctgcccccagagcctgtgcagctgtgcaagtctgagcagaggcccagcagcctgcctgtgggccctgtgctggccaccctgggccaccaccagacccccacccccaacagcactggaagtggccacagcccccccagcagcagcctgaccagccccagccacgtgaacctgagccccaacacagtgcctgagttctcctag

SEQ ID NO: 163021 - DNA, 1170 bp, synthetic construct
  misc_feature 1..1170: note = Description of Artificial Sequence: Synthetic coding sequence
  source 1..1170: mol_type = other DNA
atggagggcgccctggccgccaactggagcgctgaggccgccaatgccagcgctgcccctcctggagctgagggcaacagaacagctggccccccaagaagaaatgaggccctggcccgggtggaggtggccgtgctgtgcctgatcctgctgctggccctgtctggaaatgcctgtgtgctgctggccctgcggaccacccggcagaagcacagccgcctcttcttcttcatgaagcacctgagcattgctgacctggtggtggccgtgttccaggtgctgccccagctgctgtgggacatcaccttccgcttctacggccctgacctgctgtgccgcctggtgaagtacctgcaggtggtgggcatgtttgccagcacctacctgctgctgctgatgagcctggaccgctgcctggccatctgccagcccctgcggagcctgcggcggaggacagaccggctggccgtgctggccacctggctgggctgcctggtggccagcgccccccaggtgcacatcttcagcctgcgggaggtggctgatggagtgtttgactgctgggccgtgttcatccagccctggggccccaaggcctacatcacctggatcaccctggccgtgtacatcgtgcctgtgattgtgctggccgcctgctacggcctcatctccttcaagatctggcagaacctgcggctgaagacagctgctgctgctgctgctgaggcccctgagggcgctgctgctggagatggcggccgggtggccctggcccgggtgtcctctgtgaagctgatcagcaaggccaagatcagaacagtgaagatgaccttcatcatcgtgctggccttcatcgtgtgctggacccccttcttctttgtgcagatgtggagcgtgtgggatgccaatgcccccaaggaggccagcgccttcatcatcgtgatgctgctggccagcctgaacagctgctgcaacccctggatctacatgctgttcaccggccacctgttccacgagctggtgcagcgcttcctgtgctgcagcgccagctacctgaagggccgccgcctgggggagaccagcgccagcaagaagagcaacagcagcagctttgtgctgagccacaggagcagcagccagaggagctgcagccagcccagcacagcctag

SEQ ID NO: 163022 - DNA, 132 bp, synthetic construct
  misc_feature 1..132: note = Description of Artificial Sequence: Synthetic coding sequence
  source 1..132: mol_type = other DNA
atggagggcgccctggccgccaactggagcgctgaggccgccaatgccagcgctgcccctcctggagctgagggcaacagaacagctggccccccaagaagaaatgaggccctggcccgggtggaggtgtag

SEQ ID NO: 163023 - DNA, 279 bp, synthetic construct
  misc_feature 1..279: note = Description of Artificial Sequence: Synthetic coding sequence
  source 1..279: mol_type = other DNA
atggagggcgccctggccgccaactggagcgctgaggccgccaatgccagcgctgcccctcctggagctgagggcaacagaacagctggccccccaagaagaaatgaggccctggcccgggtggaggtggccgtgctgtgcctgatcctgctgctggccctgtctggaaatgcctgtgtgctgctggccctgcggaccacccggcagaagcacagccgcctcttcttcttcatgaagcacctgagcattgctgacctggtggtggccgtgttccagtag

SEQ ID NO: 163024 - DNA, 1518 bp, synthetic construct
  misc_feature 1..1518: note = Description of Artificial Sequence: Synthetic coding sequence
  source 1..1518: mol_type = other DNA
atggccagcggcagaagagcccccaggacaggcctgctggagctgcgggccggggccggcagcggggccggcggggagcgctggcagagggtgctgctgagcctggctgaagatgtgctgactgtgtccccagcagatggagaccccggccctgagcccggggccccccgggagcaggagcccgcccagctgaatggagctgctgagcccggggccggccccccccagctgcctgaggccctgctgctgcagaggcggcgggtgacagtgaggaaggcagatgctgggggcctgggcatcagcatcaagggcggccgggagaacaagatgcccatcctgatcagcaagatcttcaagggcctggccgctgaccagacagaggccctgtttgtgggagatgccatcctgtctgtgaatggagaggacctgagcagcgccacccatgatgaagctgtgcaggtgctgaagaagacaggcaaggaggtggtgctggaggtgaagtacatgaaggatgtgagcccctacttcaagaacagcactggaggcacctctgtgggctgggacagccccccagccagccccctgcagaggcagcccagcagccctggccccaccccaagaaacttcagcgaggccaagcacatgagcctgaagatggcctacgtgtccaagcgctgcaccccaaatgaccctgagccccgctacctggagatctgcagcgcagatggccaggacaccctcttcctgcgggccaaggatgaggccagcgcccgctcctgggccacagccatccaggcccaggtgaacaccctgaccccccgggtgaaggatgagctgcaggccctgctggccgccaccagcacagctggcagccaggacatcaagcagatcggctggctgacagagcagctgcccagcggcggcacagcccccaccctggccctgctgacagagaaggagctgctgctgtacctgagcctgcctgagacccgggaggccctgagcaggcctgccaggacagcccccctcatcgccacccggctggtgcacagcggccccagcaaaggatctgtgccctatgatgctgagctgagctttgccctgaggacaggcaccaggcatggagtggacacccacctgttctctgtggagagcccccaggagctggccgcctggacccggcagctggtggatggctgccacagagctgctgagggcgtgcaggaggtgtccacagcctgcacctggaatggccggccctgcagcctgtctgtgcacatcgacaagggcttcaccctgtgggccgctgagcccggggccgcccgggctgtgctgctgcggcagccctttgagaagctgcagatgagcagtgatgatggagccagcctgctcttcctggactttggaggagctgagggggagatccagctggacctgcacagctgccccaagaccatcgtgttcatcatccacagcttcctgagcgccaaggtgacccggctgggcctgctggcctag

SEQ ID NO: 163025 - DNA, 441 bp, synthetic construct
  misc_feature 1..441: note = Description of Artificial Sequence: Synthetic coding sequence
  source 1..441: mol_type = other DNA
atgggcttcctgcggcggctcatctacagaagaagacccatgatctacgtggagagcagcgaggagagcagtgatgagcagccagatgaggtggagagccccacccagagccaggacagcaccccagctgaggagagagaagatgagggcgccagcgctgcccagggccaggagcctgaggccgacagccaggagctggtgcagcccaagacaggctgtgagctgggagatggccctgacaccaagagggtgtgcctgagaaatgaggagcagatgaagctgcctgctgagggccctgagcctgaggccgacagccaggagcaggtgcaccccaagacaggctgtgaaagaggagatggcccagatgtgcaggagctgggcctgcccaaccctgaggaggtgaagaccccagaagaagatgagggccagagccagccctag

SEQ ID NO: 163026 - DNA, 336 bp, synthetic construct
  misc_feature 1..336: note = Description of Artificial Sequence: Synthetic coding sequence
  source 1..336: mol_type = other DNA
atgtctgagctgctgcgggcccggagccagagcagcgagagaggaaatgaccaggagagcagccagcctgtgggcagcgtcatcgtgcaggagcccacagaggagaagaggcaggaggaggagcccccaacagacaaccagggcatcgcccccagcggggagattgagaaccaggccgtgcctgccttccagggccctgacatggaggccttccagcaggagctggccctgctgaagattgaagatgagcctggagatggcccagatgtgcgggagggcatcatgcccacctttgacctgaccaaggtgctggaggccggagatgcccagccctag

SEQ ID NO: 163027 - DNA, 195 bp, synthetic construct
  misc_feature 1..195: note = Description of Artificial Sequence: Synthetic coding sequence
  source 1..195: mol_type = other DNA
atgtctgagctgctgcgggcccggagccagagcagcgagagaggaaatgaccaggagagcagccagcctgtgggcagcgtcatcgtgcaggagcccacagaggagaagaggcaggaggaggagcccccaacagacaaccagggcatcgcccccagcggggagattgagaaccaggccgtgcctgccttccagtag

SEQ ID NO: 163028 - DNA, 342 bp, synthetic construct
  misc_feature 1..342: note = Description of Artificial Sequence: Synthetic coding sequence
  source 1..342: mol_type = other DNA
atgagcggccaccagaggaccaggagccgcagccgggagaggagagatgaccaggacagcaaccaccctgtgggcgctgtggtggcccaggagctgcccagcaatgaccagctgcagcaggaggagccccccatcgagagccaggactacaccccaggccaggagagagatgaaggagccctggacttccaggtgctgggcctggccgcctacctgtgggagctgaccaggagcaagacaggaggagagagaggagatggccccaacgtgaagggggagttcctgcccaacctggagcctgtgaagatccctgaggccggggagggccagcccagcgtgtag

SEQ ID NO: 163029 - DNA, 342 bp, synthetic construct; identical to SEQ ID NO: 163028
  misc_feature 1..342: note = Description of Artificial Sequence: Synthetic coding sequence
  source 1..342: mol_type = other DNA

SEQ ID NO: 163030 - DNA, 1458 bp, synthetic construct
  misc_feature 1..1458: note = Description of Artificial Sequence: Synthetic coding sequence
  source 1..1458: mol_type = other DNA
atggctgctgtgtggcagcaggtgctggccgtggatgcccgctacaatgcctaccgcacccccaccttcccccagttccgcacccagtacatcagaagaagaagccagctgctgcgggagaatgccaaggccggccaccccccagccctgcggcggcagtacctgcggctgcggggccagctgctgggccagagatatggccccctgtctgagcccggcagcgcccgggcctacagcaacagcatcgtgcgcagcagcaggaccaccctggacaggatggaggactttgaagatgacccccgggccctgggcgcccggggccacagaagatctgtgtcccggggcagctaccagctgcaggcccagatgaacagagctgtgtatgaagatcggcccccaggctctgtggtgcccaccagcgctgctgaggccagccgggccatggccggggacaccagcctgtctgagaactatgcctttgctggcatgtaccacgtgtttgaccagcacgtggatgaggccgtgccccgggtgcgctttgccaatgatgacagacaccggctggcctgctgcagcctggatggcagcatcagcctgtgccagctggtgcctgccccacccaccgtgctgcgggtgctgcggggccacacccggggcgtgtctgactttgcctggagcctgagcaatgacatcctggtgtccaccagcctggatgccaccatgaggatctgggcctctgaagatggccgctgcatccgggagatcccagaccctgacagcgctgagctgctgtgctgcaccttccagcctgtgaacaacaacctgactgtggtgggcaatgccaagcacaacgtgcacgtgatgaacatcagcacaggcaagaaggtgaagggcggcagcagcaagctgaccggccgggtgctggccctgagctttgatgcccctggccgcctgctgtgggccggagatgaccacggctctgtgttctccttcctgtttgacatggccaccgggaagctgaccaaggccaagaggctggtggtgcatgagggcagccctgtgaccagcatcagcgcccgctcctgggtgtcccgggaggcccgggaccccagcctgctgatcaatgcctgcctgaacaagctgctgctgtacagagtggtggacaatgaaggcaccctgcagctgaagaggagcttccccatcgagcagagcagccaccctgtgcgcagcatcttctgccccctgatgtccttccggcagggcgcctgtgtggtgacaggcagcgaggacatgtgtgtgcacttctttgatgtggagagagctgccaaggctgctgtgaacaagctgcagggccacagcgcccctgtgctggatgtgtccttcaactgtgatgagagcctgctggccagcagtgatgccagcggcatggtgattgtgtggaggcgggagcagaagtag

SEQ ID NO: 163031 - DNA, 309 bp, synthetic construct; identical to SEQ ID NO: 154190
  misc_feature 1..309: note = Description of Artificial Sequence: Synthetic coding sequence
  source 1..309: mol_type = other DNA

SEQ ID NO: 163032 - DNA, 1575 bp, synthetic construct
  misc_feature 1..1575: note = Description of Artificial Sequence: Synthetic coding sequence
  source 1..1575: mol_type = other DNA
atgtctgacaacggggagctggaggacaagcccccagcccctcctgtgaggatgagcagcaccatcttcagcactggaggcaaggaccccctgagcgccaaccacagcctgaagcccctgcccagcgtgcctgaggagaagaagcccaggcacaagatcatcagcatcttcagcggcacagagaagggcagcaagaagaaggagaaggagaggcctgagatcagcccccccagcgactttgagcacaccatccacgtgggctttgatgctgtgactggagagttcaccggcatgcctgagcagtgggcccggctgctgcagaccagcaacatcaccaagctggagcagaagaagaacccccaggccgtgctggatgtgctgaagttctatgacagcaacacagtgaagcagaagtacctgtccttcaccccacctgagaaggatggcttccccagcggcaccccagccctgaatgccaagggcacagaggccccagctgtggtgacagaggaggaggatgatgatgaggagacagcccctcctgtgattgcccccaggccagaccacaccaagagcatctacaccaggtctgtgattgatcctgtgcctgcccctgtgggggacagccacgtggatggagctgccaagagcctggacaagcagaagaagaagaccaagatgacagatgaggagatcatggagaagctgcggaccatcgtgtccatcggggaccccaagaagaagtacaccaggtatgagaagattggccagggcgccagcggcaccgtcttcaccgccacagatgtggccctgggccaggaggtggccatcaagcagatcaacctgcagaagcagcccaagaaggagctgatcatcaatgagatcctggtgatgaaggagctgaagaaccccaacatcgtgaacttcctggacagctacctggtgggagatgagctgtttgtggtgatggagtacctggccggcggcagcctgacagatgtggtgacagagacctgcatggatgaggcccagattgctgctgtgtgcagagaatgtctgcaggccctggagttcctgcacgccaaccaggtgatccaccgggacatcaagagtgacaacgtgctgctgggcatggagggctctgtgaagctgacagactttggcttctgtgcccagatcaccccagagcagagcaagaggagcaccatggtgggcaccccctactggatggcccctgaggtggtgaccaggaaggcctacggccccaaggtggacatctggagcctgggcatcatggccatcgagatggtggagggggagcccccctacctgaatgaaaaccccctgcgggccctgtacctgattgccaccaacggcaccccagagctgcagaaccctgagaagctgagccccatcttccgggacttcctgaaccgctgcctggagatggatgtggagaagaggggcagcgccaaggagctgctgcagcaccccttcctgaagctggccaagcccctgagcagcctgacccccctcatcatggccgccaaggaggccatgaagagcaacagatag

SEQ ID NO: 163033 - DNA, 1680 bp, synthetic construct
  misc_feature 1..1680: note = Description of Artificial Sequence: Synthetic coding sequence
  source 1..1680: mol_type = other DNA
atgtctgatggcctggacaatgaggagaagcccccagccccacccctgaggatgaacagcaacaacagagacagcagcgccctgaaccacagcagcaagcccctgcccatggcccctgaggagaagaacaagaaggcccggctgcggagcatcttccctgggggcggggacaagaccaacaagaagaaggagaaggagaggcctgagatcagcctgcccagcgactttgagcacaccatccacgtgggctttgatgctgtgactggagagttcaccccagacctgtatggcagccagatgtgccctgggaagctgcctgagggcatccctgagcagtgggcccggctgctgcagaccagcaacatcaccaagctggagcagaagaagaacccccaggccgtgctggatgtgctgaagttctatgacagcaaggagaccgtgaacaaccagaagtacatgtccttcaccagcggggacaagagcgcccacggctacatcgccgcccaccccagcagcaccaagacagccagcgagccccccctggcccctcctgtgtctgaggaggaggatgaggaggaggaggaggaggaggatgaaaatgagcccccacctgtgattgcccccaggcctgagcacaccaagagcatctacaccaggtctgtggtggagagcatcgccagccctgctgtgcccaacaaggaggtgaccccaccttctgcagaaaatgccaacagcagcaccctgtacagaaacacagaccggcagaggaagaagagcaagatgacagatgaggagatcctggagaagctgcggagcatcgtgtctgtgggggaccccaagaagaagtacaccaggtttgagaagattggccagggcgccagcggcaccgtgtacacagccctggacatcgccaccggccaggaggtggccatcaagcagatgaacctgcagcagcagcccaagaaggagctgatcatcaatgagatcctggtgatgagggagaacaagaaccccaacatcgtgaactacctggacagctacctggtgggagatgagctgtgggtggtgatggagtacctggccggcggcagcctgacagatgtggtgacagagacctgcatggatgagggccagattgctgctgtgtgcagagaatgtctgcaggccctggacttcctgcacagcaaccaggtgatccaccgggacatcaagagtgacaacatcctgctgggcatggatggctctgtgaagctgacagactttggcttctgtgcccagatcaccccagagcagagcaagaggagcaccatggtgggcaccccctactggatggcccctgaggtggtgaccaggaaggcctacggccccaaggtggacatctggagcctgggcatcatggccatcgagatggtggagggggagcccccctacctgaatgaaaaccccctgcgggccctgtacctgattgccaccaacggcaccccagagctgcagaaccctgagcggctgtctgctgtgttccgggacttcctgaaccgctgcctggagatggatgtggacagaagaggcagcgccaaggagctgctgcagcaccccttcctgaagctggccaagcccctgagcagcctgacccccctcatcatcgccgccaaggaggccatcaagaacagcagcaggtag

SEQ ID NO: 163034 - DNA, 1743 bp, synthetic construct
  misc_feature 1..1743: note = Description of Artificial Sequence: Synthetic coding sequence
  source 1..1743: mol_type = other DNA
atgtctgatggcctggacaatgaggagaagcccccagccccacccctgaggatgaacagcaacaacagagacagcagcgccctgaaccacagcagcaagcccctgcccatggcccctgaggagaagaacaagaaggcccggctgcggagcatcttccctgggggcggggacaagaccaacaagaagaaggagaaggagaggcctgagatcagcctgcccagcgactttgagcacaccatccacgtgggctttgatgctgtgactggagagttcaccaacagccccttccagaccagcaggcctgtgacagtggccagcagccagagcgagggcaagatgccagacctgtatggcagccagatgtgccctgggaagctgcctgagggcatccctgagcagtgggcccggctgctgcagaccagcaacatcaccaagctggagcagaagaagaacccccaggccgtgctggatgtgctgaagttctatgacagcaaggagaccgtgaacaaccagaagtacatgtccttcaccagcggggacaagagcgcccacggctacatcgccgcccaccccagcagcaccaagacagccagcgagccccccctggcccctcctgtgtctgaggaggaggatgaggaggaggaggaggaggaggatgaaaatgaacctcctcctgtgattgcccccaggcctgagcacaccaagagcatctacaccaggtctgtggtggagagcatcgccagccctgctgtgcccaacaaggaggtgaccccacccagcgcagaaaatgccaacagcagcaccctgtacagaaacacagaccggcagaggaagaagagcaagatgacagatgaggagatcctggagaagctgcggagcatcgtgtctgtgggggaccccaagaagaagtacaccaggtttgagaagattggccagggcgccagcggcaccgtgtacacagccctggacatcgccaccggccaggaggtggccatcaagcagatgaacctgcagcagcagcccaagaaggagctgatcatcaatgagatcctggtgatgagggagaacaagaaccccaacatcgtgaactacctggacagctacctggtgggagatgagctgtgggtggtgatggagtacctggccggcggcagcctgacagatgtggtgacagagacctgcatggatgagggccagattgctgctgtgtgccgggagtgcctgcaggccctggacttcctgcacagcaaccaggtgatccaccgggacatcaagagtgacaacatcctgctgggcatggatggctctgtgaagctgacagactttggcttctgtgcccagatcaccccagagcagagcaagaggagcaccatggtgggcaccccctactggatggcccctgaggtggtgaccaggaaggcctacggccccaaggtggacatctggagcctgggcatcatggccatcgagatggtggagggggagcccccctacctgaatgaaaaccccctgcgggccctgtacctgattgccaccaacggcaccccagagctgcagaaccctgagcggctgtctgctgtgttccgggacttcctgaaccgctgcctggagatggatgtggaccggcggggcagcgccaaggagctgctgcagcaccccttcctgaagctggccaagcccctgagcagcctgacccccctcatcatcgccgccaaggaggccatcaagaacagcagcaggtag

SEQ ID NO: 163035 - DNA, 1635 bp, synthetic construct
  misc_feature 1..1635: note = Description of Artificial Sequence: Synthetic coding sequence
  source 1..1635: mol_type = other DNA
atgtctgatggcctggacaatgaggagaagcccccagccccacccctgaggatgaacagcaacaacagagacagcagcgccctgaaccacagcagcaagcccctgcccatggcccctgaggagaagaacaagaaggcccggctgcggagcatcttccctgggggcggggacaagaccaacaagaagaaggagaaggagaggcctgagatcagcctgcccagcgactttgagcacaccatccacgtgggctttgatgctgtgactggagagttcaccggcatccctgagcagtgggcccggctgctgcagaccagcaacatcaccaagctggagcagaagaagaacccccaggccgtgctggatgtgctgaagttctatgacagcaaggagaccgtgaacaaccagaagtacatgtccttcaccagcggggacaagagcgcccacggctacatcgccgcccaccccagcagcaccaagacagccagcgagccccccctggcccctcctgtgtctgaggaggaggatgaggaggaggaggaggaggaggatgaaaatgaacctcctcctgtgattgcccccaggcctgagcacaccaagagcatctacaccaggtctgtggtggagagcatcgccagccctgctgtgcccaacaaggaggtgaccccacccagcgcagaaaatgccaacagcagcaccctgtacagaaacacagaccggcagaggaagaagagcaagatgacagatgaggagatcctggagaagctgcggagcatcgtgtctgtgggggaccccaagaagaagtacaccaggtttgagaagattggccagggcgccagcggcaccgtgtacacagccctggacatcgccaccggccaggaggtggccatcaagcagatgaacctgcagcagcagcccaagaaggagctgatcatcaatgagatcctggtgatgagggagaacaagaaccccaacatcgtgaactacctggacagctacctggtgggagatgagctgtgggtggtgatggagtacctggccggcggcagcctgacagatgtggtgacagagacctgcatggatgagggccagattgctgctgtgtgccgggagtgcctgcaggccctggacttcctgcacagcaaccaggtgatccaccgggacatcaagagtgacaacatcctgctgggcatggatggctctgtgaagctgacagactttggcttctgtgcccagatcaccccagagcagagcaagaggagcaccatggtgggcaccccctactggatggcccctgaggtggtgaccaggaaggcctacggccccaaggtggacatctggagcctgggcatcatggccatcgagatggtggagggggagcccccctacctgaatgaaaaccccctgcgggccctgtacctgattgccaccaacggcaccccagagctgcagaaccctgagcggctgtctgctgtgttccgggacttcctgaaccgctgcctggagatggatgtggaccggcggggcagcgccaaggagctgctgcagcaccccttcctgaagctggccaagcccctgagcagcctgacccccctcatcatcgccgccaaggaggccatcaagaacagcagcaggtag

SEQ ID NO: 163036 - DNA, 1680 bp, synthetic construct; identical to SEQ ID NO: 163033
  misc_feature 1..1680: note = Description of Artificial Sequence: Synthetic coding sequence
  source 1..1680: mol_type = other DNA

SEQ ID NO: 163037 - DNA, 1698 bp, synthetic construct
  misc_feature 1..1698: note = Description of Artificial Sequence: Synthetic coding sequence
  source 1..1698: mol_type = other DNA
atgtctgatggcctggacaatgaggagaagcccccagccccacccctgaggatgaacagcaacaacagagacagcagcgccctgaaccacagcagcaagcccctgcccatggcccctgaggagaagaacaagaaggcccggctgcggagcatcttccctgggggcggggacaagaccaacaagaagaaggagaaggagaggcctgagatcagcctgcccagcgactttgagcacaccatccacgtgggctttgatgctgtgactggagagttcaccaacagccccttccagaccagcaggcctgtgacagtggccagcagccagagcgagggcaagatgggcatccctgagcagtgggcccggctgctgcagaccagcaacatcaccaagctggagcagaagaagaacccccaggccgtgctggatgtgctgaagttctatgacagcaaggagaccgtgaacaaccagaagtacatgtccttcaccagcggggacaagagcgcccacggctacatcgccgcccaccccagcagcaccaagacagccagcgagccccccctggcccctcctgtgtctgaggaggaggatgaggaggaggaggaggaggaggatgaaaatgagcccccacctgtgattgcccccaggcctgagcacaccaagagcatctacaccaggtctgtggtggagagcatcgccagccctgctgtgcccaacaaggaggtgaccccaccttctgcagaaaatgccaacagcagcaccctgtacagaaacacagaccggcagaggaagaagagcaagatgacagatgaggagatcctggagaagctgcggagcatcgtgtctgtgggggaccccaagaagaagtacaccaggtttgagaagattggccagggcgccagcggcaccgtgtacacagccctggacatcgccaccggccaggaggtggccatcaagcagatgaacctgcagcagcagcccaagaaggagctgatcatcaatgagatcctggtgatgagggagaacaagaaccccaacatcgtgaactacctggacagctacctggtgggagatgagctgtgggtggtgatggagtacctggccggcggcagcctgacagatgtggtgacagagacctgcatggatgagggccagattgctgctgtgtgcagagaatgtctgcaggccctggacttcctgcacagcaaccaggtgatccaccgggacatcaagagtgacaacatcctgctgggcatggatggctctgtgaagctgacagactttggcttctgtgcccagatcaccccagagcagagcaagaggagcaccatggtgggcaccccctactggatggcccctgaggtggtgaccaggaaggcctacggccccaaggtggacatctggagcctgggcatcatggccatcgagatggtggagggggagcccccctacctgaatgaaaaccccctgcgggccctgtacctgattgccaccaacggcaccccagagctgcagaaccctgagcggctgtctgctgtgttccgggacttcctgaaccgctgcctggagatggatgtggacagaagaggcagcgccaaggagctgctgcagcaccccttcctgaagctggccaagcccctgagcagcctgacccccctcatcatcgccgccaaggaggccatcaagaacagcagcaggtag

SEQ ID NO: 163038 - DNA, 1635 bp, synthetic construct; identical to SEQ ID NO: 163035
  misc_feature 1..1635: note = Description of Artificial Sequence: Synthetic coding sequence
  source 1..1635: mol_type = other DNA

SEQ ID NO: 163039 - DNA, 546 bp, synthetic construct
  misc_feature 1..546: note = Description of Artificial Sequence: Synthetic coding sequence
  source 1..546: mol_type = other DNA
atgtctgatggcctggacaatgaggagaagcccccagccccacccctgaggatgaacagcaacaacagagacagcagcgccctgaaccacagcagcaagcccctgcccatggcccctgaggagaagaacaagaaggcccggctgcggagcatcttccctgggggcggggacaagaccaacaagaagaaggagaaggagaggcctgagatcagcctgcccagcgactttgagcacaccatccacgtgggctttgatgctgtgactggagagttcaccaacagccccttccagaccagcaggcctgtgacagtggccagcagccagagcgagggcaagatgccagacctgtatggcagccagatgtgccctgggaagctgcctgagggcatccctgagcagtgggcccggctgctgcagaccagcaacatcaccaagctggagcagaagaagaacccccaggccgtgctggatgtgctgaagttctatgacagcaaggagaccgtgaacaaccagaagtacatgtccttcaccagcggggacaagtag

SEQ ID NO: 163040 - DNA, 1635 bp, synthetic construct; identical to SEQ ID NO: 163035
  misc_feature 1..1635: note = Description of Artificial Sequence: Synthetic coding sequence
  source 1..1635: mol_type = other DNA

SEQ ID NO: 163041 - DNA, 1743 bp, synthetic construct; identical to SEQ ID NO: 163034
  misc_feature 1..1743: note = Description of Artificial Sequence: Synthetic coding sequence
  source 1..1743: mol_type = other DNA

SEQ ID NO: 163042 - DNA, 1698 bp, synthetic construct; identical to SEQ ID NO: 163037
  misc_feature 1..1698: note = Description of Artificial Sequence: Synthetic coding sequence
  source 1..1698: mol_type = other DNA

SEQ ID NO: 163043 - DNA, 2046 bp, synthetic construct
  misc_feature 1..2046: note = Description of Artificial Sequence: Synthetic coding sequence
  source 1..2046: mol_type = other DNA
atgttcaggaagaagaagaagaagaggcctgagatcagcgccccccagaacttccagcaccgggtgcacaccagctttgaccccaaggagggcaagtttgtgggcctgcccccccagtggcagaacatcctggacaccctgcggcggcccaagcctgtggtggaccccagccgcatcaccagggtgcagctgcagcccatgaagacagtggtgcggggcagcgccatgcctgtggatggctacatcagcggcctgctgaatgacatccagaagctgagcgtcatcagcagcaacaccctgcggggccgcagccccaccagcagaagaagagcccagagcctgggcctgctgggagatgagcactgggccacagatcctgacatgtacctgcagagcccccagagcgagaggacagacccccacggcctgtacctgagctgcaatggaggcaccccagctggccacaagcagatgccctggccagagccccagagcccccgggtgctgcccaacggcctggccgccaaggcccagagcctgggccctgctgagttccagggcgccagccagcgctgcctgcagctgggcgcctgcctgcagagcagccccccaggggccagcccccccaccggcaccaacagacatggcatgaaggccgccaagcacggcagcgaggaggcccggccccagagctgcctggtgggcagcgccaccggccggcctggaggagagggcagccccagccccaagacccgggagagcagcctgaagaggaggctcttccgctccatgttcctgagcacagctgccacagccccacccagcagcagcaagccaggccccccaccccagagcaagcccaacagcagcttccggcccccccagaaggacaacccccccagcctggtggccaaggcccagagcctgcccagcgaccagcctgtgggcaccttcagccccctgaccaccagtgacaccagcagcccccagaagagcctgaggacagccccagccaccggccagctgcccggccgcagcagccctgctggcagccccaggacctggcacgcccagatcagcaccagcaacctgtacctgccccaggaccccaccgtggccaagggggccctggccggggaggacaccggggtggtgacccatgagcagttcaaggccgccctgaggatggtggtggaccagggcgacccccggctgctgctggacagctatgtgaagattggagagggcagcacaggcatcgtgtgcctggcccgggagaagcacagcggccggcaggtggccgtgaagatgatggacctgaggaagcagcagaggcgggagctgctcttcaatgaggtggtgatcatgagggactaccagcacttcaacgtggtggagatgtacaagagctacctggtgggggaggagctgtgggtgctgatggagttcctgcagggcggggccctgacagacatcgtgtcccaggtgcggctgaatgaggagcagatcgccaccgtgtgtgaggccgtgctgcaggccctggcctacctgcacgcccagggcgtcatccaccgggacatcaagagtgacagcatcctgctgaccctggatggccgggtgaagctgagtgactttggcttctgtgcccagatcagcaaggatgtgcccaagaggaagagcctggtgggcaccccctactggatggcccctgaggtgatcagccgcagcctgtatgccacagaggtggacatctggagcctgggcatcatggtgattgagatggtggatggagagcccccctacttcagtgacagccctgtgcaggccatgaagaggctgcgggacagccccccacccaagctgaagaacagccacaaggtgtcccctgtgctgcgggacttcctggagaggatgctggtgcgggacccccaggagcgggccacagcccaggagctgctggaccaccccttcctgctgcagacaggcctgcctgaatgtctggtgcccctcatccagctgtacaggaagcagaccagcacctgctag

SEQ ID NO: 163044 - DNA, 2046 bp, synthetic construct; identical to SEQ ID NO: 163043
  misc_feature 1..2046: note = Description of Artificial Sequence: Synthetic coding sequence
  source 1..2046: mol_type = other DNA

SEQ ID NO: 163045 - DNA, 2046 bp, synthetic construct; identical to SEQ ID NO: 163043
  misc_feature 1..2046: note = Description of Artificial Sequence: Synthetic coding sequence
  source 1..2046: mol_type = other DNA

SEQ ID NO: 163046 - DNA, 369 bp, synthetic construct
  misc_feature 1..369: note = Description of Artificial Sequence: Synthetic coding sequence
  source 1..369: mol_type = other DNA
atgttcaggaagaagaagaagaagaggcctgagatcagcgccccccagaacttccagcaccgggtgcacaccagctttgaccccaaggagggcaagtttgtgggcctgcccccccagtggcagaacatcctggacaccctgcggcggcccaagcctgtggtggaccccagccgcatcaccagggtgcagctgcagcccatgaagacagtggtgcggggcagcgccatgcctgtggatggctacatcagcggcctgctgaatgacatccagaagctgagcgtcatcagcagcaacaccctgcggggccgcagccccaccagcagaagaagagcccagagcctgggcctgctgggagatgagcactggtag

SEQ ID NO: 163047 - DNA, 372 bp, synthetic construct
  misc_feature 1..372: note = Description of Artificial Sequence: Synthetic coding sequence
  source 1..372: mol_type = other DNA
atgttcaggaagaagaagaagaagaggcctgagatcagcgccccccagaacttccagcaccgggtgcacaccagctttgaccccaaggagggcaagtttgtgggcctgcccccccagtggcagaacatcctggacaccctgcggcggcccaagcctgtggtggaccccagccgcatcaccagggtgcagctgcagcccatgaagacagtggtgcggggcagcgccatgcctgtggatggctacatcagcggcctgctgaatgacatccagaagctgagcgtcatcagcagcaacaccctgcggggccgcagccccaccagcagaagaagagcccagagcctgggcctgctgggagatgagcactgggcctag

SEQ ID NO: 163048 - DNA, 330 bp, synthetic construct
  misc_feature 1..330: note = Description of Artificial Sequence: Synthetic coding sequence
  source 1..330: mol_type = other DNA
atgttcaggaagaagaagaagaagaggcctgagatcagcgccccccagaacttccagcaccgggtgcacaccagctttgaccccaaggagggcaagtttgtgggcctgcccccccagtggcagaacatcctggacaccctgcggcggcccaagcctgtggtggaccccagccgcatcaccagggtgcagctgcagcccatgaagacagtggtgcggggcagcgccatgcctgtggatggctacatcagcggcctgctgaatgacatccagaagctgagcgtcatcagcagcaacaccctgcggggccgcagccccaccagcagaagatag

SEQ ID NO: 163049 - DNA, 339 bp, synthetic construct
  misc_feature 1..339: note = Description of Artificial Sequence: Synthetic coding sequence
  source 1..339: mol_type = other DNA
atgttcaggaagaagaagaagaagaggcctgagatcagcgccccccagaacttccagcaccgggtgcacaccagctttgaccccaaggagggcaagtttgtgggcctgcccccccagtggcagaacatcctggacaccctgcggcggcccaagcctgtggtggaccccagccgcatcaccagggtgcagctgcagcccatgaagacagtggtgcggggcagcgccatgcctgtggatggctacatcagcggcctgctgaatgacatccagaagctgagcgtcatcagcagcaacaccctgcggggccgcagccccaccagcagaagaagagcccagtag

SEQ ID NO: 163050 - DNA, 2046 bp, synthetic construct; identical to SEQ ID NO: 163043
  misc_feature 1..2046: note = Description of Artificial Sequence: Synthetic coding sequence
  source 1..2046: mol_type = other DNA

SEQ ID NO: 163051 - DNA, 855 bp, synthetic construct
  misc_feature 1..855: note = Description of Artificial Sequence: Synthetic coding sequence
  source 1..855: mol_type = other DNA
atgttcaggaagaagaagaagaagaggcctgagatcagcgccccccagaacttccagcaccgggtgcacaccagctttgaccccaaggagggcaagtttgtgggcctgcccccccagtggcagaacatcctggacaccctgcggcggcccaagcctgtggtggaccccagccgcatcaccagggtgcagctgcagcccatgaagacagtggtgcggggcagcgccatgcctgtggatggctacatcagcggcctgctgaatgacatccagaagctgagcgtcatcagcagcaacaccctgcggggccgcagccccaccagcagaagaagagcccagagcctgggcctgctgggagatgagcactgggccacagatcctgacatgtacctgcagagcccccagagcgagaggacagacccccacggcctgtacctgagctgcaatggaggcaccccagctggccacaagcagatgccctggccagagccccagagcccccgggtgctgcccaacggcctggccgccaaggcccagagcctgggccctgctgagttccagggcgccagccagcgctgcctgcagctgggcgcctgcctgcagagcagccccccaggggccagcccccccaccggcaccaacagacatggcatgaaggccgccaagcacggcagcgaggaggcccggccccagagctgcctggtgggcagcgccaccggccggcctggaggagagggcagccccagccccaagacccgggagagcagcctgaagaggaggctcttccgctccatgttcctgagcacagctgccacagccccacccagcagcagcaagccaggccccccaccccagtag

SEQ ID NO: 163052 - DNA, 318 bp, synthetic construct
  misc_feature 1..318: note = Description of Artificial Sequence: Synthetic coding sequence
  source 1..318: mol_type = other DNA
atgttcaggaagaagaagaagaagaggcctgagatcagcgccccccagaacttccagcaccgggtgcacaccagctttgaccccaaggagggcaagtttgtgggcctgcccccccagtggcagaacatcctggacaccctgcggcggcccaagcctgtggtggaccccagccgcatcaccagggtgcagctgcagcccatgaagacagtggtgcggggcagcgccatgcctgtggatggctacatcagcggcctgctgaatgacatccagaagctgagcgtcatcagcagcaacaccctgcggggccgcagcccctag

SEQ ID NO: 163053 - DNA, 441 bp, synthetic construct
  misc_feature 1..441: note = Description of Artificial Sequence: Synthetic coding sequence
  source 1..441: mol_type = other DNA
atgatcaacatgggagacagccacgtggacaccagcagcacagtgtctgaggccgtggccgaggaggtgtccctcttctccatgacagacatgatcctcttcagcctgattgtgggcctgctgacctactggttcctgttcaggaagaagaaggaggaggtgcctgagttcaccaagatccagaccctgaccagctctgtgcgggagagcagctttgtggagaagatgaagaagacaggaagaaacatcatcgtgttctacggcagccagacaggaacagctgaggagtttgccaaccggctgagcaaggatgcccacagatatggcatgaggggcatgtctgctgaccctgaggagtatgacctggccgacctgagcagcctgcctgagattgacaatgccctggtggtgttctgcatggccacctatggagagggctag

SEQ ID NO: 163054 - DNA, 519 bp, synthetic construct
  misc_feature 1..519: note = Description of Artificial Sequence: Synthetic coding sequence
  source 1..519: mol_type = other DNA
atgatcaacatgggagacagccacgtggacaccagcagcacagtgtctgaggccgtggccgaggaggtgtccctcttctccatgacagacatgatcctcttcagcctgattgtgggcctgctgacctactggttcctgttcaggaagaagaaggaggaggtgcctgagttcaccaagatccagaccctgaccagctctgtgcgggagagcagctttgtggagaagatgaagaagacaggaagaaacatcatcgtgttctacggcagccagacaggaacagctgaggagtttgccaaccggctgagcaaggatgcccacagatatggcatgaggggcatgtctgctgaccctgaggagtatgacctggccgacctgagcagcctgcctgagattgacaatgccctggtggtgttctgcatggccacctatggagagggggaccccacagacaatgcccaggacttctatgactggctgcaggagacagatgtggacctgtctggagtgaagtttgcctag

SEQ ID NO: 163055 - DNA, 189 bp, synthetic construct
  misc_feature 1..189: note = Description of Artificial Sequence: Synthetic coding sequence
  source 1..189: mol_type = other DNA
atgatcaacatgggagacagccacgtggacaccagcagcacagtgtctgaggccgtggccgaggaggtgtccctcttctccatgacagacatgatcctcttcagcctgattgtgggcctgctgacctactggttcctgttcaggaagaagaaggaggaggtgcctgagttcaccaagatccagacctag

SEQ ID NO: 163056 - DNA, 1107 bp, synthetic construct
  misc_feature 1..1107: note = Description of Artificial Sequence: Synthetic coding sequence
  source 1..1107: mol_type = other DNA
atgggcaagtatgtggacaagaggctggagcagctgggcgcccagaggatctttgagctgggcctgggagatgatgatggcaacctggaggaggacttcatcacctggagggagcagttctggccagctgtgtgtgagcactttggagtggaggccactggagaggagagcagcatccggcagtatgagctggtggtgcacacagacattgatgctgccaaggtgtacatgggagagatgggccgcctgaagagctatgagaaccagaagcccccatttgatgccaagaaccccttcctggccgctgtgaccaccaacaggaagctgaaccagggcacagagcggcacctgatgcacctggagctggacatcagtgacagcaagatccgctatgaaagtggggaccacgtggccgtgtacccagccaatgattctgccctggtgaaccagctgggcaagatcctgggcgctgacctggatgtggtgatgagcctgaacaacctggatgaggagagcaacaagaagcaccccttcccctgccccaccagctacagaacagccctgacctactacctggacatcaccaacccccccaggaccaacgtgctgtatgagctggcccagtatgccagcgagcccagcgagcaggagctgctgaggaagatggccagcagcagcggggagggcaaggagctgtacctgtcctgggtggtggaggcccggcggcacatcctggccatcctgcaggactgccccagcctgcggccccccatcgaccacctgtgtgagctgctgccccggctgcaggcccgctactacagcatcgccagcagcagcaaggtgcaccccaacagcgtgcacatctgtgctgtggtggtggagtatgagaccaaggccggccgcatcaacaagggcgtggccaccaactggctgcgggccaaggagcctgctggagaaaatggaggccgggccctggccgtgcccaccagcacctctgtgggcatgcacggcacctggccaggcatgtgcaggacccccagcaccacctcctggctgagcagcggcccctggagcacccggcggcgctggaccaccagcagaaattag

SEQ ID NO: 163057 - DNA, 120 bp, synthetic construct
  misc_feature 1..120: note = Description of Artificial Sequence: Synthetic coding sequence
  source 1..120: mol_type = other DNA
atgatcaacatgggagacagccacgtggacaccagcagcacagtgtctgaggccgtggccgaggaggtgtccctcttctccatgacagacatgatcctcttcagcctgattgtgggctag

SEQ ID NO: 163058 - DNA, 501 bp, synthetic construct
  misc_feature 1..501: note = Description of Artificial Sequence: Synthetic coding sequence
  source 1..501: mol_type = other DNA
atgatcaacatgggagacagccacgtggacaccagcagcacagtgtctgaggccgtggccgaggaggtgtccctcttctccatgacagacatgatcctcttcagcctgattgtgggcctgctgacctactggttcctgttcaggaagaagaaggaggaggtgcctgagttcaccaagatccagaccctgaccagctctgtgcgggagagcagctttgtggagaagatgaagaagacaggaagaaacatcatcgtgttctacggcagccagacaggaacagctgaggagtttgccaaccggctgagcaaggatgcccacagatatggcatgaggggcatgtctgctgaccctgaggagtatgacctggccgacctgagcagcctgcctgagattgacaatgccctggtggtgttctgcatggccacctatggagagggggaccccacagacaatgcccaggacttctatgactggctgcaggagacagatgtggacctgtag

SEQ ID NO: 163059 - DNA, 567 bp, synthetic construct
  misc_feature 1..567: note = Description of Artificial Sequence: Synthetic coding sequence
  source 1..567: mol_type = other DNA
atgatcaacatgggagacagccacgtggacaccagcagcacagtgtctgaggccgtggccgaggaggtgtccctcttctccatgacagacatgatcctcttcagcctgattgtgggcctgctgacctactggttcctgttcaggaagaagaaggaggaggtgcctgagttcaccaagatccagaccctgaccagctctgtgcgggagagcagctttgtggagaagatgaagaagacaggaagaaacatcatcgtgttctacggcagccagacaggaacagctgaggagtttgccaaccggctgagcaaggatgcccacagatatggcatgaggggcatgtctgctgaccctgaggagtatgacctggccgacctgagcagcctgcctgagattgacaatgccctggtggtgttctgcatggccacctatggagagggggaccccacagacaatgcccaggacttctatgactggctgcaggagacagatgtggacctgtctggagtgaagtttgctgtgtttggcctgggcaacaagacctatgagcacttcaatgccatgggctag

SEQ ID NO: 163060 - DNA, 189 bp, synthetic construct; identical to SEQ ID NO: 163055
  misc_feature 1..189: note = Description of Artificial Sequence: Synthetic coding sequence
  source 1..189: mol_type = other DNA

SEQ ID NO: 163061 - DNA, 1722 bp, synthetic construct
  misc_feature 1..1722: note = Description of Artificial Sequence: Synthetic coding sequence
  source 1..1722: mol_type = other DNA
atgggcagccgctggccagctgtgcccccctggggcctgcagatccacgtgtctgagcggcagcccagccggcccccaccctgcccccagcagcccggccaggccacctgtgagaccctgagcagcgccccagaccccagcaccaccaggatgagccccccctgcccccagccccagagcgcccctgggggcatcggctgctggaggctgaaggtgtttggcctgggcaacaagacctatgagcacttcaatgccatgggcaagtatgtggacaagaggctggagcagctgggcgcccagaggatctttgagctgggcctgggagatgatgatggcaacctggaggaggacttcatcacctggagggagcagttctggccagctgtgtgtgagcactttggagtggaggccaccggggaggagagcagcatccggcagtatgagctggtggtgcacacagacattgatgctgccaaggtgtacatgggagagatgggccgcctgaagagctatgagaaccagaagcccccatttgatgccaagaaccccttcctggccgctgtgaccaccaacaggaagctgaaccagggcacagagcggcacctgatgcacctggagctggacatcagtgacagcaagatccgctatgagagcggggaccacgtggccgtgtacccagccaatgacagcgccctggtgaaccagctgggcaagatcctgggcgctgacctggatgtggtgatgagcctgaacaacctggatgaggagagcaacaagaagcaccccttcccctgccccaccagctacagaacagccctgacctactacctggacatcaccaacccccccaggaccaacgtgctgtatgagctggcccagtatgccagcgagcccagcgagcaggagctgctgaggaagatggccagcagcagtggagagggcaaggagctgtacctgtcctgggtggtggaggcccggcggcacatcctggccatcctgcaggactgccccagcctgcggccccccatcgaccacctgtgtgagctgctgccccggctgcaggcccgctactacagcatcgccagcagcagcaaggtgcaccccaacagcgtgcacatctgtgctgtggtggtggagtatgagaccaaggccggccgcatcaacaagggcgtggccaccaactggctgcgggccaaggagcctgctggggagaatggaggccgggccctggtgcccatgtttgtgaggaagagccagttccggctgcccttcaaggccaccacccctgtgatcatggtgggccctggcactggagtggcccccttcatcggcttcatccaggagcgggcctggctgcggcagcagggcaaggaggtgggggagaccctgctgtactacggctgcagaagaagtgatgaggactacctgtaccgggaggagctggcccagttccacagagatggagccctgacccagctgaatgtggccttcagccgggagcagagccacaaggtgtatgtgcagcacctgctgaagcaggaccgggagcacctgtggaagctgattgagggcggggcccacatctacgtgtgtggcacccccagcagctgccccggcatgcacggcacctggccaggcatgtgcaggacccccagcaccacctcctggctgagcagcggcccctggagcacccggcggcgctggaccaccagcaggaactag

SEQ ID NO: 163062 - DNA, 423 bp, synthetic construct
  misc_feature 1..423: note = Description of Artificial Sequence: Synthetic coding sequence
  source 1..423: mol_type = other DNA
atgatcaacatgggagacagccacgtggacaccagcagcacagtgtctgaggccgtggccgaggaggtgtccctcttctccatgacagacatgatcctcttcagcctgattgtgggcctgctgacctactggttcctgttcaggaagaagaaggaggaggtgcctgagttcaccaagatccagaccctgaccagctctgtgcgggagagcagctttgtggagaagatgaagaagacaggaagaaacatcatcgtgttctacggcagccagacaggaacagctgaggagtttgccaaccggctgagcaaggatgcccacagatatggcatgaggggcatgtctgctgaccctgaggagtatgacctggccgacctgagcagcctgcctgagattgacaatgccctggtggtgttctgcatgtag

SEQ ID NO: 163063 - DNA, 2043 bp, synthetic construct
  misc_feature 1..2043: note = Description of Artificial Sequence: Synthetic coding sequence
  source 1..2043: mol_type = other DNA
atgatcaacatgggagacagccacgtggacaccagcagcacagtgtctgaggccgtggccgaggaggtgtccctcttctccatgacagacatgatcctcttcagcctgattgtgggcctgctgacctactggttcctgttcaggaagaagaaggaggaggtgcctgagttcaccaagatccagaccctgaccagctctgtgcgggagagcagctttgtggagaagatgaagaagacaggaagaaacatcatcgtgttctacggcagccagacaggaacagctgaggagtttgccaaccggctgagcaaggatgcccacagatatggcatgaggggcatgtctgctgaccctgaggagtatgacctggccgacctgagcagcctgcctgagattgacaatgccctggtggtgttctgcatggccacctatggagagggggaccccacagacaatgcccaggacttctatgactggctgcaggagacagatgtggacctgtctggagtgaagtttgctgtgtttggcctgggcaacaagacctatgagcacttcaatgccatgggcaagtatgtggacaagaggctggagcagctgggcgcccagaggatctttgagctgggcctgggagatgatgatggcaacctggaggaggacttcatcacctggagggagcagttctggccagctgtgtgtgagcactttggagtggaggccactggagaggagagcagcatccggcagtatgagctggtggtgcacacagacattgatgctgccaaggtgtacatgggagagatgggccgcctgaagagctatgagaaccagaagcccccatttgatgccaagaaccccttcctggccgctgtgaccaccaacaggaagctgaaccagggcacagagcggcacctgatgcacctggagctggacatcagtgacagcaagatccgctatgaaagtggggaccacgtggccgtgtacccagccaatgattctgccctggtgaaccagctgggcaagatcctgggcgctgacctggatgtggtgatgagcctgaacaacctggatgaggagagcaacaagaagcaccccttcccctgccccaccagctacagaacagccctgacctactacctggacatcaccaacccccccaggaccaacgtgctgtatgagctggcccagtatgccagcgagcccagcgagcaggagctgctgaggaagatggccagcagcagcggggagggcaaggagctgtacctgtcctgggtggtggaggcccggcggcacatcctggccatcctgcaggactgccccagcctgcggccccccatcgaccacctgtgtgagctgctgccccggctgcaggcccgctactacagcatcgccagcagcagcaaggtgcaccccaacagcgtgcacatctgtgctgtggtggtggagtatgagaccaaggccggccgcatcaacaagggcgtggccaccaactggctgcgggccaaggagcctgctggagaaaatggaggccgggccctggtgcccatgtttgtgaggaagagccagttccggctgcccttcaaggccaccacccctgtgatcatggtgggccctggcaccggggtggcccccttcatcggcttcatccaggagcgggcctggctgcggcagcagggcaaggaggtgggggagaccctgctgtactacggctgccgccgcagtgatgaggactacctgtaccgggaggagctggcccagttccacagagatggagccctgacccagctgaatgtggccttcagccgggagcagagccacaaggtgtatgtgcagcacctgctgaagcaggaccgggagcacctgtggaagctgattgaaggaggagcccacatctacgtgtgtggagatgccaggaacatggccagagatgtgcagaacaccttctatgacatcgtggccgagctgggcgccatggagcacgcccaggccgtggactacatcaagaagctgatgaccaagggccgctacagcctggatgtgtggagctag

SEQ ID NO: 163064 - DNA, 1467 bp, synthetic construct
  misc_feature 1..1467: note = Description of Artificial Sequence: Synthetic coding sequence
  source 1..1467: mol_type = other DNA
atgcccaggaccagcaccaccggctgccggcggcagacctggatcagcctgggcagcagcagccggctggaggaggacttcatcacctggagggagcagttctggccagctgtgtgtgagcactttggagtggaggccactggagaggagagcagcatccggcagtatgagctggtggtgcacacagacattgatgctgccaaggtgtacatgggagagatgggccgcctgaagagctatgagaaccagaagcccccatttgatgccaagaaccccttcctggccgctgtgaccaccaacaggaagctgaaccagggcacagagcggcacctgatgcacctggagctggacatcagtgacagcaagatccgctatgaaagtggggaccacgtggccgtgtacccagccaatgattctgccctggtgaaccagctgggcaagatcctgggcgctgacctggatgtggtgatgagcctgaacaacctggatgaggagagcaacaagaagcaccccttcccctgccccaccagctacagaacagccctgacctactacctggacatcaccaacccccccaggaccaacgtgctgtatgagctggcccagtatgccagcgagcccagcgagcaggagctgctgaggaagatggccagcagcagcggggagggcaaggagctgtacctgtcctgggtggtggaggcccggcggcacatcctggccatcctgcaggactgccccagcctgcggccccccatcgaccacctgtgtgagctgctgccccggctgcaggcccgctactacagcatcgccagcagcagcaaggtgcaccccaacagcgtgcacatctgtgctgtggtggtggagtatgagaccaaggccggccgcatcaacaagggcgtggccaccaactggctgcgggccaaggagcctgctggagaaaatggaggccgggccctggtgcccatgtttgtgaggaagagccagttccggctgcccttcaaggccaccacccctgtgatcatggtgggccctggcaccggggtggcccccttcatcggcttcatccaggagcgggcctggctgcggcagcagggcaaggaggtgggggagaccctgctgtactacggctgccgccgcagtgatgaggactacctgtaccgggaggagctggcccagttccacagagatggagccctgacccagctgaatgtggccttcagccgggagcagagccacaaggtgtatgtgcagcacctgctgaagcaggaccgggagcacctgtggaagctgattgaaggaggagcccacatctacgtgtgtggagatgccaggaacatggccagagatgtgcagaacaccttctatgacatcgtggccgagctgggcgccatggagcacgcccaggccgtggactacatcaagaagctgatgaccaagggccgctacagcctggatgtgtggagctag

SEQ ID NO: 163065 - DNA, 402 bp, synthetic construct
  misc_feature 1..402: note = Description of Artificial Sequence: Synthetic coding sequence
  source 1..402: mol_type = other DNA
atgctgagccctgaggccgagcgggtgctgcgctacctggtggaggtggaggagctggccgaggaggtgctggccgacaagaggcagatcgtggacctggacaccaagaggaaccagaaccgggagggcctgcgggccctgcagaaggacctgagcctgtctgaagatgtgatggtgtgctttggaaacatgttcatcaagatgccccaccctgagaccaaggagatgattgagaaggaccaggaccacctggacaaggagattgagaagctgaggaagcagctgaaggtgaaggtgaaccggctgtttgaggcccagggcaagccagagctgaagggcttcaacctgaaccccctgaaccaggatgagctgaaggccctgaaggtgatcctgaagggctag

SEQ ID NO: 163066 - DNA, 1605 bp, synthetic construct
  misc_feature 1..1605: note = Description of Artificial Sequence: Synthetic coding sequence
  source 1..1605: mol_type = other DNA
atgaagttcaccctgggcctgggcagccgggcctggagggtgtcctgggagggcgctgctgctgctgctgctggccctggggccggcggcagcgccctgcgctgccgggcccagagggtgagcagcccccggctgggcagaagaggcagccggctgagcggggccctgcccctgtgcctgagcagaggaggcggcggggcccaggccctgcctgactgtgccggccccagccctggccaccctggccaccctggggcccggcagctggccggccccctggccatggagcagacctatggagaggtgaaccagctgggcggcgtgtttgtgaatggccggcccctgcccaatgccatccggctgagaattgtggagctggcccagctgggcatccggccctgtgacatcagccggcagctgcgggtgagccacggctgtgtgtccaagatcctggcccgctacaatgaaacaggcagcatcctgcccggggccatcggcggcagcaagccccgggtgaccacccccaacgtggtgaagcacatccgggactacaagcagggcgaccccggcatctttgcctgggagatccgggaccggctgctggctgatggagtgtgtgacaagtacaacgtgcccagcgtgagcagcatcagccgcatcctgaggaacaagattggcagcctggcccagcccggcccctatgaggccagcaagcagccccccagccagcccaccctgccctacaaccacatctaccagtacccctaccccagccctgtgagccccactggagccaagatgggcagccaccctggggtgcccggcacagctggccacgtgtccatccccaggtcctggcccagcgcccacagcgtgagcaacatcctgggcatccgcaccttcatggagcagacaggagccctggccggcagcgagggcacagcctacagccccaagatggaggactgggccggcgtgaacagaacagccttccctgccaccccagctgtgaatggcctggagaagccagccctggaggccgacatcaagtacacccagagcgccagcaccctgtctgctgtgggcggcttcctgcctgcctgtgcctacccagccagcaaccagcacggcgtgtacagcgcccctgggggcggctacctggcccctggccccccctggcccccagcccagggcccccccctggcccctcctggggccggcgtggccgtgcatggaggagagctggccgccgccatgaccttcaagcaccccagccgggagggcagcctgcctgccccagctgcccggcccaggaccccatctgtggcctacacagactgccccagccggcccaggcctccccggggcagcagccccaggacccgggcccggcgggagcggcaggccgaccccggggcccaggtgtgtgccgccgccccagccatcggcaccggcagaattggaggcctggccgaggaggaggccagcgctggccccaggggggcccggcctgccagcccccaggcccagccctgcctgtggccagaccccccccacttcctgtactggagcggcttcctgggcttcagcgagctgggcttctag

SEQ ID NO: 163067 - DNA, 1185 bp, synthetic construct
  misc_feature 1..1185: note = Description of Artificial Sequence: Synthetic coding sequence
  source 1..1185: mol_type = other DNA
atggacatgcactgcaaggctgaccccttcagcgccatgcaccctggccatggaggagtgaaccagctgggcggcgtgtttgtgaatggccggcccctgcctgatgtggtgcggcagagaattgtggagctggcccaccagggcgtgcggccctgtgacatcagccggcagctgcgggtgagccacggctgtgtgtccaagatcctgggccgctactatgaaacaggcagcatcaagccaggagtgattggaggcagcaagcccaaggtggccacccccaaggtggtggacaagattgctgagtacaagaggcagaaccccaccatgtttgcctgggagatccgggaccggctgctggccgagggcatctgtgacaatgacacagtgcccagcgtgagcagcatcaaccgcatcatccgcaccaaggtgcagcagcccttccaccccaccccagatggagctggcaccggggtgacagcccctggccacaccatcgtgcccagcacagccagcccccctgtgagcagcgccagcaatgaccctgtgggcagctacagcatcaatggcatcctgggcatccccaggagcaatggagagaagaggaagagagatgaagatgtgtctgagggctctgtgcccaacggggacagccagagcggcgtggacagcctgaggaagcacctgcgggctgacaccttcacccagcagcagctggaggccctggacagagtgtttgagcggcccagctacccagatgtgttccaggccagcgagcacatcaagtctgagcagggcaatgagtacagcctgcctgccctgaccccaggcctggatgaggtgaagagcagcctgagcgccagcaccaaccctgagctgggcagcaatgtgtctggcacccagacctaccctgtggtgacaggccgggacatggccagcaccaccctgcccggctacccacctcatgtgcccccaacaggccagggcagctaccccaccagcaccctggccggcatggtgcccggcagcgagttcagcggcaacccctacagccacccccagtacacagcctacaatgaggcctggaggttcagcaacccagccctgctgagcagcccctactactacagcgctgccccccggggcagcgccccagctgctgctgctgctgcctatgacagacactag

SEQ ID NO: 163068 - DNA, 1191 bp, synthetic construct
  misc_feature 1..1191: note = Description of Artificial Sequence: Synthetic coding sequence
  source 1..1191: mol_type = other DNA
atggacatgcactgcaaggctgaccccttcagcgccatgcaccctggccatggaggagtgaaccagctgggcggcgtgtttgtgaatggccggcccctgcctgatgtggtgcggcagagaattgtggagctggcccaccagggcgtgcggccctgtgacatcagccggcagctgcgggtgagccacggctgtgtgtccaagatcctgggccgctactatgaaacaggcagcatcaagccaggagtgattggaggcagcaagcccaaggtggccacccccaaggtggtggacaagattgctgagtacaagaggcagaaccccaccatgtttgcctgggagatccgggaccggctgctggccgagggcatctgtgacaatgacacagtgcccagcgtgagcagcatcaaccgcatcatccgcaccaaggtgcagcagcccttccaccccaccccagatggagctggcaccggggtgacagcccctggccacaccatcgtgcccagcacagccagcccccctgtgagcagcgccagcaatgaccctgtgggcagctacagcatcaatggcatcctgggcatccccaggagcaatggagagaagaggaagagagatgaagatgtgtctgagggctctgtgcccaacggggacagccagagcggcgtggacagcctgaggaagcacctgcgggctgacaccttcacccagcagcagctggaggccctggacagagtgtttgagcggcccagctacccagatgtgttccaggccagcgagcacatcaagtctgagcagggcaatgagtacagcctgcctgccctgaccccaggcctggatgaggtgaagagcagcctgagcgccagcaccaaccctgagctgggcagcaatgtgtctggcacccagacctaccctgtggtgacaggccgggacatggccagcaccaccctgcccggctacccacctcatgtgcccccaacaggccagggcagctaccccaccagcaccctggccggcatggtgcctgaggccgctgtgggccccagcagcagcctgatgagcaagccaggcaggaagctggccgaggtgcccccctgtgtgcagcccaccggggccagcagccctgccaccaggacagccacccccagcacccggcccaccacccggctgggggacagcgccaccccaccctactag

SEQ ID NO: 163069 - DNA, 990 bp, synthetic construct
  misc_feature 1..990: note = Description of Artificial Sequence: Synthetic coding sequence
  source 1..990: mol_type = other DNA
atgtttgcctgggagatccgggaccggctgctggccgagggcatctgtgacaatgacacagtgcccagcgtgagcagcatcaaccgcatcatccgcaccaaggtgcagcagcccttccaccccaccccagatggagctggcaccggggtgacagcccctggccacaccatcgtgcccagcacagccagcccccctgtgagcagcgccagcaatgaccctgtgggcagctacagcatcaatggcatcctgggcatccccaggagcaatggagagaagaggaagagagatgaggtggaggtgtacacagatcctgcccacatccggggcggcggcggcctgcacctggtgtggaccctgagagatgtgtctgagggctctgtgcccaatggagacagccagagcggcgtggacagcctgaggaagcacctgcgggctgacaccttcacccagcagcagctggaggccctggacagagtgtttgagcggcccagctacccagatgtgttccaggccagcgagcacatcaagtctgagcagggcaatgagtacagcctgcctgccctgaccccaggcctggatgaggtgaagagcagcctgagcgccagcaccaaccctgagctgggcagcaatgtgtctggcacccagacctaccctgtggtgacaggccgggacatggccagcaccaccctgcccggctacccaccccacgtgccccccaccggccagggcagctaccccaccagcaccctggccggcatggtgcccggcagcgagttcagcggcaacccctacagccacccccagtacacagcctacaatgaggcctggaggttcagcaacccagccctgctgagcagcccctactactacagcgctgccccccggggcagcctgcccctgctgcccctgcccatgacagccaccagctacagaggagaccacatcaagctgcaggccgacagctttggcctgcacatcgtgcctgtgtag

SEQ ID NO: 163070 - DNA, 1260 bp, synthetic construct
  misc_feature 1..1260: note = Description of Artificial Sequence: Synthetic coding sequence
  source 1..1260: mol_type = other DNA
atggacatgcactgcaaggctgaccccttcagcgccatgcaccctggccatggaggagtgaaccagctgggcggcgtgtttgtgaatggccggcccctgcctgatgtggtgcggcagagaattgtggagctggcccaccagggcgtgcggccctgtgacatcagccggcagctgcgggtgagccacggctgtgtgtccaagatcctgggccgctactatgaaacaggcagcatcaagccaggagtgattggaggcagcaagcccaaggtggccacccccaaggtggtggacaagattgctgagtacaagaggcagaaccccaccatgtttgcctgggagatccgggaccggctgctggccgagggcatctgtgacaatgacacagtgcccagcgtgagcagcatcaaccgcatcatccgcaccaaggtgcagcagcccttccaccccaccccagatggagctggcaccggggtgacagcccctggccacaccatcgtgcccagcacagccagcccccctgtgagcagcgccagcaatgaccctgtgggcagctacagcatcaatggcatcctgggcatccccaggagcaatggagagaagaggaagagagatgaggtggaggtgtacacagatcctgcccacatccggggcggcggcggcctgcacctggtgtggaccctgagagatgtgtctgagggctctgtgcccaatggagacagccagagcggcgtggacagcctgaggaagcacctgcgggctgacaccttcacccagcagcagctggaggccctggacagagtgtttgagcggcccagctacccagatgtgttccaggccagcgagcacatcaagtctgagcagggcaatgagtacagcctgcctgccctgaccccaggcctggatgaggtgaagagcagcctgagcgccagcaccaaccctgagctgggcagcaatgtgtctggcacccagacctaccctgtggtgacaggccgggacatggccagcaccaccctgcccggctacccaccccacgtgccccccaccggccagggcagctaccccaccagcaccctggccggcatggtgcctgaggccgctgtgggccccagcagcagcctgatgagcaagccaggcaggaagctggccgaggtgcccccctgtgtgcagcccactggagccagcagccctgccaccaggacagccacccccagcacccggcccaccacccggctgggggacagcgccaccccaccctactag

SEQ ID NO: 163071 - DNA, 645 bp, synthetic construct
  misc_feature 1..645: note = Description of Artificial Sequence: Synthetic coding sequence
  source 1..645: mol_type = other DNA
atggacatgcactgcaaggctgaccccttcagcgccatgcaccctggccatggaggagtgaaccagctgggcggcgtgtttgtgaatggccggcccctgcctgatgtggtgcggcagagaattgtggagctggcccaccagggcgtgcggccctgtgacatcagccggcagctgcgggtgagccacggctgtgtgtccaagatcctgggccgctactatgaaacaggcagcatcaagccaggagtgattggaggcagcaagcccaaggtggccacccccaaggtggtggacaagattgctgagtacaagaggcagaaccccaccatgtttgcctgggagatccgggaccggctgctggccgagggcatctgtgacaatgacacagtgcccagcgtgagcagcatcaaccgcatcatccgcaccaaggtgcagcagcccttccaccccaccccagatggagctggcaccggggtgacagcccctggccacaccatcgtgcccagcacagccagcccccctgtgagcagcgccagcaatgaccctgtgggcagctacagcatcaatggcatcctgggcatccccaggagcaatggagagaagaggaagagagatgaggtggaggtgtacacagatcctgcccactag

SEQ ID NO: 163072 - DNA, 1254 bp, synthetic construct
  misc_feature 1..1254: note = Description of Artificial Sequence: Synthetic coding sequence
  source 1..1254: mol_type = other DNA
atggacatgcactgcaaggctgaccccttcagcgccatgcaccctggccatggaggagtgaaccagctgggcggcgtgtttgtgaatggccggcccctgcctgatgtggtgcggcagagaattgtggagctggcccaccagggcgtgcggccctgtgacatcagccggcagctgcgggtgagccacggctgtgtgtccaagatcctgggccgctactatgaaacaggcagcatcaagccaggagtgattggaggcagcaagcccaaggtggccacccccaaggtggtggacaagattgctgagtacaagaggcagaaccccaccatgtttgcctgggagatccgggaccggctgctggccgagggcatctgtgacaatgacacagtgcccagcgtgagcagcatcaaccgcatcatccgcaccaaggtgcagcagcccttccaccccaccccagatggagctggcaccggggtgacagcccctggccacaccatcgtgcccagcacagccagcccccctgtgagcagcgccagcaatgaccctgtgggcagctacagcatcaatggcatcctgggcatccccaggagcaatggagagaagaggaagagagatgaggtggaggtgtacacagatcctgcccacatccggggcggcggcggcctgcacctggtgtggaccctgagagatgtgtctgagggctctgtgcccaatggagacagccagagcggcgtggacagcctgaggaagcacctgcgggctgacaccttcacccagcagcagctggaggccctggacagagtgtttgagcggcccagctacccagatgtgttccaggccagcgagcacatcaagtctgagcagggcaatgagtacagcctgcctgccctgaccccaggcctggatgaggtgaagagcagcctgagcgccagcaccaaccctgagctgggcagcaatgtgtctggcacccagacctaccctgtggtgacaggccgggacatggccagcaccaccctgcccggctacccaccccacgtgccccccaccggccagggcagctaccccaccagcaccctggccggcatggtgcccggcagcgagttcagcggcaacccctacagccacccccagtacacagcctacaatgaggcctggaggttcagcaacccagccctgctgagcagcccctactactacagcgctgccccccggggcagcgccccagctgctgctgctgctgcctatgacagacactag

SEQ ID NO: 163073 - DNA, 621 bp, synthetic construct
  misc_feature 1..621: note = Description of Artificial Sequence: Synthetic coding sequence
  source 1..621: mol_type = other DNA
atgaccaccctggccggggctgtgcccaggatgatgaggcctggccctggccagaactaccccaggagcggcttccccctggaggtgtccacccccctgggccagggccgggtgaaccagctgggcggcgtcttcatcaatggccggcccctgcccaaccacatccgccacaagatcgtggagatggcccaccacggcatccggccctgcgtcatcagccggcagctgcgggtgagccacggctgtgtgtccaagatcctgtgccgctaccaggagaccggcagcatccggcctggggccatcggcggcagcaagcccaagcaggtgaccaccccagatgtggagaagaagattgaggagtacaagcgggagaaccctggcatgttctcctgggagatccgggacaagctgctgaaggatgctgtgtgtgacaggaacacagtgcccagcgtgagcagcatcagccgcatcctgcggagcaagtttgggaagggggaggaggaggaggccgacctggagaggaaggaggccgaggagagcgagaagaaggccaagcacagcattgatggcatcctgtctgagcggggcaaggccctggtgtctggagtgagcagccactag

SEQ ID NO: 163074 - DNA, 1224 bp, synthetic construct
  misc_feature 1..1224: note = Description of Artificial Sequence: Synthetic coding sequence
  source 1..1224: mol_type = other DNA
atgaccaccctggccggggctgtgcccaggatgatgaggcctggccctggccagaactaccccaggagcggcttccccctggaggtgtccacccccctgggccagggccgggtgaaccagctgggcggcgtcttcatcaatggccggcccctgcccaaccacatccgccacaagatcgtggagatggcccaccacggcatccggccctgcgtcatcagccggcagctgcgggtgagccacggctgtgtgtccaagatcctgtgccgctaccaggagaccggcagcatccggcctggggccatcggcggcagcaagcccaagcaggtgaccaccccagatgtggagaagaagattgaggagtacaagcgggagaaccctggcatgttctcctgggagatccgggacaagctgctgaaggatgctgtgtgtgacaggaacacagtgcccagcgtgagcagcatcagccgcatcctgcggagcaagtttgggaagggggaggaggaggaggccgacctggagaggaaggaggccgaggagagcgagaagaaggccaagcacagcattgatggcatcctgtctgagcgggccagcgccccccagagtgatgagggcagtgacattgattctgagccagacctgcccctgaagaggaagcagaggaggagcaggaccaccttcaccgctgagcagctggaggagctggagcgggcctttgagaggacccactacccagacatctacacccgggaggagctggcccagagggccaagctgacagaggcccgggtgcaggtgtggttcagcaacagaagagcccgctggaggaagcaggccggggccaaccagctgatggccttcaaccacctgatccctgggggcttccccccaacagccatgcccaccctgcccacctaccagctgtctgagaccagctaccagcccaccagcatcccccaggccgtgtctgaccccagcagcacagtgcaccggccccagcccctgccccccagcacagtgcaccagagcaccatccccagcaacccagacagcagcagcgcctactgcctgcccagcaccaggcatggcttcagcagctacacagacagctttgtgccccccagcggccccagcaaccccatgaaccccaccatcggaaatggcctgagcccccaggtgcccttcatcatcagcagccagatcagcctgggcttcaagagcttctag

SEQ ID NO: 163075 - DNA, 1212 bp, synthetic construct
  misc_feature 1..1212: note = Description of Artificial Sequence: Synthetic coding sequence
  source 1..1212: mol_type = other DNA
atgaccaccctggccggggctgtgcccaggatgatgaggcctggccctggccagaactaccccaggagcggcttccccctggaggtgtccacccccctgggccagggccgggtgaaccagctgggcggcgtcttcatcaatggccggcccctgcccaaccacatccgccacaagatcgtggagatggcccaccacggcatccggccctgcgtcatcagccggcagctgcgggtgagccacggctgtgtgtccaagatcctgtgccgctaccaggagaccggcagcatccggcctggggccatcggcggcagcaagcccaagcaggtgaccaccccagatgtggagaagaagattgaggagtacaagcgggagaaccctggcatgttctcctgggagatccgggacaagctgctgaaggatgctgtgtgtgacaggaacacagtgcccagcgtgagcagcatcagccgcatcctgcggagcaagtttgggaagggggaggaggaggaggccgacctggagaggaaggaggccgaggagagcgagaagaaggccaagcacagcattgatggcatcctgtctgagcgggccagcgccccccagagtgatgagggcagtgacattgattctgagccagacctgcccctgaagaggaagcagaggaggagcaggaccaccttcaccgctgagcagctggaggagctggagcgggcctttgagaggacccactacccagacatctacacccgggaggagctggcccagagggccaagctgacagaggcccgggtgcaggtgtggttcagcaacagaagagcccgctggaggaagcaggccggggccaaccagctgatggccttcaaccacctgatccctgggggcttccccccaacagccatgcccaccctgcccacctaccagctgtctgagaccagctaccagcccaccagcatcccccaggccgtgtctgaccccagcagcacagtgcaccggccccagcccctgccccccagcacagtgcaccagagcaccatccccagcaacccagacagcagcagcgcctactgcctgcccagcaccaggcatggcttcagcagctacacagacagctttgtgccccccagcggccccagcaaccccatgaaccccaccatcggaaatggcctgagcccccaggtgcccttcatcatcagcagccagatcagcaggaagtag

SEQ ID NO: 163076 - DNA, 1440 bp, synthetic construct
  misc_feature 1..1440: note = Description of Artificial Sequence: Synthetic coding sequence
  source 1..1440: mol_type = other DNA
atgaccaccctggccggggctgtgcccaggatgatgaggcctggccctggccagaactaccccaggagcggcttccccctggaggtgtccacccccctgggccagggccgggtgaaccagctgggcggcgtcttcatcaatggccggcccctgcccaaccacatccgccacaagatcgtggagatggcccaccacggcatccggccctgcgtcatcagccggcagctgcgggtgagccacggctgtgtgtccaagatcctgtgccgctaccaggagaccggcagcatccggcctggggccatcggcggcagcaagcccaagcaggtgaccaccccagatgtggagaagaagattgaggagtacaagcgggagaaccctggcatgttctcctgggagatccgggacaagctgctgaaggatgctgtgtgtgacaggaacacagtgcccagcgtgagcagcatcagccgcatcctgcggagcaagtttgggaagggggaggaggaggaggccgacctggagaggaaggaggccgaggagagcgagaagaaggccaagcacagcattgatggcatcctgtctgagcgggccagcgccccccagagtgatgagggcagtgacattgattctgagccagacctgcccctgaagaggaagcagaggaggagcaggaccaccttcaccgctgagcagctggaggagctggagcgggcctttgagaggacccactacccagacatctacacccgggaggagctggcccagagggccaagctgacagaggcccgggtgcaggtgtggttcagcaacagaagagcccgctggaggaagcaggccggggccaaccagctgatggccttcaaccacctgatccctgggggcttccccccaacagccatgcccaccctgcccacctaccagctgtctgagaccagctaccagcccaccagcatcccccaggccgtgtctgaccccagcagcacagtgcaccggccccagcccctgccccccagcacagtgcaccagagcaccatccccagcaacccagacagcagcagcgcctactgcctgcccagcaccaggcatggcttcagcagctacacagacagctttgtgccccccagcggccccagcaaccccatgaaccccaccatcggaaatggcctgagcccccaggtgatgggcctgctgaccaaccacggcggcgtgccccaccagccccagacagattatgccctgagccccctgaccggcggcctggagcccaccaccaccgtgtctgccagctgcagccagaggctggaccacatgaagagcctggacagcctgcccaccagccagagctactgcccccccacctacagcaccaccggctacagcatggaccctgtgacaggctaccagtatggccagtatggccagagcaagccctggaccttctag

SEQ ID NO: 163077 - DNA, 1518 bp, synthetic construct
  misc_feature 1..1518: note = Description of Artificial Sequence: Synthetic coding sequence
  source 1..1518: mol_type = other DNA
atgaccaccctggccggggctgtgcccaggatgatgaggcctggccctggccagaactaccccaggagcggcttccccctggaggtgtccacccccctgggccagggccgggtgaaccagctgggcggcgtcttcatcaatggccggcccctgcccaaccacatccgccacaagatcgtggagatggcccaccacggcatccggccctgcgtcatcagccggcagctgcgggtgagccacggctgtgtgtccaagatcctgtgccgctaccaggagaccggcagcatccggcctggggccatcggcggcagcaagcccaagcaggtgaccaccccagatgtggagaagaagattgaggagtacaagcgggagaaccctggcatgttctcctgggagatccgggacaagctgctgaaggatgctgtgtgtgacaggaacacagtgcccagcgtgagcagcatcagccgcatcctgcggagcaagtttgggaagggggaggaggaggaggccgacctggagaggaaggaggccgaggagagcgagaagaaggccaagcacagcattgatggcatcctgtctgagcgggccagcgccccccagagtgatgagggcagtgacattgattctgagccagacctgcccctgaagaggaagcagaggaggagcaggaccaccttcaccgctgagcagctggaggagctggagcgggcctttgagaggacccactacccagacatctacacccgggaggagctggcccagagggccaagctgacagaggcccgggtgcaggtgtggttcagcaacagaagagcccgctggaggaagcaggccggggccaaccagctgatggccttcaaccacctgatccctgggggcttccccccaacagccatgcccaccctgcccacctaccagctgtctgagaccagctaccagcccaccagcatcccccaggccgtgtctgaccccagcagcacagtgcaccggccccagcccctgccccccagcacagtgcaccagagcaccatccccagcaacccagacagcagcagcgcctactgcctgcccagcaccaggcatggcttcagcagctacacagacagctttgtgccccccagcggccccagcaaccccatgaaccccaccatcggaaatggcctgagcccccaggtgatgggcctgctgaccaaccacggcggcgtgccccaccagccccagacagattatgccctgagccccctgaccggcggcctggagcccaccaccaccgtgtctgccagctgcagccagaggctggaccacatgaagagcctggacagcctgcccaccagccagagctactgcccccccacctacagcaccaccggctacagcatggaccctgtgacaggctaccagtatggccagtatggccagagcgccttccactacctgaagccagacatcgcctggttccagatcctgctgaacacctttgacaagagcagtggagaggaggaggacctggagcagtag

SEQ ID NO: 163078 - DNA, 1455 bp, synthetic construct
  misc_feature 1..1455: note = Description of Artificial Sequence: Synthetic coding sequence
  source 1..1455: mol_type = other DNA
atgaccaccctggccggggctgtgcccaggatgatgaggcctggccctggccagaactaccccaggagcggcttccccctggaggtgtccacccccctgggccagggccgggtgaaccagctgggcggcgtcttcatcaatggccggcccctgcccaaccacatccgccacaagatcgtggagatggcccaccacggcatccggccctgcgtcatcagccggcagctgcgggtgagccacggctgtgtgtccaagatcctgtgccgctaccaggagaccggcagcatccggcctggggccatcggcggcagcaagcccaagcaggtgaccaccccagatgtggagaagaagattgaggagtacaagcgggagaaccctggcatgttctcctgggagatccgggacaagctgctgaaggatgctgtgtgtgacaggaacacagtgcccagcgtgagcagcatcagccgcatcctgcggagcaagtttgggaagggggaggaggaggaggccgacctggagaggaaggaggccgaggagagcgagaagaaggccaagcacagcattgatggcatcctgtctgagcgggccagcgccccccagagtgatgagggcagtgacattgattctgagccagacctgcccctgaagaggaagcagaggaggagcaggaccaccttcaccgctgagcagctggaggagctggagcgggcctttgagaggacccactacccagacatctacacccgggaggagctggcccagagggccaagctgacagaggcccgggtgcaggtgtggttcagcaacagaagagcccgctggaggaagcaggccggggccaaccagctgatggccttcaaccacctgatccctgggggcttccccccaacagccatgcccaccctgcccacctaccagctgtctgagaccagctaccagcccaccagcatcccccaggccgtgtctgaccccagcagcacagtgcaccggccccagcccctgccccccagcacagtgcaccagagcaccatccccagcaacccagacagcagcagcgcctactgcctgcccagcaccaggcatggcttcagcagctacacagacagctttgtgccccccagcggccccagcaaccccatgaaccccaccatcggaaatggcctgagcccccaggtgatgggcctgctgaccaaccacggcggcgtgccccaccagccccagacagattatgccctgagccccctgaccggcggcctggagcccaccaccaccgtgtctgccagctgcagccagaggctggaccacatgaagagcctggacagcctgcccaccagccagagctactgcccccccacctacagcaccaccggctacagcatggaccctgtgacaggctaccagtatggccagtatggccagagcgccttccactacctgaagccagacatcgcctag

SEQ ID NO: 163079 - DNA, 1452 bp, synthetic construct
  misc_feature 1..1452: note = Description of Artificial Sequence: Synthetic coding sequence
  source 1..1452: mol_type = other DNA
atgaccaccctggccggggctgtgcccaggatgatgaggcctggccctggccagaactaccccaggagcggcttccccctggaggtgtccacccccctgggccagggccgggtgaaccagctgggcggcgtcttcatcaatggccggcccctgcccaaccacatccgccacaagatcgtggagatggcccaccacggcatccggccctgcgtcatcagccggcagctgcgggtgagccacggctgtgtgtccaagatcctgtgccgctaccaggagaccggcagcatccggcctggggccatcggcggcagcaagcccaaggtgaccaccccagatgtggagaagaagattgaggagtacaagagagaaaatcctggcatgttctcctgggagatccgggacaagctgctgaaggatgctgtgtgtgacaggaacacagtgcccagcgtgagcagcatcagccgcatcctgcggagcaagtttggaaaaggagaggaggaggaggccgacctggagaggaaggaggccgaggagagcgagaagaaggccaagcacagcattgatggcatcctgtctgagcgggccagcgccccccagagtgatgagggcagtgacatcgacagcgagccagacctgcccctgaagaggaagcagaggaggagcaggaccaccttcaccgctgagcagctggaggagctggagcgggcctttgagaggacccactacccagacatctacacccgggaggagctggcccagagggccaagctgacagaggcccgggtgcaggtgtggttcagcaacagaagagcccgctggaggaagcaggccggggccaaccagctgatggccttcaaccacctgatccctgggggcttccccccaacagccatgcccaccctgcccacctaccagctgtctgagaccagctaccagcccaccagcatcccccaggccgtgtctgaccccagcagcacagtgcaccggccccagcccctgccccccagcacagtgcaccagagcaccatccccagcaacccagacagcagcagcgcctactgcctgcccagcaccaggcatggcttcagcagctacacagacagctttgtgcccccatctggccccagcaaccccatgaaccccaccatcggaaatggcctgagcccccaggtgatgggcctgctgaccaaccacggcggcgtgccccaccagccccagacagattatgccctgagccccctgactggaggcctggagcccaccaccaccgtgtctgccagctgcagccagaggctggaccacatgaagagcctggacagcctgcccaccagccagagctactgcccccccacctacagcaccaccggctacagcatggaccctgtgacaggctaccagtatggccagtatggccagagcgccttccactacctgaagccagacatcgcctag

SEQ ID NO: 163080 - DNA, 648 bp, synthetic construct
  misc_feature 1..648: note = Description of Artificial Sequence: Synthetic coding sequence
  source 1..648: mol_type = other DNA
atgaccaccctggccggggctgtgcccaggatgatgaggcctggccctggccagaactaccccaggagcggcttccccctggaggtgtccacccccctgggccagggccgggtgaaccagctgggcggcgtcttcatcaatggccggcccctgcccaaccacatccgccacaagatcgtggagatggcccaccacggcatccggccctgcgtcatcagccggcagctgcgggtgagccacggctgtgtgtccaagatcctgtgccgctaccaggagaccggcagcatccggcctggggccatcggcggcagcaagcccaagcaggtgaccaccccagatgtggagaagaagattgaggagtacaagcgggagaaccctggcatgttctcctgggagatccgggacaagctgctgaaggatgctgtgtgtgacaggaacacagtgcccagcgtgagcagcatcagccgcatcctgcggagcaagtttgggaagggggaggaggaggaggccgacctggagaggaaggaggccgaggagagcgagaagaaggccaagcacagcattgatggcatcctgtctgagcggggcaagcgctggaggctgggccgccgcacctgctgggtgacctggagggccagcgccagctag

SEQ ID NO: 163081 - DNA, 822 bp, synthetic construct
  misc_feature 1..822: note = Description of Artificial Sequence: Synthetic coding sequence
  source 1..822: mol_type = other DNA
atgcaccaggacggcatcagctccatgaaccagctgggcggcctgtttgtgaatggccggcccctgcccctggacacccggcagcagatcgtgcggctggccgtgtctggcatgaggccctgtgacatcagccgcatcctgaaggtgtccaatggctgtgtgtccaagatcctgggccgctactacagaactggagtgctggagcccaagggcatcggcggcagcaagccccggctggccaccccacctgtggtggcccgcatcgcccagctgaagggggagtgcccagccctgtttgcctgggagatccagaggcagctgtgtgccgagggcctgtgcacccaggacaagacccccagcgtgagcagcatcaacagagtgctgcgggccctgcaggaggaccagggcctgccctgcacccggctgcggagccctgctgtgctggccccagctgtgctgaccccccacagcggcagcgagaccccccggggcacccaccctggcaccggccacaggaacagaaccatcttcagccccagccaggccgaggccctggagaaggagttccagaggggccagtacccagattctgtggcccggggcaagctggccacagccaccagcctgcctgaagatactgtgcgggtgtggttcagcaacagaagagccaagtggaggcggcaggagaagctgaagtgggagatgcagctgcctgctgtgccctggcagtgtgcccacagcagccctgcctgccccggcaccaccggcagcctgctgctgtctgctgtgctgggcaacagcaccaggaaggtgtctgagtag

SEQ ID NO: 163082 - DNA, 1032 bp, synthetic construct
  misc_feature 1..1032: note = Description of Artificial Sequence: Synthetic coding sequence
  source 1..1032: mol_type = other DNA
atgaaccagctgggcggcctgtttgtgaatggccggcccctgcccctggacacccggcagcagatcgtgcggctggccgtgtctggcatgaggccctgtgacatcagccgcatcctgaaggtgtccaatggctgtgtgtccaagatcctgggccgctactacagaactggagtgctggagcccaagggcatcggcggcagcaagccccggctggccaccccacctgtggtggcccgcatcgcccagctgaagggggagtgcccagccctgtttgcctgggagatccagaggcagctgtgtgccgagggcctgtgcacccaggacaagacccccagcgtgagcagcatcaacagagtgctgcgggccctgcaggaggaccagggcctgccctgcacccggctgcggagccctgctgtgctggccccagctgtgctgaccccccacagcggcagcgagaccccccggggcacccaccctggcaccggccacaggaacagaaccatcttcagccccagccaggccgaggccctggagaaggagttccagaggggccagtacccagattctgtggcccggggcaagctggccacagccaccagcctgcctgaagatactgtgcgggtgtggttcagcaacagaagagccaagtggaggcggcaggagaagctgaagtgggagatgcagctgcccggggccagccagggcctgactgtgccccgggtggcccctggcatcatcagcgcccagcagagccctggctctgtgcccacagctgccctgcctgccctggagcccctgggccccagctgctaccagctgtgctgggccacagcccctgagcgctgcctgagtgacaccccacccaaggcctgcctgaagccctgctggggccacctgcccccccagcccaacagcctggacagcggcctgctgtgcctgccctgccccagcagccactgccacctggccagcctgagcggcagccaggccctgctgtggccaggctgccccctgctgtatggcctggagtag

SEQ ID NO: 163083 - DNA, 1047 bp, synthetic construct
  misc_feature 1..1047: note = Description of Artificial Sequence: Synthetic coding sequence
  source 1..1047: mol_type = other DNA
atgcaccaggacggcatcagctccatgaaccagctgggcggcctgtttgtgaatggccggcccctgcccctggacacccggcagcagatcgtgcggctggccgtgtctggcatgaggccctgtgacatcagccgcatcctgaaggtgtccaatggctgtgtgtccaagatcctgggccgctactacagaactggagtgctggagcccaagggcatcggcggcagcaagccccggctggccaccccacctgtggtggcccgcatcgcccagctgaagggggagtgcccagccctgtttgcctgggagatccagaggcagctgtgtgccgagggcctgtgcacccaggacaagacccccagcgtgagcagcatcaacagagtgctgcgggccctgcaggaggaccagggcctgccctgcacccggctgcggagccctgctgtgctggccccagctgtgctgaccccccacagcggcagcgagaccccccggggcacccaccctggcaccggccacaggaacagaaccatcttcagccccagccaggccgaggccctggagaaggagttccagaggggccagtacccagattctgtggcccggggcaagctggccacagccaccagcctgcctgaagatactgtgcgggtgtggttcagcaacagaagagccaagtggaggcggcaggagaagctgaagtgggagatgcagctgcccggggccagccagggcctgactgtgccccgggtggcccctggcatcatcagcgcccagcagagccctggctctgtgcccacagctgccctgcctgccctggagcccctgggccccagctgctaccagctgtgctgggccacagcccctgagcgctgcctgagtgacaccccacccaaggcctgcctgaagccctgctgggactgtggcagcttcctgctgcccgtcatcgcccccagctgtgtggatgtggcctggccctgcctggatgccagcctggcccaccacctgattggaggagctgggaaggccacccccacccacttcagccactag

SEQ ID NO: 163084 - DNA, 1563 bp, synthetic construct
  misc_feature 1..1563: note = Description of Artificial Sequence: Synthetic coding sequence
  source 1..1563: mol_type = other DNA
atggccgccctgcccggcaccgtgcccaggatgatgaggcctgcccctggccagaactaccccaggacaggcttccccctggaggtgtccacccccctgggccagggccgggtgaaccagctgggcggcgtcttcatcaatggccggcccctgcccaaccacatccgccacaagatcgtggagatggcccaccacggcatccggccctgcgtcatcagccggcagctgcgggtgagccacggctgtgtgtccaagatcctgtgccgctaccaggagaccggcagcatccggcctggggccatcggcggcagcaagccccggcaggtggccaccccagatgtggagaagaagattgaggagtacaagcgggagaaccctggcatgttctcctgggagatccgggaccggctgctgaaggatggccactgtgacaggagcacagtgcccagcggcctggtgagcagcatcagccgggtgctgcgcatcaagtttgggaagaaggaggaggaggatgaagctgacaagaaggaggatgatggagagaagaaggccaagcacagcattgatggcatcctgggggacaagggcaaccggctggatgagggcagtgatgtggagagcgagccagacctgcccctgaagaggaagcagaggaggagcaggaccaccttcaccgctgagcagctggaggagctggagaaggcctttgagaggacccactacccagacatctacacccgggaggagctggcccagaggaccaagctgacagaggcccgggtgcaggtgtggttcagcaacagaagagcccgctggaggaagcaggccggggccaaccagctggccgccttcaaccacctgctgcccggcggcttccccccaacaggcatgcccaccctgcccccctaccagctgcctgacagcacctaccccaccaccaccatcagccaggacggcggcagcacagtgcaccggccccagcccctgccccccagcaccatgcaccagggcggcctggccgctgctgctgctgctgctgacaccagcagcgcctacggggcccggcacagcttcagcagctacagcgacagcttcatgaacccagctgcccccagcaaccacatgaaccctgtgtccaatggcctgagcccccaggtgatgagcatcctgggcaaccccagcgctgtgcccccccagccccaggccgacttcagcatcagccccctgcacggcggcctggacagcgccaccagcatcagcgccagctgcagccagagagctgacagcatcaagccaggggacagcctgcccaccagccaggcctactgcccccccacctacagcaccaccggctacagcgtggaccctgtggccggctaccagtatggccagtatggccagagtgaatgtctggtgccctgggccagccctgtgcccatccccagccccaccccccgggccagctgcctcttcatggagagctacaaggtggtgtctggctggggcatgagcatcagccagatggagaagctgaagagcagccagatggagcagttcacctag

SEQ ID NO: 163085 - DNA, 1557 bp, synthetic construct
  misc_feature 1..1557: note = Description of Artificial Sequence: Synthetic coding sequence
  source 1..1557: mol_type = other DNA
atggccgccctgcccggcaccgtgcccaggatgatgaggcctgcccctggccagaactaccccaggacaggcttccccctggaggtgtccacccccctgggccagggccgggtgaaccagctgggcggcgtcttcatcaatggccggcccctgcccaaccacatccgccacaagatcgtggagatggcccaccacggcatccggccctgcgtcatcagccggcagctgcgggtgagccacggctgtgtgtccaagatcctgtgccgctaccaggagaccggcagcatccggcctggggccatcggcggcagcaagccccggcaggtggccaccccagatgtggagaagaagattgaggagtacaagcgggagaaccctggcatgttctcctgggagatccgggaccggctgctgaaggatggccactgtgacaggagcacagtgcccagcgtgagcagcatcagccgggtgctgcgcatcaagtttgggaagaaggaggaggaggatgaagctgacaagaaggaggatgatggagagaagaaggccaagcacagcattgatggcatcctgggggacaagggcaaccggctggatgagggcagtgatgtggagagcgagccagacctgcccctgaagaggaagcagaggaggagcaggaccaccttcaccgctgagcagctggaggagctggagaaggcctttgagaggacccactacccagacatctacacccgggaggagctggcccagaggaccaagctgacagaggcccgggtgcaggtgtggttcagcaacagaagagcccgctggaggaagcaggccggggccaaccagctggccgccttcaaccacctgctgcccggcggcttccccccaacaggcatgcccaccctgcccccctaccagctgcctgacagcacctaccccaccaccaccatcagccaggacggcggcagcacagtgcaccggccccagcccctgccccccagcaccatgcaccagggcggcctggccgctgctgctgctgctgctgacaccagcagcgcctacggggcccggcacagcttcagcagctacagcgacagcttcatgaacccagctgcccccagcaaccacatgaaccctgtgtccaatggcctgagcccccaggtgatgagcatcctgggcaaccccagcgctgtgcccccccagccccaggccgacttcagcatcagccccctgcacggcggcctggacagcgccaccagcatcagcgccagctgcagccagagagctgacagcatcaagccaggggacagcctgcccaccagccaggcctactgcccccccacctacagcaccaccggctacagcgtggaccctgtggccggctaccagtatggccagtatggccagagtgaatgtctggtgccctgggccagccctgtgcccatccccagccccaccccccgggccagctgcctcttcatggagagctacaaggtggtgtctggctggggcatgagcatcagccagatggagaagctgaagagcagccagatggagcagttcacctag

SEQ ID NO: 163086 - DNA, 1518 bp, synthetic construct
  misc_feature 1..1518: note = Description of Artificial Sequence: Synthetic coding sequence
  source 1..1518: mol_type = other DNA
atggccgccctgcccggcaccgtgcccaggatgatgaggcctgcccctggccagaactaccccaggacaggcttccccctggaggtgtccacccccctgggccagggccgggtgaaccagctgggcggcgtcttcatcaatggccggcccctgcccaaccacatccgccacaagatcgtggagatggcccaccacggcatccggccctgcgtcatcagccggcagctgcgggtgagccacggctgtgtgtccaagatcctgtgccgctaccaggagaccggcagcatccggcctggggccatcggcggcagcaagccccggcaggtggccaccccagatgtggagaagaagattgaggagtacaagcgggagaaccctggcatgttctcctgggagatccgggaccggctgctgaaggatggccactgtgacaggagcacagtgcccagcggcctggtgagcagcatcagccgggtgctgcgcatcaagtttgggaagaaggaggaggaggatgaagctgacaagaaggaggatgatggagagaagaaggccaagcacagcattgatggcatcctgggggacaagggcaaccggctggatgagggcagtgatgtggagagcgagccagacctgcccctgaagaggaagcagaggaggagcaggaccaccttcaccgctgagcagctggaggagctggagaaggcctttgagaggacccactacccagacatctacacccgggaggagctggcccagaggaccaagctgacagaggcccgggtgcaggtgtggttcagcaacagaagagcccgctggaggaagcaggccggggccaaccagctggccgccttcaaccacctgctgcccggcggcttccccccaacaggcatgcccaccctgcccccctaccagctgcctgacagcacctaccccaccaccaccatcagccaggacggcggcagcacagtgcaccggccccagcccctgccccccagcaccatgcaccagggcggcctggccgctgctgctgctgctgctgacaccagcagcgcctacggggcccggcacagcttcagcagctacagcgacagcttcatgaacccagctgcccccagcaaccacatgaaccctgtgtccaatggcctgagcccccaggtgatgagcatcctgggcaaccccagcgctgtgcccccccagccccaggccgacttcagcatcagccccctgcacggcggcctggacagcgccaccagcatcagcgccagctgcagccagagagctgacagcatcaagccaggggacagcctgcccaccagccaggcctactgcccccccacctacagcaccaccggctacagcgtggaccctgtggccggctaccagtatggccagtatggccagacagctgtggactacctggccaagaatgtgtccctgagcacccagaggaggatgaagctgggggagcacagcgctgtgctgggcctgctgcctgtggagaccggccaggcctactag

SEQ ID NO: 163087 - DNA, 1026 bp, synthetic construct
  misc_feature 1..1026: note = Description of Artificial Sequence: Synthetic coding sequence
  source 1..1026: mol_type = other DNA
atggagcccgcctttggagaggtgaaccagctgggcggcgtgtttgtgaatggccggcccctgcccaatgccatccggctgagaattgtggagctggcccagctgggcatccggccctgtgacatcagccggcagctgcgggtgagccacggctgtgtgtccaagatcctggcccgctacaatgaaacaggcagcatcctgcccggggccatcggcggcagcaagccccgggtgaccacccccaccgtggtgaagcacatccgcacctacaagcagagggaccccggcatctttgcctgggagatccgggaccggctgctggctgatggagtgtgtgacaagtacaacgtgcccagcgtgagcagcatcagccgcatcctgaggaacaagattggcaacctggcccagcagggccactatgacagctacaagcagcaccagcccaccccccagcctgccctgccctacaaccacatctacagctaccccagccccatcacagctgctgctgccaaggtgcccaccccacctggggtgcctgccatccctggctctgtggccatgcccaggacctggcccagcagccacagcgtgacagacatcctgggcatccgcagcatcacagaccaggtgtctgacagcagcccctaccacagccccaaggtggaggagtggagcagcctgggcaggaacaacttccctgctgctgcccctcatgctgtgaatggcctggagaagggggccctggagcaggaggccaagtatggccaggcccccaacggcctgcctgctgtgggcagctttgtgtctgccagctccatggccccctaccccaccccagcccaggtgagcccctacatgacctacagcgctgcccccagcggctacgtggccggccacggctggcagcacgccggcggcaccagcctgagcccccacaactgtgacatcccagccagcctggccttcaagggcatgcaggccgcccgggagggcagccacagcgtgacagccagcgccctgtag

SEQ ID NO: 163088 - DNA, 1026 bp, synthetic construct; identical to SEQ ID NO: 163087
  misc_feature 1..1026: note = Description of Artificial Sequence: Synthetic coding sequence
  source 1..1026: mol_type = other DNA

SEQ ID NO: 163089 - DNA, 183 bp, synthetic construct
  misc_feature 1..183: note = Description of Artificial Sequence: Synthetic coding sequence
  source 1..183: mol_type = other DNA
agtgacagcagcccctaccacagccccaaggtggaggagtggagcagcctgggcaggaacaacttccctgctgctgcccctcatgctgtgaatggcctggagaagggggccctggagcaggaggccaagtatggccagatccagaacttcttcctgctgatgatcagccggctgaagttctag

SEQ ID NO: 163090 - DNA, 912 bp, synthetic construct
  misc_feature 1..912: note = Description of Artificial Sequence: Synthetic coding sequence
  source 1..912: mol_type = other DNA
atgggccggcccctgctgctgcccctgctgcccctgctgctgcccccagccttcctgcagcccagcggcagcactggaagtggccccagctacctgtatggagtgacccagcccaagcacctgagcgcctccatgggcggctctgtggagatccccttctccttctactacccctgggagctggccacagccccagatgtgcgcatctcctggaggcggggccacttccaccggcagagcttctacagcacccggccccccagcatccacaaggactatgtgaacagactcttcctgaactggacagagggccagaagagcggcttcctgcgcatcagcaacctgcagaagcaggaccagagcgtgtacttctgccgggtggagctggacaccaggagcagcggccggcagcagtggcagagcattgagggcaccaagctgagcatcacccaggccgtgaccaccaccacccagaggcccagctccatgaccaccacctggaggctgagcagcaccaccaccaccaccggcctgcgggtgacccagggcaagagaagaagtgacagctggcacatcagcctggagacagctgtgggcgtggccgtggccgtgacagtgctgggcatcatgatcctgggcctcatctgcctgctgcgctggaggaggaggaagggccagcagaggaccaaggccaccaccccagcccgggagcccttccagaacacagaggagccctatgagaacatcagaaatgaaggccagaacacagaccccaagctgaaccccaaggatgatggcatcgtgtatgccagcctggccctgagcagcagcaccagcccccgggccccacccagccaccggcccctgaagagcccccagaatgagaccctgtacagcgtgctgaaggcctag

SEQ ID NO: 163091 - DNA, 693 bp, synthetic construct
  misc_feature 1..693: note = Description of Artificial Sequence: Synthetic coding sequence
  source 1..693: mol_type = other DNA
atgggccggcccctgctgctgcccctgctgcccctgctgctgcccccagccttcctgcagcccagcggcagcactggaagtggccccagctacctgtatggagtgacccagcccaagcacctgagcgcctccatgggcggctctgtggagatccccttctccttctactacccctgggagctggccacagccccagatgtgcgcatctcctggaggcggggccacttccaccggcagagcttctacagcacccggccccccagcatccacaaggactatgtgaacagactcttcctgaactggacagagggccagaagagcggcttcctgcgcatcagcaacctgcagaagcaggaccagagcgtgtacttctgccgggtggagctggacaccaggagcagcggccggcagcagtggcagagcattgagggcaccaagctgagcatcacccagggccagcagaggaccaaggccaccaccccagcccgggagcccttccagaacacagaggagccctatgagaacatcagaaatgaaggccagaacacagaccccaagctgaaccccaaggatgatggcatcgtgtatgccagcctggccctgagcagcagcaccagcccccgggccccacccagccaccggcccctgaagagcccccagaatgagaccctgtacagcgtgctgaaggcctag

SEQ ID NO: 163092 - DNA, 528 bp, synthetic construct
  misc_feature 1..528: note = Description of Artificial Sequence: Synthetic coding sequence
  source 1..528: mol_type = other DNA
atgggccggcccctgctgctgcccctgctgcccctgctgctgcccccagccttcctgcagcccagcggcagcactggaagtggccccagctacctgtatggagtgacccagcccaagcacctgagcgcctccatgggcggctctgtggagatccccttctccttctactacccctgggagctggccacagccccagatgtgcgcatctcctggaggcggggccacttccaccggcagagcttctacagcacccggccccccagcatccacaaggactatgtgaacagactcttcctgaactggacagagggccagaagagcggcttcctgcgcatcagcaacctgcagaagcaggaccagagcgtgtacttctgccgggtggagctggacaccaggagcagcggccggcagcagtggcagagcattgagggcaccaagctgagcatcacccagggcaaccccagcaagacccagaggagccacatgaggatcagcggcatgaaggacaagatccagatccccagctag

SEQ ID NO: 163093 - DNA, 492 bp, synthetic construct
  misc_feature 1..492: note = Description of Artificial Sequence: Synthetic coding sequence
  source 1..492: mol_type = other DNA
atgggccggcccctgctgctgcccctgctgcccctgctgctgcccccagccttcctgcagcccagcggcagcactggaagtggccccagctacctgtatggagtgacccagcccaagcacctgagcgcctccatgggcggctctgtggagatccccttctccttctactacccctgggagctggccacagccccagatgtgcgcatctcctggaggcggggccacttccaccggcagagcttctacagcacccggccccccagcatccacaaggactatgtgaacagactcttcctgaactggacagagggccagaagagcggcttcctgcgcatcagcaacctgcagaagcaggaccagagcgtgtacttctgccgggtggagctggacaccaggagcagcggccggcagcagtggcagagcattgagggcaccaagctgagcatcacccagggccagcagaggaccaaggccaccaccccagccaggtag

SEQ ID NO: 163094 - DNA, 684 bp, synthetic construct
  misc_feature 1..684: note = Description of Artificial Sequence: Synthetic coding sequence
  source 1..684: mol_type = other DNA
atgggccggcccctgctgctgcccctgctgctgctgctgcagcccccagccttcctgcagcccggcggcagcactggaagtggccccagctacctgtatggagtgacccagcccaagcacctgagcgcctccatgggcggctctgtggagatccccttctccttctactacccctgggagctggccatcgtgcccaacgtgcgcatctcctggaggcggggccacttccacggccagagcttctacagcacccggccccccagcatccacaaggactatgtgaacagactcttcctgaactggacagagggccaggagagcggcttcctgcgcatcagcaacctgaggaaggaggaccagagcgtgtacttctgccgggtggagctggacacccggcgcagcggccggcagcagctgcagagcatcaagggcaccaagctgaccatcacccaggccgtgaccaccaccaccacctggaggcccagcagcaccaccaccatcgccggcctgcgggtgacagagagcaagggccacagcgagagctggcacctgagcctggacacagccatccgggtggccctggccgtggccgtgctgaagacagtcatcctgggcctgctgtgcctgctgctgctgtggtggaggaggaggaagggcagccgggcccccagcagtgacttctag

SEQ ID NO: 163095 - DNA, 999 bp, synthetic construct
  misc_feature 1..999: note = Description of Artificial Sequence: Synthetic coding sequence
  source 1..999: mol_type = other DNA
atgggccgggccagctatggaggcagccctgtgggccaccagagcagcagtgaccacccccgggccaagacctgccgcagccctgtgagagatggccccaggaccctgtgtggggtgcccaccgtggccctgagcctgcacttcctgcgggaggccagcagcggcagcaggacctgtggccgccgcaccagcctgtgcaccagcgccaagagctcctggacctacagaagtgccctgcggcagcccctgcaccgggcccccctgctgcccggccagctgtgctggagcccccggcccctggagaagaacaaggccatgggccggcccctgctgctgcccctgctgctgctgctgcagcccccagccttcctgcagcccggcggcagcacaggcagcggccccagctacctgtatggagtgacccagcccaagcacctgagcgcctccatgggcggctctgtggagatccccttctccttctactacccctgggagctggccatcgtgcccaacgtgcgcatctcctggaggcggggccacttccacggccagagcttctacagcaccaggcctccttccatccacaaggactatgtgaacagactcttcctgaactggacagagggccaggagagcggcttcctgcgcatcagcaacctgaggaaagaagaccagagcgtgtacttctgccgggtggagctggacaccaggagaagtggccggcagcagctgcagagcatcaagggcaccaagctgaccatcacccaggccgtgaccaccaccaccacctggaggcccagcagcaccaccaccatcgccggcctgcgggtgacagagagcaagggccacagcgagagctggcacctgagcctggacacagccatccgggtggccctggccgtggccgtgctgaagacagtcatcctgggcctgctgtgcctgctgctgctgtggtggaggaggaggaagggcagccgggcccccagcagtgacttctag

SEQ ID NO: 163096 - DNA, 384 bp, synthetic construct
  misc_feature 1..384: note = Description of Artificial Sequence: Synthetic coding sequence
  source 1..384: mol_type = other DNA
atgggccggcccctgctgctgcccctgctgctgctgctgcagcccccagccttcctgcagcccggcggcagcactggaagtggccccagctacctgtatggagtgacccagcccaagcacctgagcgcctccatgggcggctctgtggagatccccttctccttctactacccctgggagctggccatcgtgcccaacgtgcgcatctcctggaggcggggccacttccacggccagagcttctacagcacccggccccccagcatccacaaggactatgtgaacagactcttcctgaactggacagagggccaggagagcggcttcctgcgcatcagcaacctgaggaaggaggaccagagcgtgtacttctgccgggtgtag

SEQ ID NO: 163097 - DNA, 684 bp, synthetic construct; identical to SEQ ID NO: 163094
  misc_feature 1..684: note = Description of Artificial Sequence: Synthetic coding sequence
  source 1..684: mol_type = other DNA

SEQ ID NO: 163098 - DNA, 384 bp, synthetic construct; identical to SEQ ID NO: 163096
  misc_feature 1..384: note = Description of Artificial Sequence: Synthetic coding sequence
  source 1..384: mol_type = other DNA

SEQ ID NO: 163099 - DNA, 183 bp, synthetic construct
  misc_feature 1..183: note = Description of Artificial Sequence: Synthetic coding sequence
  source 1..183: mol_type = other DNA
atgggccggcccctgctgctgcccctgctgctgctgctgcagcccccagccttcctgcagcccggcctgtgtgagcccgccctgtctgagctggaccggggcagcggggagcggctgccccaggacctgaagccagctgagggcggccctgtgtgtgtgttcctgcccagcagagctggatag

SEQ ID NO: 163100 - DNA, 366 bp, synthetic construct
  misc_feature 1..366: note = Description of Artificial Sequence: Synthetic coding sequence
  source 1..366: mol_type = other DNA
atgggccggcccctgctgctgcccctgctgctgctgctgcagcccccagccttcctgcagcccggcggcagcactggaagtggccccagctacctgtatggagtgacccagcccaagcacctgagcgcctccatgggcggctctgtggagatccccttctccttctactacccctgggagctggccatcgtgcccaacgtgcgcatctcctggaggcggggccacttccacggccagagcttctacagcacccggccccccagcatccacaaggactatgtgaacagactcttcctgaactggacagagggccaggagagcggcttcctgcgcatcagcaacctgaggaaggaggaccagagctag

SEQ ID NO: 163101 - DNA, 384 bp, synthetic construct; identical to SEQ ID NO: 163096
  misc_feature 1..384: note = Description of Artificial Sequence: Synthetic coding sequence
  source 1..384: mol_type = other DNA

SEQ ID NO: 163102 - DNA, 684 bp, synthetic construct; identical to SEQ ID NO: 163094
  misc_feature 1..684: note = Description of Artificial Sequence: Synthetic coding sequence
  source 1..684: mol_type = other DNA

SEQ ID NO: 163103 - DNA, 450 bp, synthetic construct
  misc_feature 1..450: note = Description of Artificial Sequence: Synthetic coding sequence
  source 1..450: mol_type = other DNA
atgggccggcccctgctgctgcccctgctgctgctgctgcagcccccagccttcctgcagcccggcctgtgtgagcccgccctgtctgagctggaccggggcagcggggagcggctgccccaggacctgaagccagctgagggcggccctgtgtgtgtgttcctgcccagcagagctggccaccctgagatccgggaggccgctgtggccgtgcaccagggcgaccagacccaccaccaccctggctgccacaaccaccaccacctggaggcccagcagcacaaccaccacagccggccccagggccacaggaagcagagggccctgcgcatcatggcccccaagagcggccactgccaccagggctgcatcggctgccgctgtgcccagaactgccacttcggcacagctgtgcccccacctcctgtggtggaggagaaggagaggtag

SEQ ID NO: 163104 - DNA, 816 bp, synthetic construct
  misc_feature 1..816: note = Description of Artificial Sequence: Synthetic coding sequence
  source 1..816: mol_type = other DNA
atgggccgggccagctatggaggcagccctgtgggccaccagagcagcagtgaccacccccgggccaagacctgccgcagccctgtgagagatggccccaggaccctgtgtggggtgcccaccgtggccctgagcctgcacttcctgcgggaggccagcagcggcagcaggacctgtggccgccgcaccagcctgtgcaccagcgccaagagctcctggacctacagaagtggccgcctgtcctggcagagcatcaagggcacccacctgaccatcacccaggccctgcggcagcccctgcaccgggcccccctgctgcccggccagctgtgctggagcccccggcccctggagaagaacaaggccatgggccggcccctgctgctgcccctgctgctgctgctgcagcccccagccttcctgcagcccggcctgtgtgagcccgccctgtctgagctggaccggggcagcggggagcggctgccccaggacctgaagccagctgagggcggccctgtgtgtgtgttcctgcccagcagagctggccaccctgagatccgggaggccgctgtggccgtgcaccagggcgaccagacccaccaccaccctggctgccacaaccaccaccacctggaggcccagcagcacaaccaccacagccggccccagggccacaggaagcagagggccctgcgcatcatggcccccaagagcggccactgccaccagggctgcatcggctgccgctgtgcccagaactgccacttcggcacagctgtgcccccacctcctgtggtggaggagaaggagaggtag

SEQ ID NO: 163105 - DNA, 684 bp, synthetic construct; identical to SEQ ID NO: 163094
  misc_feature 1..684: note = Description of Artificial Sequence: Synthetic coding sequence
  source 1..684: mol_type = other DNA

SEQ ID NO: 163106 - DNA, 327 bp, synthetic construct
  misc_feature 1..327: note = Description of Artificial Sequence: Synthetic coding sequence
  source 1..327: mol_type = other DNA
atgggccgggccagctatggaggcagccctgtgggccaccagagcagcagtgaccacccccgggccaagacctgccgcagccctgtgagagatggccccaggaccctgtgtggggtgcccaccgtggccctgagcctgcacttcctgcgggaggccagcagcggcagcaggacctgtggccgccgcaccagcctgtgcaccagcgccaagagctcctggacctacagaagtggccgcctgtcctggcagagcatcaagggcacccacctgaccatcacccaggccctgcggcagcccctgcaccgggcccccctgctgcctggatag

SEQ ID NO: 163107 - DNA, 384 bp, synthetic construct; identical to SEQ ID NO: 163096
  misc_feature 1..384: note = Description of Artificial Sequence: Synthetic coding sequence
  source 1..384: mol_type = other DNA

SEQ ID NO: 163108 - DNA, 738 bp, synthetic construct
  misc_feature 1..738: note = Description of Artificial Sequence: Synthetic coding sequence
  source 1..738: mol_type = other DNA
atgaccagcagctatggccacgtgctggagcggcagcctgccctgggcggccgcctggacagccctggcaacctggacaccctgcaggccaagaagaacttctctgtgagccacctgctggacctggaggaggccggggacatggtggccgcccaggctgatgaaaatgtgggggaggccggccgcagcctgctggagagccctggcctgaccagcggcagtgacaccccccagcaggacaatgaccagctgaacagcgaggagaagaagaagaggaagcagaggaggaacagaaccaccttcaacagcagccagctgcaggccctggagcgggtgtttgagaggacccactacccagatgcctttgtgcgggaggacctggccaggagagtgaacctgacagaggcccgggtgcaggtgtggttccagaacagaagagccaagttcagaagaaatgaaagagccatgctggccaacaagaatgccagcctgctgaagagctacagcggagatgtgacagctgtggagcagcccatcgtgcccaggcctgccccccggcccacagactacctgtcctggggcacagccagcccctacagcgccatggccacctacagcgccacctgtgccaacaacagccctgcccagggcatcaacatggccaacagcatcgccaacctgcggctgaaggccaaggagtacagcctgcagaggaaccaggtgcccaccgtgaactag

SEQ ID NO: 163109 - DNA, 654 bp, synthetic construct
  misc_feature 1..654: note = Description of Artificial Sequence: Synthetic coding sequence
  source 1..654: mol_type = other DNA
atgaccagcagctatggccacgtgctggagcggcagcctgccctgggcggccgcctggacagccctggcaacctggacaccctgcaggccaagaagaacttctctgtgagccacctgctggacctggaggaggccggggacatggtggccgcccaggctgatgaaaatgtgggggaggccggccgcagcctgctggagagccctggcctgaccagcggcagtgacaccccccagcaggacaatgaccagctgaacagcgaggagaagaagaagaggaagcagaggaggaacagaaccaccttcaacagcagccagctgcaggccctggagcgggtgtttgagaggacccactacccagatgcctttgtgcgggaggacctggccaggagagtgaacctgacagaggcccgggtgcaggtgtggttccagaacagaagagccaagttcagaagaaatgaaagagccatgctggccaacaagaatgccagcctgctgaagagctacagcggagatgtgacagctgtggagcagcccatcgtgcccaggcctgccccccggcccacagactacctgtcctggggcacagccagcccctaccgcagcagcagcctgccccgctgctgcctgcacgagggcctgcacaacggcttctag

SEQ ID NO: 163110 - DNA, 762 bp, synthetic construct
  misc_feature 1..762: note = Description of Artificial Sequence: Synthetic coding sequence
  source 1..762: mol_type = other DNA
atggattctgctgctgctgcctttgccctggacaagccagccctgggccctggccccccacctcctcctccagccctgggccctggggactgtgcccaggccaggaagaacttctctgtgagccacctgctggacctggaggaggtggccgccgccggccgcctggccgcccggcctggggcccgggcagaggcccgggagggcgccgcccgggagcccagcggcggcagcagcggcagcgaggccgccccccaggatggagagtgccccagccctggccggggcagcgctgccaagaggaagaagaagcagaggaggaacagaaccaccttcaacagcagccagctgcaggccctggagcgggtgtttgagaggacccactacccagatgcctttgtgcgggaggagctggccaggagagtgaacctgtctgaggcccgggtgcaggtgtggttccagaacagaagagccaagttcagaagaaatgaaagagccatgctggccagccgcagcgccagcctgctgaagagctacagccaggaggccgccatcgagcagcctgtggccccccggcccacagccctgagcccagactacctgtcctggacagccagcagcccctacagcacagtgcccccctacagccctggcagcagcggccctgccaccccaggagtgaacatggccaacagcatcgccagcctgcggctgaaggccaaggagttcagcctgcaccacagccaggtgcccaccgtgaactag

SEQ ID NO: 163111 - DNA, 855 bp, synthetic construct
  misc_feature 1..855: note = Description of Artificial Sequence: Synthetic coding sequence
  source 1..855: mol_type = other DNA
atggactacagctacctgaacagctatgacagctgtgtggccgccatggaggccagcgcctatggagactttggagcctgcagccagcccggcggcttccagtacagccccctgcggcctgccttccctgctgctggccccccctgcccagccctgggcagcagcaactgtgccctgggcgccctgcgggaccaccagcctgccccctacagcgctgtgccctacaagttcttccctgagcccagcggcctgcacgagaagaggaagcagaggcgcatccgcaccaccttcaccagcgcccagctgaaggagctggagcgggtgtttgctgagacccactacccagacatctacacccgggaggagctggccctgaagattgacctgacagaggcccgggtgcaggtgtggttccagaacagaagagccaagttcaggaagcaggagagagctgccagcgccaagggagctgctggagctgctggggccaagaagggggaggcccgctgcagcagtgaagatgatgacagcaaggagagcacctgcagccccaccccagacagcacagccagcctgcccccacctccagcccctggcctggccagcccccggctgagccccagccccctgcctgtggccctgggcagcggccctggccctggccctggcccccagcccctgaagggggccctgtgggccggcgtggccggcggcggcggcggcggccctggagctggagctgctgagctgctgaaggcctggcagcctgctgagagcggccctggccccttctctggagtgctgagcagcttccacaggaagccaggccctgccctgaagaccaacctcttctag

SEQ ID NO: 163112 - DNA, 1800 bp, synthetic construct
  misc_feature 1..1800: note = Description of Artificial Sequence: Synthetic coding sequence
  source 1..1800: mol_type = other DNA
atgaagctgctgaagctgaccggcttcatcttcttcctgttcttcctgacagagagcctgaccctgcccacccagccccgggacatcgagaacttcaacagcacccagaagttcatcgaggacaacatcgagtacatcaccatcatcgcctttgcccagtatgtgcaggaggccacctttgaggagatggagaagctggtgaaggacatggtggagtacaaggaccgctgcatggctgacaagaccctgcctgaatgttccaagctgcccaacaacgtgctgcaggagaagatctgtgccatggagggcctgccccagaagcacaacttcagccactgctgcagcaaggtggatgcccagaggcggctgtgcttcttctacaacaagaagagtgatgtgggcttcctgccccccttccccaccctggaccctgaggagaagtgccaggcctatgagagcaaccgggagagcctgctgaaccacttcctgtatgaggtggcccggaggaacccctttgtgtttgcccccaccctgctgactgtggccgtgcactttgaggaggtggccaagagctgctgtgaggagcagaacaaggtgaactgcctgcagacccgggccatccctgtgacccagtacctgaaggccttcagcagctaccagaagcacgtgtgtggggccctgctgaagtttggcaccaaggtggtgcacttcatctacatcgccatcctgagccagaagttccccaagattgagttcaaggagctgatcagcctggtggaggatgtgagcagcaactatgatggctgctgtgaaggagatgtggtgcagtgcatccgggacaccagcaaggtgatgaaccacatctgcagcaagcaggacagcatcagcagcaagatcaaggagtgctgtgagaagaagatccctgagcggggccagtgcatcatcaacagcaacaaggatgaccggcccaaggacctgagcctgcgggagggcaagttcacagacagtgaaaatgtgtgccaggagagagatgctgaccctgacaccttctttgccaagttcacctttgagtacagccgccgccacccagacctgagcatccctgagctgctgagaattgtgcagatctacaaggacctgctgaggaactgctgcaacacagagaaccccccaggctgctaccgctatgcagaggacaagttcaatgagaccacagagaagagcctgaagatggtgcagcaggagtgcaagcacttccagaacctgggcaaggatggcctgaagtaccactacctgatccggctgaccaagatcgccccccagctgagcacagaggagctggtgtccctgggggagaagatggtgacagccttcaccacctgctgcaccctgtctgaggagtttgcctgtgtggacaacctggccgacctggtgtttggagagctgtgtggggtgaatgaaaatagaaccatcaacccagctgtggaccactgctgcaagaccaactttgccttccggcggccctgctttgagagcctgaaggctgacaagacctacgtgcccccacccttcagccaggacctcttcaccttccacgccgacatgtgccagagccagaatgaggagctgcagaggaagacagaccgcttcctggtgaacctggtgaagctgaagcatgagctgacagatgaggagctgcagagcctcttcaccaactttgccaacgtggtggacaagtgctgcaaggccgagagccctgaggtgtgcttcaatgaggagagccccaagattggcaactag

SEQ ID NO: 163113 - DNA, 945 bp, synthetic construct
  misc_feature 1..945: note = Description of Artificial Sequence: Synthetic coding sequence
  source 1..945: mol_type = other DNA
atggatgccttcaagggcggcatgagcctggagcggctgcctgagggcctgcggcccccacctcctcctcctcatgacatgggccctgccttccacctggcccggcctgctgacccccgggagcccctggagaacagcgccagcgagagcagtgacacagagctgcctgagaaggagcggggcggggagcccaagggccctgaggacagcggggccggcggcaccggctgcggcggcgcagatgatcctgccaagaagaagaagcagaggcggcagaggacccacttcaccagccagcagctgcaggagctggaggccaccttccagaggaaccgctacccagacatgtccatgagggaggagattgctgtgtggaccaacctgacagagccccgggtgcgggtgtggttcaagaacagaagagccaagtggaggaagcgggagaggaaccagcagctggacctgtgcaagggcggctacgtgccccagttcagcggcctggtgcagccctatgaagatgtgtatgctgctggctacagctacaacaactgggccgccaagagcctggccccagcccccctgagcaccaagagcttcaccttcttcaacagcatgagccccctgagcagccagagcatgttttctgcccccagcagcatcagctccatgaccatgcccagctccatgggccctggagctgtgcccggcatgcccaacagcggcctgaacaacatcaacaacctgaccggcagcagcctgaacagcgccatgagccctggggcctgcccctacggcaccccagccagcccctacagcgtgtacagagacacctgcaacagcagcctggccagcctgcggctgaagagcaagcagcacagcagctttggctatggaggcctgcagggccctgccagcggcctgaatgcctgccagtacaacagctag

SEQ ID NO: 163114 - DNA, 345 bp, synthetic construct
  misc_feature 1..345: note = Description of Artificial Sequence: Synthetic coding sequence
  source 1..345: mol_type = other DNA
atggatgccttcaagggcggcatgagcctggagcggctgcctgagggcctgcggcccccacctcctcctcctcatgacatgggccctgccttccacctggcccggcctgctgacccccgggagcccctggagaacagcgccagcgagagcagtgacacagagctgcctgagaaggagcggggcggggagcccaagggccctgaggacagcggggccggcggcaccggctgcggcggcgcagatgatcctgccaagaagaagaagcagaggcggcagaggacccacttcaccagccagcagctgcaggagctggaggccaccttccagaggaaccgctacccctag

SEQ ID NO: 163115 - DNA, 945 bp, synthetic construct; identical to SEQ ID NO: 163113
  misc_feature 1..945: note = Description of Artificial Sequence: Synthetic coding sequence
  source 1..945: mol_type = other DNA

SEQ ID NO: 163116 - DNA, 396 bp, synthetic construct
  misc_feature 1..396: note = Description of Artificial Sequence: Synthetic coding sequence
  source 1..396: mol_type = other DNA
atggatgccttcaagggcggcatgagcctggagcggctgcctgagggcctgcggcccccacctcctcctcctcatgacatgggccctgccttccacctggcccggcctgctgacccccgggagcccctggagaacagcgccagcgagagcagtgacacagagctgcctgagaaggagcggggcggggagcccaagggccctgaggacagcggggccggcggcaccggctgcggcggcgcagatgatcctgccaagaagaagaagcagaggcggcagaggacccacttcaccagccagcagctgcaggagctggaggccaccttccagaggaaccgctacccagacatgtccatgagggaggagattgctgtgtggaccaacctgacagagccctag

SEQ ID NO: 163117 - DNA, 975 bp, synthetic construct
  misc_feature 1..975: note = Description of Artificial Sequence: Synthetic coding sequence
  source 1..975: mol_type = other DNA
atgaactgcatgaagggccccctgcacctggagcacagagctgctggcaccaagctgtctgctgtgagcagcagcagctgccaccacccccagcccctggccatggcctctgtgctggcccctggccagcccaggagcctggacagcagcaagcaccggctggaggtgcacaccatcagtgacaccagcagccctgaggccgctgagaaggacaagagccagcagggcaagaatgaagatgtgggcgctgaggaccccagcaagaagaagaggcagaggcggcagaggacccacttcaccagccagcagctgcaggagctggaggccaccttccagaggaaccgctacccagacatgagcacccgggaggagattgctgtgtggaccaacctgacagaggcccgggtgcgggtgtggttcaagaacagaagagccaagtggaggaagcgggagaggaaccagcaggccgagctgtgcaagaatggatttggcccccagttcaacggcctgatgcagccctatgatgacatgtacccaggctacagctacaacaactgggccgccaagggcctgaccagcgccagcctgagcaccaagagcttccccttcttcaacagcatgaatgtgaaccccctgagcagccagagcatgttcagcccccccaacagcatcagctccatgtccatgagcagctccatggtgcccagcgctgtgactggagtgcccggcagcagcctgaacagcctgaacaacctgaacaacctgagcagccccagcctgaacagcgctgtgcccaccccagcctgcccctatgccccacccaccccaccctacgtgtacagagacacctgcaacagcagcctggccagcctgcggctgaaggccaagcagcacagcagctttggctacgcctctgtgcagaacccagccagcaacctgagcgcctgccagtatgctgtggacaggcctgtgtag

SEQ ID NO: 163118 - DNA, 954 bp, synthetic construct
  misc_feature 1..954: note = Description of Artificial Sequence: Synthetic coding sequence
  source 1..954: mol_type = other DNA
atggagaccaactgcaggaagctggtgtctgcctgtgtgcagctgggcgtgcagcctgctgctgtggagtgcctcttcagcaaggacagcgagatcaagaaggtggagttcacagacagccctgagagcaggaaggaggccgccagcagcaagttcttcccccggcagcaccctggggccaatgagaaggacaagagccagcagggcaagaatgaagatgtgggcgctgaggaccccagcaagaagaagaggcagaggcggcagaggacccacttcaccagccagcagctgcaggagctggaggccaccttccagaggaaccgctacccagacatgagcacccgggaggagattgctgtgtggaccaacctgacagaggcccgggtgcgggtgtggttcaagaacagaagagccaagtggaggaagcgggagaggaaccagcaggccgagctgtgcaagaatggcttcggcccccagttcaacggcctgatgcagccctatgatgacatgtacccaggctacagctacaacaactgggccgccaagggcctgaccagcgccagcctgagcaccaagagcttccccttcttcaacagcatgaatgtgaaccccctgagcagccagagcatgttcagcccccccaacagcatcagctccatgtccatgagcagctccatggtgcccagcgctgtgactggagtgcccggcagcagcctgaacagcctgaacaacctgaacaacctgagcagccccagcctgaacagcgctgtgcccaccccagcctgcccctatgccccacccaccccaccctacgtgtacagagacacctgcaacagcagcctggccagcctgcggctgaaggccaagcagcacagcagctttggctacgcctctgtgcagaacccagccagcaacctgagcgcctgccagtatgctgtggacaggcctgtgtag

SEQ ID NO: 163119 - DNA, 816 bp, synthetic construct
  misc_feature 1..816: note = Description of Artificial Sequence: Synthetic coding sequence
  source 1..816: mol_type = other DNA
atggagaccaactgcaggaagctggtgtctgcctgtgtgcagctggagaaggacaagagccagcagggcaagaatgaagatgtgggcgctgaggaccccagcaagaagaagaggcagaggcggcagaggacccacttcaccagccagcagctgcaggagctggaggccaccttccagaggaaccgctacccagacatgagcacccgggaggagattgctgtgtggaccaacctgacagaggcccgggtgcgggtgtggttcaagaacagaagagccaagtggaggaagcgggagaggaaccagcaggccgagctgtgcaagaatggcttcggcccccagttcaacggcctgatgcagccctatgatgacatgtacccaggctacagctacaacaactgggccgccaagggcctgaccagcgccagcctgagcaccaagagcttccccttcttcaacagcatgaatgtgaaccccctgagcagccagagcatgttcagcccccccaacagcatcagctccatgtccatgagcagctccatggtgcccagcgctgtgactggagtgcccggcagcagcctgaacagcctgaacaacctgaacaacctgagcagccccagcctgaacagcgctgtgcccaccccagcctgcccctatgccccacccaccccaccctacgtgtacagagacacctgcaacagcagcctggccagcctgcggctgaaggccaagcagcacagcagctttggctacgcctctgtgcagaacccagccagcaacctgagcgcctgccagtatgctgtggacaggcctgtgtag

SEQ ID NO: 163120 - DNA, 954 bp, synthetic construct; identical to SEQ ID NO: 163118
  misc_feature 1..954: note = Description of Artificial Sequence: Synthetic coding sequence
  source 1..954: mol_type = other DNA

SEQ ID NO: 163121 - DNA, 873 bp, synthetic construct
  misc_feature 1..873: note = Description of Artificial Sequence: Synthetic coding sequence
  source 1..873: mol_type = other DNA
atggagaccaactgcaggaagctggtgtctgcctgtgtgcagctgggcgtgcagcctgctgctgtggagtgcctcttcagcaaggacagcgagatcaagaaggtggagttcacagacagccctgagagcaggaaggaggccgccagcagcaagttcttcccccggcagcaccctggggccaatgagaaggacaagagccagcagggcaagaatgaagatgtgggcgctgaggaccccagcaagaagaagaggcagaggcggcagaggacccacttcaccagccagcagctgcaggagctggaggccaccttccagaggaaccgctacccagacatgagcacccgggaggagattgctgtgtggaccaacctgacagaggcccgggtgcgggtgtggttcaagaacagaagagccaagtggaggaagcgggagaggaaccagcaggccgagctgtgcaagaatggcttcggcccccagttcaacggcctgatgcagccctatgatgacatgtacccaggctacagctacaacaactgggccgccaagggcctgaccagcgccagcctgagcaccaagagcttccccttcttcaacagcatgaatgtgaaccccctgagcagccagagcatgttcagcccccccaacagcatcagctccatgtccatgagcagctccatggtgcccagcgctgtgactggagtgcccggcagcagcctgaacagcctgaacaacctgaacaacctgagcagccccagcctgaacagcgctgtgcccaccccagcctgcccctatgccccacccaccccaccctacgtgtacagagacacctgcaacagcagcctggccagcctgcggctgaaggccaagcagtag

SEQ ID NO: 163122 - DNA, 357 bp, synthetic construct
  misc_feature 1..357: note = Description of Artificial Sequence: Synthetic coding sequence
  source 1..357: mol_type = other DNA
atggagaccaactgcaggaagctggtgtctgcctgtgtgcagctggagaaggacaagagccagcagggcaagaatgaagatgtgggcgctgaggaccccagcaagaagaagaggcagaggcggcagaggacccacttcaccagccagcagctgcaggagctggaggccaccttccagaggaaccgctacccagacatgagcacccgggaggagattgctgtgtggaccaacctgacagaggcccgggtgcgggtgtggttcaagaacagaagagccaagtggaggaagcgggagaggaaccagcaggccgagctgtgcaagaatggcttcggcccccagttcaacggcctgatgtag

SEQ ID NO: 163123 - DNA, 909 bp, synthetic construct
  misc_feature 1..909: note = Description of Artificial Sequence: Synthetic coding sequence
  source 1..909: mol_type = other DNA
atggagtttggcctgctgtctgaggccgaggcccggagccctgccctgagcctgagtgatgctggcaccccccacccccagctgcctgagcacggctgcaagggccaggagcacagcgacagcgagaaggccagcgccagcctgcccggcggcagcccagaagatggcagcctgaagaagaagcagaggcggcagaggacccacttcaccagccagcagctgcaggagctggaggccaccttccagaggaaccgctacccagacatgagcacccgggaggagattgctgtgtggaccaacctgacagaggcccgggtgcgggtgtggttcaagaacagaagagccaagtggaggaagcgggagaggagccagcaggccgagctgtgcaagggcagctttgctgcccccctgggcggcctggtgcccccctatgaggaggtgtacccaggctacagctatggcaactggccacccaaggccctggccccacccctggccgccaagaccttcccctttgccttcaacagcgtgaatgtgggccccctggccagccagcccgtcttcagcccccccagcagcattgctgcctccatggtgcccagcgctgctgctgcccctggcaccgtgcccggccctggggccctgcagggcctgggcggcggccccccaggcctggccccagctgctgtgagcagcggggctgtgtcctgcccctatgccagcgctgctgctgctgctgctgctgctgccagcagcccctacgtgtacagagacccctgcaacagcagcctggccagcctgcggctgaaggccaagcagcacgccagcttctcctacccagctgtgcacggccccccacctgctgccaacctgagcccctgccagtatgctgtggagaggcctgtgtag

SEQ ID NO: 163124 - DNA, 909 bp, synthetic construct; identical to SEQ ID NO: 163123
  misc_feature 1..909: note = Description of Artificial Sequence: Synthetic coding sequence
  source 1..909: mol_type = other DNA

SEQ ID NO: 163125 - DNA, 1179 bp, synthetic construct
  misc_feature 1..1179: note = Description of Artificial Sequence: Synthetic coding sequence
  source 1..1179: mol_type = other DNA
atggagctggtggccggctgctatgagcaggtgctgtttggatttgctgtgcaccctgagcctgaggcctgtggggaccacgagcagtggaccctggtggccgacttcacccaccacgcccacacagccagcctgtctgctgtggccgtgaacagcagatttgtggtgacaggcagcaaggatgagaccatccacatctatgacatgaagaagaagattgaacatggagccctggtgcaccacagcggcaccatcacctgcctgaagttctacggcaacagacacctgatcagcggggctgaagatggcctcatctgcatctgggatgccaagaagtgggagtgcctgaagagcatcaaggcccacaagggccaggtgaccttcctgagcatccaccccagcggcaagctggccctgtctgtgggcacagacaagaccctgcggacctggaacctggtggagggccgcagcgccttcatcaagaacatcaagcagaatgcccacatcgtggagtggagccccagaggagagcagtatgtggtgatcatccagaacaagattgacatctaccagctggacacagccagcatcagcggcaccatcaccaatgagaagaggatcagctctgtgaagttcctgtctgagagcgtgctggccgtggccggagatgaggaggtgatccgcttctttgactgtgacagcctggtgtgcctgtgtgagttcaaggcccatgaaaatagagtgaaggacatgttctcctttgagatccctgagcaccacgtgattgtgtctgccagcagtgatggcttcatcaagatgtggaagctgaagcaggacaagaaggtgccccccagcctgctgtgtgagatcaacaccaatgcccggctgacctgcctgggcgtgtggctggacaaggtggccgacatgaaggagagcctgcccccagctgctgagcccagccctgtgtccaaggagcagagcaagattggcaagaaggagcccggggacacagtgcacaaggaggagaagaggagcaagcccaacaccaagaagaggggcctgactggagacagcaagaaggccaccaaggagagcggcctcatcagcaccaagaagaggaagatggtggagatgctggagaagaagaggaagaagaagaagatcaagaccatgcagtag

SEQ ID NO: 163126 - DNA, 3372 bp, synthetic construct
  misc_feature 1..3372: note = Description of Artificial Sequence: Synthetic coding sequence
  source 1..3372: mol_type = other DNA
atgagcggcaccagcagccatgagagcttctatgacagcctgagtgacatgcaggaggagagcaagaacacagacttcttccctggcctgagcgccttcctgagccaggaggagatcaacaagagcctggacctggcccggcgggccatcgctgacagcgagacagaggactttgacagcgagaaggagatcagccagatcttcagcaccagccctgccagcctgtgtgagcaccccagccacaaggagaccaagctgggggagcacgccagccggcggccccaggacaacagaagcacccctgtgcagcccctggccgagaagcagaccaagagcatcagcagccctgtgtccaagaggaagccagccatgagccccctgctgacccggcccagctacatccgcagcctgaggaaggccgagaagagaggagccaagacccccagcaccaacgtgaagcccaagaccccccaccagaggaaaggaggcccccagagccagctgtgtgacaaggccgccaacctgattgaggagctgaccagcatcttcaaggccgccaagcccaggaacagaagccccaacggggagagcagcagcccagacagcggctacctgagccccaagaaccagcccagcgccctgctgagcgccagcgccagccagagccccatggaggaccagggcgagatggagcgggaggtgaagagccctggggcccggcactgctaccaggacaaccaggacctggccgtgccccacaacaggaagagccacccccagccccacagcgccctgcacttccctgctgccccccgcttcatccagaagctgcggagccaggaggtggccgagggcagccgggtgtacctggagtgccgggtgactggaaaccccaccccccgggtgcgctggttctgtgagggcaaggagctgcacaacaccccagacatccagatccactgtgagggcggggacctgcacaccctcatcatcgccgaggcctttgaagatgacaccggccgctacacctgcctggccaccaaccccagcggcagtgacaccaccagcgctgaggtgttcattgaaggagccagcagcacagacagcgacagcgagagcctggccttcaagagccgggccggggccatgccccaggcccagaagaagaccacctctgtgtccctgaccatcggcagcagcagccccaagacaggagtgaccacagctgtgatccagcccctgtctgtgcctgtgcagcaggtgcacagccccaccagctacctgtgcaggccagatggcaccaccacagcctacttcccccctgtgttcaccaaggagctgcagaacacagctgtggccgagggccaggtggtggtgctggagtgccgggtgcggggggccccacccctgcaggtgcagtggttccggcagggcagcgagatccaggacagcccagacttccgcatcctgcagaagaagcccaggagcacagctgagcctgaggagatctgcaccctggtgattgctgagaccttcccagaagatgctggcatcttcacctgcagcgccagaaatgactatggcagcgccaccagcacagcccagctggtggtgaccagcgccaacacagagaactgcagctatgagagcatgggagagagcaacaatgaccacttccagcacttccccccacctccacccatcctggagaccagcagcctggagctggccagcaagaagcccagcgagatccagcaggtgaacaaccctgagctgggcctgagcagagctgccctgcagatgcagttcaatgctgctgagcgggagaccaatggagtgcaccccagccggggcgtgaatggcctcatcaacgggaaggccaacagcaacaagagcctgcccaccccagctgtgctgctgagccccaccaaggagcccccacccctgctggccaagcccaagctgggcttccccaagaaggccagcaggacagccagaattgccagtgatgaggagatccagggcaccaaggatgctgtgatccaggacctggagaggaagctgcgcttcaaggaggacctgctgaacaacggccagccccggctgacctatgaggagaggatggcccggcggctgctgggcgctgacagcgccaccgtcttcaacatccaggagcctgaggaggagacagccaaccaggacatcggcagcccccacgcctctgtgggcagccccctggatggccagaaggagtacaaggtgagcagctgtgagcagaggctcatcagcgagattgagtaccgcctggagaggagccctgtggatgaaagtggagatgaggtgcagtatggagatgtgcctgtggagaatggcatggcccccttctttgagatgaagctgaagcactacaagatctttgagggcatgcctgtgaccttcacctgccgggtggccggcaaccccaagcccaagatctactggttcaaggatggcaagcagatcagccccaagagtgaccactacaccatccagagggacctggatggcacctgcagcctgcacaccacagccagcaccctggatgatgatggcaactacaccatcatggccgccaacccccagggccgcatcagctgcaccggccgcctgatggtgcaggccgtgaaccagaggggccgcagccccaggagccccagcggccacccccacgtgagaagacccaggagccgcagccgggacagcggagatgaaaatgagcccatccaggagcgcttcttccggccccacttcctgcaggcccctggggacctgactgtgcaggagggcaagctgtgcaggatggactgcaaggtgtctggcctgcccaccccagacctgtcctggcagctggatggcaagcctgtgcggccagacagcgcccacaagatgctggtgcgggagaatggagtgcacagcctcatcatcgagcctgtgaccagcagagatgctggcatctacacctgcatcgccaccaacagagctggccagaacagcttcagcctggagctggtggtggccgccaaggaggcccacaagccccctgtgttcatcgagaagctgcagaacacaggagtggctgatggctaccctgtgcggctggagtgccgggtgctgggcgtgcccccaccccagatcttctggaagaaggaaaatgaaagcctgacccacagcacagacagagtgtccatgcaccaggacaaccacggctacatctgcctgctgatccagggcgccaccaaggaggatgctggctggtacacagtgtctgccaagaatgaagctggcatcgtgtcctgcacagcccggctggatgtgtacatcagccgccactag

SEQ ID NO: 163127 - DNA, 2019 bp, synthetic construct
  misc_feature 1..2019: note = Description of Artificial Sequence: Synthetic coding sequence
  source 1..2019: mol_type = other DNA
atgtctgccctggccagccgcagcgccccagccatgcagagcagcggcagcttcaactatgcccggcccaagcagttcatcgccgcccagaacctgggccctgccagcggccacggcaccccagccagcagccccagcagcagcagcctgcccagccccatgagccccaccccccggcagtttggccgggcccctgtgcccccatttgcccagccctttggagctgagcctgaggccccctggggcagcagcagccccagccccccacctcctcctcctcctgtgttcagccccacagctgccttccctgtgcctgatgtgttccccctgcccccacctcctccacccctgcccagccctggccaggccagccactgcagcagccctgccaccaggtttggccacagccagaccccagctgccttcctgagcgccctgctgcccagccagcccccacctgctgctgtgaatgccctgggcctgcccaagggcgtgaccccagctggcttccccaagaaggccagcaggacagcccgcatcgccagtgatgaggagatccagggcaccaaggatgctgtgatccaggacctggagaggaagctgcgcttcaaggaggacctgctgaacaacggccagccccggctgacctatgaggagaggatggcccggcggctgctgggcgctgacagcgccaccgtcttcaacatccaggagcctgaggaggagacagccaaccaggagtacaaggtgagcagctgtgagcagaggctcatcagcgagattgagtaccgcctggagaggagccctgtggatgaaagtggagatgaggtgcagtatggagatgtgcctgtggagaatggcatggcccccttctttgagatgaagctgaagcactacaagatctttgagggcatgcctgtgaccttcacctgccgggtggccggcaaccccaagcccaagatctactggttcaaggatggcaagcagatcagccccaagagtgaccactacaccatccagagggacctggatggcacctgcagcctgcacaccacagccagcaccctggatgatgatggcaactacaccatcatggccgccaacccccagggccgcatcagctgcaccggccgcctgatggtgcaggccgtgaaccagaggggccgcagccccaggagccccagcggccacccccacgtgagaagacccaggagccgcagccgggacagcggagatgaaaatgagcccatccaggagcgcttcttccggccccacttcctgcaggcccctggggacctgactgtgcaggagggcaagctgtgcaggatggactgcaaggtgtctggcctgcccaccccagacctgtcctggcagctggatggcaagcctgtgcggccagacagcgcccacaagatgctggtgcgggagaatggagtgcacagcctcatcatcgagcctgtgaccagcagagatgctggcatctacacctgcatcgccaccaacagagctggccagaacagcttcagcctggagctggtggtggccgccaaggaggcccacaagccccctgtgttcatcgagaagctgcagaacacaggagtggctgatggctaccctgtgcggctggagtgccgggtgctgggcgtgcccccaccccagatcttctggaagaaggaaaatgaaagcctgacccacagcacagacagagtgtccatgcaccaggacaaccacggctacatctgcctgctgatccagggcgccaccaaggaggatgctggctggtacacagtgtctgccaagaatgaagctggcatcgtgtcctgcacagcccggctggatgtgtacacccagtggcaccagcagagccagagcaccaagcccaagaaggtgcggcccagcgccagccgctatgctgccctgagtgaccagggcctggacatcaaggccgccttccagcctgaggccaaccccagccacctgaccctgaacacagccctggtggagagcgaggacctgtag

SEQ ID NO: 163128 - DNA, 2334 bp, synthetic construct
  misc_feature 1..2334: note = Description of Artificial Sequence: Synthetic coding sequence
  source 1..2334: mol_type = other DNA
atgccccaggcccagaagaagaccacctctgtgtccctgaccatcggcagcagcagccccaagacaggagtgaccacagctgtgatccagcccctgtctgtgcctgtgcagcaggtgcacagccccaccagctacctgtgcaggccagatggcaccaccacagcctacttcccccctgtgttcaccaaggagctgcagaacacagctgtggccgagggccaggtggtggtgctggagtgccgggtgcggggggccccacccctgcaggtgcagtggttccggcagggcagcgagatccaggacagcccagacttccgcatcctgcagaagaagcccaggagcacagctgagcctgaggagatctgcaccctggtgattgctgagaccttcccagaagatgctggcatcttcacctgcagcgccagaaatgactatggcagcgccaccagcacagcccagctggtggtgaccagcgccaacacagagaactgcagctatgagagcatgggagagagcaacaatgaccacttccagcacttccccccacctccacccatcctggagaccagcagcctggagctggccagcaagaagcccagcgagatccagcaggtgaacaaccctgagctgggcctgagcagagctgccctgcagatgcagttcaatgctgctgagcgggagaccaatggagtgcaccccagccggggcgtgaatggcctcatcaacgggaaggccaacagcaacaagagcctgcccaccccagctgtgctgctgagccccaccaaggagcccccacccctgctggccaagcccaagctgggcttccccaagaaggccagcaggacagccagaattgccagtgatgaggagatccagggcaccaaggatgctgtgatccaggacctggagaggaagctgcgcttcaaggaggacctgctgaacaacggccagccccggctgacctatgaggagaggatggcccggcggctgctgggcgctgacagcgccaccgtcttcaacatccaggagcctgaggaggagacagccaaccaggagtacaaggtgagcagctgtgagcagaggctcatcagcgagattgagtaccgcctggagaggagccctgtggatgagagcggagatgaggtgcagtatggagatgtgcctgtggagaatggcatggcccccttctttgagatgaagctgaagcactacaagatctttgagggcatgcctgtgaccttcacctgccgggtggccggcaaccccaagcccaagatctactggttcaaggatggcaagcagatcagccccaagagtgaccactacaccatccagagggacctggatggcacctgcagcctgcacaccacagccagcaccctggatgatgatggcaactacaccatcatggccgccaacccccagggccgcatcagctgcaccggccgcctgatggtgcaggccgtgaaccagaggggccgcagccccaggagccccagcggccacccccacgtgcggcggcccaggagccgcagccgggacagcggagatgaaaatgagcccatccaggagcgcttcttccggccccacttcctgcaggcccctggggacctgactgtgcaggagggcaagctgtgcaggatggactgcaaggtgtctggcctgcccaccccagacctgtcctggcagctggatggcaagcctgtgcggccagattctgcccacaagatgctggtgagagaaaatggagtgcacagcctcatcatcgagcctgtgaccagcagagatgctggcatctacacctgcatcgccaccaacagagctggccagaacagcttcagcctggagctggtggtggccgccaaggaggcccacaagccccctgtgttcatcgagaagctgcagaacacaggagtggctgatggctaccctgtgcggctggagtgccgggtgctgggcgtgcccccaccccagatcttctggaagaaggaaaatgaaagcctgacccacagcacagacagagtgtccatgcaccaggacaaccacggctacatctgcctgctgatccagggcgccaccaaggaggatgctggctggtacacagtgtctgccaagaatgaggccggcatcgtgtcctgcacagcccggctggatgtgtacacccagtggcaccagcagagccagagcaccaagcccaagaaggtgcggcccagcgccagccgctatgctgccctgagtgaccagggcctggacatcaaggccgccttccagcctgaggccaaccccagccacctgaccctgaacacagccctggtggagagcgaggacctgtag

SEQ ID NO: 163129 - DNA, 3321 bp, synthetic construct
  misc_feature 1..3321: note = Description of Artificial Sequence: Synthetic coding sequence
  source 1..3321: mol_type = other DNA
atgagcggcaccagcagccatgagagcttctatgacagcctgagtgacatgcaggaggagagcaagaacacagacttcttccctggcctgagcgccttcctgagccaggaggagatcaacaagagcctggacctggcccggcgggccatcgctgacagcgagacagaggactttgacagcgagaaggagatcagccagatcttcagcaccagccctgccagcctgtgtgagcaccccagccacaaggagaccaagctgggggagcacgccagccggcggccccaggacaacagaagcacccctgtgcagcccctggccgagaagcagaccaagagcatcagcagccctgtgtccaagaggaagccagccatgagccccctgctgacccggcccagctacatccgcagcctgaggaaggccgagaagagaggagccaagacccccagcaccaacgtgaagcccaagaccccccaccagaggaaaggaggcccccagagccagctgtgtgacaaggccgccaacctgattgaggagctgaccagcatcttcaaggccgccaagcccaggaacagaagccccaacggggagagcagcagcccagacagcggctacctgagccccaagaaccagcccagcgccctgctgagcgccagcgccagccagagccccatggaggaccagggcgagatggagcgggaggtgaagagccctggggcccggcactgctaccaggacaaccaggacctggccgtgccccacaacaggaagagccacccccagccccacagcgccctgcacttccctgctgccccccgcttcatccagaagctgcggagccaggaggtggccgagggcagccgggtgtacctggagtgccgggtgactggaaaccccaccccccgggtgcgctggttctgtgagggcaaggagctgcacaacaccccagacatccagatccactgtgagggcggggacctgcacaccctcatcatcgccgaggcctttgaagatgacaccggccgctacacctgcctggccaccaaccccagcggcagtgacaccaccagcgctgaggtgttcattgaaggagccagcagcacagacagcgacagcgagagcctggccttcaagagccgggccggggccatgccccaggcccagaagaagaccacctctgtgtccctgaccatcggcagcagcagccccaagacaggagtgaccacagctgtgatccagcccctgtctgtgcctgtgcagcaggtgcacagccccaccagctacctgtgcaggccagatggcaccaccacagcctacttcccccctgtgttcaccaaggagctgcagaacacagctgtggccgagggccaggtggtggtgctggagtgccgggtgcggggggccccacccctgcaggtgcagtggttccggcagggcagcgagatccaggacagcccagacttccgcatcctgcagaagaagcccaggagcacagctgagcctgaggagatctgcaccctggtgattgctgagaccttcccagaagatgctggcatcttcacctgcagcgccagaaatgactatggcagcgccaccagcacagcccagctggtggtgaccagcgccaacacagagaactgcagctatgagagcatgggagagagcaacaatgaccacttccagcacttccccccacctccacccatcctggagaccagcagcctggagctggccagcaagaagcccagcgagatccagcaggtgaacaaccctgagctgggcctgagcagagctgccctgcagatgcagttcaatgctgctgagcgggagaccaatggagtgcaccccagccggggcgtgaatggcctcatcaacgggaaggccaacagcaacaagagcctgcccaccccagctgtgctgctgagccccaccaaggagcccccacccctgctggccaagcccaagctgggcttccccaagaaggccagcaggacagccagaattgccagtgatgaggagatccagggcaccaaggatgctgtgatccaggacctggagaggaagctgcgcttcaaggaggacctgctgaacaacggccagccccggctgacctatgaggagaggatggcccggcggctgctgggcgctgacagcgccaccgtcttcaacatccaggagcctgaggaggagacagccaaccaggagtacaaggtgagcagctgtgagcagaggctcatcagcgagattgagtaccgcctggagaggagccctgtggatgagagcggagatgaggtgcagtatggagatgtgcctgtggagaatggcatggcccccttctttgagatgaagctgaagcactacaagatctttgagggcatgcctgtgaccttcacctgccgggtggccggcaaccccaagcccaagatctactggttcaaggatggcaagcagatcagccccaagagtgaccactacaccatccagagggacctggatggcacctgcagcctgcacaccacagccagcaccctggatgatgatggcaactacaccatcatggccgccaacccccagggccgcatcagctgcaccggccgcctgatggtgcaggccgtgaaccagaggggccgcagccccaggagccccagcggccacccccacgtgcggcggcccaggagccgcagccgggacagcggagatgaaaatgagcccatccaggagcgcttcttccggccccacttcctgcaggcccctggggacctgactgtgcaggagggcaagctgtgcaggatggactgcaaggtgtctggcctgcccaccccagacctgtcctggcagctggatggcaagcctgtgcggccagattctgcccacaagatgctggtgagagaaaatggagtgcacagcctcatcatcgagcctgtgaccagcagagatgctggcatctacacctgcatcgccaccaacagagctggccagaacagcttcagcctggagctggtggtggccgccaaggaggcccacaagccccctgtgttcatcgagaagctgcagaacacaggagtggctgatggctaccctgtgcggctggagtgccgggtgctgggcgtgcccccaccccagatcttctggaagaaggaaaatgaaagcctgacccacagcacagacagagtgtccatgcaccaggacaaccacggctacatctgcctgctgatccagggcgccaccaaggaggatgctggctggtacacagtgtctgccaagaatgaggccggcatcgtgtcctgcacagcccggctggatgtgtacatcagccgccactag

SEQ ID NO: 163130 - DNA, 1233 bp, synthetic construct
  misc_feature 1..1233: note = Description of Artificial Sequence: Synthetic coding sequence
  source 1..1233: mol_type = other DNA
atgagccccctgctgacccggcccagctacatccgcagcctgaggaaggccgagaagagaggagccaagacccccagcaccaacgtgaagcccaagaccccccaccagaggaagggcggcccccagagccagctgtgtgacaaggccgccaacctgattgaggagctgaccagcatcttcaaggccgccaagcccaggaacagaagccccaatggagagagcagcagcccagattctggctacctgagccccaagaaccagcccagcgccctgctgagcgccagcgccagccagagccccatggaggaccagggcgagatggagcgggaggtgaagagccctggggcccggcactgctaccaggacaaccaggacctggccgtgccccacaacaggaagagccacccccagccccacagcgccctgcacttccctgctgccccccgcttcatccagaagctgcggagccaggaggtggccgagggcagccgggtgtacctggagtgccgggtgacaggcaaccccaccccccgggtgcgctggttctgtgagggcaaggagctgcacaacaccccagacatccagatccactgtgagggcggggacctgcacaccctcatcatcgccgaggcctttgaagatgacaccggccgctacacctgcctggccaccaaccccagcggcagtgacaccaccagcgctgaggtgttcatcgagggcgccagcagcacagacagcgacagcgagagcctggccttcaagagcagagctggggccatgccccaggcccagaagaagaccacctctgtgtccctgaccatcggcagcagcagccccaagacaggagtgaccacagctgtgatccagcccctgtctgtgcctgtgcagcaggtgcacagccccaccagctacctgtgcaggccagatggcaccaccacagcctacttcccccctgtgttcaccaaggagctgcagaacacagctgtggccgagggccaggtggtggtgctggagtgccgggtgcggggggccccacccctgcaggtgcagtggttccggcagggcagcgagatccaggacagcccagacttccgcatcctgcagaagaagcccaggagcacagctgagccagatgtgctgtatgtgtttgtgcgggtgcgctgccaccagatgaagatccagtactacaacctggcccacctgatcagctcctggctgagcagcttcctgtag

SEQ ID NO: 163131 - DNA, 3006 bp, synthetic construct
  misc_feature 1..3006: note = Description of Artificial Sequence: Synthetic coding sequence
  source 1..3006: mol_type = other DNA
atgccccaggcccagaagaagaccacctctgtgtccctgaccatcggcagcagcagccccaagacaggagtgaccacagctgtgatccagcccctgtctgtgcctgtgcagcaggtgcacagccccaccagctacctgtgcaggccagatggcaccaccacagcctacttcccccctgtgttcaccaaggagctgcagaacacagctgtggccgagggccaggtggtggtgctggagtgccgggtgcggggggccccacccctgcaggtgcagtggttccggcagggcagcgagatccaggacagcccagacttccgcatcctgcagaagaagcccaggagcacagctgagcctgaggagatctgcaccctggtgattgctgagaccttcccagaagatgctggcatcttcacctgcagcgccagaaatgactatggcagcgccaccagcacagcccagctggtggtgaccagcgccaacacagagaactgcagctatgagagcatgggagagagcaacaatgaccacttccagcacttccccccacctccacccatcctggagaccagcagcctggagctggccagcaagaagcccagcgagatccagcaggtgaacaaccctgagctgggcctgagcagagctgccctgcagatgcagttcaatgctgctgagcgggagaccaatggagtgcaccccagccggggcgtgaatggcctcatcaacgggaaggccaacagcaacaagagcctgcccaccccagctgtgctgctgagccccaccaaggagcccccacccctgctggccaagcccaagctggaccccctgaagctgcagcagctgcagaaccagatccggctggagcaggaggccggggcccggcagcccccaccagcccccaggtctgccccacccagcccccccttccccccacctccagccttccctgagctggccgcctgcaccccaccagccagccctgagcccatgtctgccctggccagccgcagcgccccagccatgcagagcagcggcagcttcaactatgcccggcccaagcagttcatcgccgcccagaacctgggccctgccagcggccacggcaccccagccagcagccccagcagcagcagcctgcccagccccatgagccccaccccccggcagtttggccgggcccctgtgcccccatttgcccagccctttggagctgagcctgaggccccctggggcagcagcagccccagccccccacctcctcctcctcctgtgttcagccccacagctgccttccctgtgcctgatgtgttccccctgcccccacctcctccacccctgcccagccctggccaggccagccactgcagcagccctgccacccgcttcggccacagccagaccccagctgccttcctgagcgccctgctgcccagccagcccccacctgctgctgtgaatgccctgggcctgcccaagggcgtgaccccagctggcttccccaagaaggccagcaggacagccagaattgccagtgatgaggagatccagggcaccaaggatgctgtgatccaggacctggagaggaagctgcgcttcaaggaggacctgctgaacaacggccagccccggctgacctatgaggagaggatggcccggcggctgctgggcgctgacagcgccaccgtcttcaacatccaggagcctgaggaggagacagccaaccaggagtacaaggtgagcagctgtgagcagaggctcatcagcgagattgagtaccgcctggagaggagccctgtggatgagagcggagatgaggtgcagtatggagatgtgcctgtggagaatggcatggcccccttctttgagatgaagctgaagcactacaagatctttgagggcatgcctgtgaccttcacctgccgggtggccggcaaccccaagcccaagatctactggttcaaggatggcaagcagatcagccccaagagtgaccactacaccatccagagggacctggatggcacctgcagcctgcacaccacagccagcaccctggatgatgatggcaactacaccatcatggccgccaacccccagggccgcatcagctgcaccggccgcctgatggtgcaggccgtgaaccagaggggccgcagccccaggagccccagcggccacccccacgtgcggcggcccaggagccgcagccgggacagcggagatgaaaatgagcccatccaggagcgcttcttccggccccacttcctgcaggcccctggggacctgactgtgcaggagggcaagctgtgcaggatggactgcaaggtgtctggcctgcccaccccagacctgtcctggcagctggatggcaagcctgtgcggccagattctgcccacaagatgctggtgagagaaaatggagtgcacagcctcatcatcgagcctgtgaccagcagagatgctggcatctacacctgcatcgccaccaacagagctggccagaacagcttcagcctggagctggtggtggccgccaaggaggcccacaagccccctgtgttcatcgagaagctgcagaacacaggagtggctgatggctaccctgtgcggctggagtgccgggtgctgggcgtgcccccaccccagatcttctggaagaaggaaaatgaaagcctgacccacagcacagacagagtgtccatgcaccaggacaaccacggctacatctgcctgctgatccagggcgccaccaaggaggatgctggctggtacacagtgtctgccaagaatgaggccggcatcgtgtcctgcacagcccggctggatgtgtacacccagtggcaccagcagagccagagcaccaagcccaagaaggtgcggcccagcgccagccgctatgctgccctgagtgaccagggcctggacatcaaggccgccttccagcctgaggccaaccccagccacctgaccctgaacacagccctggtggagagcgaggacctgtag

SEQ ID NO: 163132 - DNA, 483 bp, synthetic construct
  misc_feature 1..483: note = Description of Artificial Sequence: Synthetic coding sequence
  source 1..483: mol_type = other DNA
tgaggaaaacctgtgcggccagattctgcccacaagatgctggtgagagaaaatggagtgcacagcctcatcatcgagcctgtgaccagcagagatgctggcatctacacctgcatcgccaccaacagagctggccagaacagcttcagcctggagctggtggtggccgccaaggaggcccacaagccccctgtgttcatcgagaagctgcagaacacaggagtggctgatggctaccctgtgcggctggagtgccgggtgctgggcgtgcccccaccccagatcttctggaagaaggaaaatgaaagcctgacccacagcacagacagagtgtccatgcaccaggacaaccacggctacatctgcctgctgatccagggcgccaccaaggaggatgctggctggtacacagtgtctgccaagaatgaggccggcatcgtgtcctgcacagcccggctggatgtgtacatcagccgccactag

SEQ ID NO: 163133 - DNA, 1539 bp, synthetic construct
  misc_feature 1..1539: note = Description of Artificial Sequence: Synthetic coding sequence
  source 1..1539: mol_type = other DNA
aagaacacagacttcttccctggcctgagcgccttcctgagccaggaggagatcaacaagagcctggacctggcccggcgggccatcgctgacagcgagacagaagattttgattctgagaaggagatcagccagatcttcagcaccagccctgccagcctgtgtgagcaccccagccacaaggagaccaagctgggggagcacgccagcagaagaccccaggacaacagaagcacccctgtgcagcccctggccgagaagcagaccaagagcatcagcagccctgtgtccaagaggaagccagccatgagccccctgctgacccggcccagctacatccgcagcctgaggaaggccgagaagagaggagccaagacccccagcaccaacgtgaagcccaagaccccccaccagaggaagggcggcccccagagccagctgtgtgacaaggccgccaacctgattgaggagctgaccagcatcttcaaggccgccaagcccaggaacagaagccccaatggagagagcagcagcccagattctggctacctgagccccaagaaccagcccagcgccctgctgagcgccagcgccagccagagccccatggaggaccagggcgagatggagcgggaggtgaagagccctggggcccggcactgctaccaggacaaccaggacctggccgtgccccacaacaggaagagccacccccagccccacagcgccctgcacttccctgctgccccccgcttcatccagaagctgcggagccaggaggtggccgagggcagccgggtgtacctggagtgccgggtgacaggcaaccccaccccccgggtgcgctggttctgtgagggcaaggagctgcacaacaccccagacatccagatccactgtgagggcggggacctgcacaccctcatcatcgccgaggcctttgaagatgacaccggccgctacacctgcctggccaccaaccccagcggcagtgacaccaccagcgctgaggtgttcatcgagggcgccagcagcacagacagcgacagcgagagcctggccttcaagagcagagctggggccatgccccaggcccagaagaagaccacctctgtgtccctgaccatcggcagcagcagccccaagacaggagtgaccacagctgtgatccagcccctgtctgtgcctgtgcagcaggtgcacagccccaccagctacctgtgcaggccagatggcaccaccacagcctacttcccccctgtgttcaccaaggagctgcagaacacagctgtggccgagggccaggtggtggtgctggagtgccgggtgcggggggccccacccctgcaggtgcagtggttccggcagggcagcgagatccaggacagcccagacttccgcatcctgcagaagaagcccaggagcacagctgagccagatgtgctgtatgtgtttgtgcgggtgcgctgccaccagatgaagatccagtactacaacctggcccacctgatcagctcctggctgagcagcttcctgtag

SEQ ID NO: 163134 - DNA, 87 bp, synthetic construct
  misc_feature 1..87: note = Description of Artificial Sequence: Synthetic coding sequence
  source 1..87: mol_type = other DNA
atgagcggcaccagcagccatgagagcttctatgacagcctgagtgacatgcaggaggagagcaagaacacagacttcttcccctag

SEQ ID NO: 163135 - DNA, 690 bp, synthetic construct
  misc_feature 1..690: note = Description of Artificial Sequence: Synthetic coding sequence
  source 1..690: mol_type = other DNA
atggccgcccagcccctgcggcacaggagccgctgtgccaccccacccaggggggacttctgtggcggcacagagcgggccatcgaccaggccagcttcaccacctccatggagtgggacacccaggtggtgaagggcagcagccccctgggccctgctggcctgggcgctgaggagcctgctgctggcccccagctgcccagctggctgcagcctgagcgctgtgctgtgttccagtgtgcccagtgccacgctgtgctggccgacagcgtgcacctggcctgggacctgagccgcagcctgggcgctgtggtgttcagccgggtgaccaacaacgtggtgctggaggcccccttcctggtgggcatcgagggcagcctgaagggcagcacctacaacctgctcttctgtggcagctgtggcatccctgtgggcttccacctgtacagcacccatgctgccctggccgccctgcggggccacttctgcctgagcagtgacaagatggtgtgctacctgctgaagaccaaggccatcgtgaatgccagcgagatggacatccagaatgtgcccctgtctgagaagattgctgagctgaaggagaagatcgtgctgacccacaaccggctgaagagcctgatgaagatcctgtctgaggtgaccccagaccagagcaagccagagaactag

SEQ ID NO: 163136 - DNA, 816 bp, synthetic construct
  misc_feature 1..816: note = Description of Artificial Sequence: Synthetic coding sequence
  source 1..816: mol_type = other DNA
atggccagccctggctgcctgtggctgctggccgtggccctgctgccctggacctgtgccagccgggccctgcagcacctggaccccccagcccccctgcccctggtgatctggcacggcatgggcagccgctacgtggcccagacaggcctggagctgctggccagcagcaaccccccagccagcagctaccagagcgctggcatgattggagacagctgctgcaaccccctgtccatgggcgccatcaagaagatggtggagaagaagatccctggcatctacgtgctgagcctggagatcggcaagaccctgatggaggatgtggagaacagcttcttcctgaatgtgaacagccaggtgaccaccgtgtgccaggccctggccaaggaccccaagctgcagcagggctacaatgccatgggcttcagccagggcggccagttcctgcgggctgtggcccagcgctgccccagcccccccatgatcaacctgatctctgtgggcggccagcaccagggcgtgtttggcctgccccgctgccctggagagagcagccacatctgtgacttcatcaggaagaccctgaatgctggggcctacagcaaggtggtgcaggagcggctggtgcaggccgagtactggcatgaccccatcaaggaggatgtgtacagaaaccacagcatcttcctggccgacatcaaccaggagcggggcatcaatgaaagctacaagaagaacctgatggccctgaagaagtttgtgatggtgaagttcctgaatgacagcatcgtggaccctgtggacagcgagtag

SEQ ID NO: 163137 - DNA, 921 bp, synthetic construct
  misc_feature 1..921: note = Description of Artificial Sequence: Synthetic coding sequence
  source 1..921: mol_type = other DNA
atggccagccctggctgcctgtggctgctggccgtggccctgctgccctggacctgtgccagccgggccctgcagcacctggaccccccagcccccctgcccctggtgatctggcacggcatgggagacagctgctgcaaccccctgtccatgggcgccatcaagaagatggtggagaagaagatccctggcatctacgtgctgagcctggagatcggcaagaccctgatggaggatgtggagaacagcttcttcctgaatgtgaacagccaggtgaccaccgtgtgccaggccctggccaaggaccccaagctgcagcagggctacaatgccatgggcttcagccagggcggccagttcctgcgggctgtggcccagcgctgccccagcccccccatgatcaacctgatctctgtgggcggccagcaccagggcgtgtttggcctgccccgctgccctggagagagcagccacatctgtgacttcatcaggaagaccctgaatgctggggcctacagcaaggtggtgcaggagcggctggtgcaggccgagtactggcatgaccccatcaaggaggatgtgtacagaaaccacagcatcttcctggccgacatcaaccaggagcggggcatcaatgaaagctacaagaagaacctgatggccctgaagaagtttgtgatggtgaagttcctgaatgacagcatcgtggaccctgtggacagcgagtggtttggcttctacagaagtggccaggccaaggagaccatccccctgcaggagaccagcctgtacacccaggaccggctgggcctgaaggagatggacaatgccggccagctggtgttcctggccacagaaggagaccacctgcagctgtctgaggagtggttctacgcccacatcatccccttcctgggctag

SEQ ID NO: 163138 - DNA, 612 bp, synthetic construct
  misc_feature 1..612: note = Description of Artificial Sequence: Synthetic coding sequence
  source 1..612: mol_type = other DNA
atggccagccctggctgcctgtggctgctggccgtggccctgctgccctggacctgtgccagccgggccctgcagcacctggaccccccagcccccctgcccctggtgatctggcacggcatgggcgtgtttggcctgccccgctgccctggagagagcagccacatctgtgacttcatcaggaagaccctgaatgctggggcctacagcaaggtggtgcaggagcggctggtgcaggccgagtactggcatgaccccatcaaggaggatgtgtacagaaaccacagcatcttcctggccgacatcaaccaggagcggggcatcaatgaaagctacaagaagaacctgatggccctgaagaagtttgtgatggtgaagttcctgaatgacagcatcgtggaccctgtggacagcgagtggtttggcttctaccgcagcggccaggccaaggagaccatccccctgcaggagaccagcctgtacacccaggaccggctgggcctgaaggagatggacaatgccggccagctggtgttcctggccacagaaggagaccacctgcagctgtctgaggagtggttctacgcccacatcatccccttcctgggctag

SEQ ID NO: 163139 - DNA, 921 bp, synthetic construct; identical to SEQ ID NO: 163137
  misc_feature 1..921: note = Description of Artificial Sequence: Synthetic coding sequence
  source 1..921: mol_type = other DNA

SEQ ID NO: 163140 - DNA, 909 bp, synthetic construct
  misc_feature 1..909: note = Description of Artificial Sequence: Synthetic coding sequence
  source 1..909: mol_type = other DNA
atgctgggcctgtgtggccagaggctgcctgctgcctgggtgctgctgctgctgcccttcctgcccctgctgctgctggccgccccagccccccaccgggccagctacaagcctgtgattgtggtgcacggcctgtttgacagcagctacagcttccgccacctgctggagtacatcaatgagacccaccctggcaccgtggtgacagtgctggacctgtttgatggccgggagagcctgcggcccctgtgggagcaggtgcagggcttccgggaggccgtggtgcccatcatggccaaggccccccagggcgtgcacctgatctgctacagccagggcggcctggtgtgccgggccctgctgtctgtgatggatgaccacaacgtggacagcttcatcagcctgagcagcccccagatgggccagtatggagacacagactacctgaagtggctgttccccacctccatgaggagcaacctgtaccgcatctgctacagcccctggggccaggagttcagcatctgcaactactggcatgacccccaccatgatgacctgtacctgaatgccagcagcttcctggccctgatcaatggagagcgggaccaccccaatgccaccgtgtggaggaagaacttcctgcgggtgggccacctggtgctgattggaggcccagatgatggagtcatcaccccctggcagagcagcttcttcggcttctatgatgccaatgaaacagtgctggagatggaggagcagctggtgtacctgcgggacagctttggcctgaagaccctgctggcccggggggccatcgtgcgctgccccatggccggcatcagccacacagcctggcacagcaacagaaccctgtatgagacctgcatcgagccctggctgtcctag

SEQ ID NO: 163141 - DNA, 927 bp, synthetic construct
  misc_feature 1..927: note = Description of Artificial Sequence: Synthetic coding sequence
  source 1..927: mol_type = other DNA
atgaagagctgtggctccatgctgggcctgtgtggccagaggctgcctgctgcctgggtgctgctgctgctgcccttcctgcccctgctgctgctggccgccccagccccccaccgggccagctacaagcctgtgattgtggtgcacggcctgtttgacagcagctacagcttccgccacctgctggagtacatcaatgagacccaccctggcaccgtggtgacagtgctggacctgtttgatggccgggagagcctgcggcccctgtgggagcaggtgcagggcttccgggaggccgtggtgcccatcatggccaaggccccccagggcgtgcacctgatctgctacagccagggcggcctggtgtgccgggccctgctgtctgtgatggatgaccacaacgtggacagcttcatcagcctgagcagcccccagatgggccagtatggagacacagactacctgaagtggctgttccccacctccatgaggagcaacctgtaccgcatctgctacagcccctggggccaggagttcagcatctgcaactactggcatgacccccaccatgatgacctgtacctgaatgccagcagcttcctggccctgatcaatggagagcgggaccaccccaatgccaccgtgtggaggaagaacttcctgcgggtgggccacctggtgctgattggaggcccagatgatggagtcatcaccccctggcagagcagcttcttcggcttctatgatgccaatgaaacagtgctggagatggaggagcagctggtgtacctgcgggacagctttggcctgaagaccctgctggcccggggggccatcgtgcgctgccccatggccggcatcagccacacagcctggcacagcaacagaaccctgtatgagacctgcatcgagccctggctgtcctag

SEQ ID NO: 163142 - DNA, 909 bp, synthetic construct; identical to SEQ ID NO: 163140
  misc_feature 1..909: note = Description of Artificial Sequence: Synthetic coding sequence
  source 1..909: mol_type = other DNA

SEQ ID NO: 163143 - DNA, 909 bp, synthetic construct; identical to SEQ ID NO: 163140
  misc_feature 1..909: note = Description of Artificial Sequence: Synthetic coding sequence
  source 1..909: mol_type = other DNA

SEQ ID NO: 163144 - DNA, 927 bp, synthetic construct
  misc_feature 1..927: note = Description of Artificial Sequence: Synthetic coding sequence
  source 1..927: mol_type = other DNA
atgaagagctgtggctccatgctgggcctgtggggccagaggctgcctgctgcctgggtgctgctgctgctgcccttcctgcccctgctgctgctggccgccccagccccccaccgggagagctacaagcctgtgattgtggtgcacggcctgtttgacagcagctacagcttccgccacctgctggagtacatcaatgagacccaccctggcaccgtggtgacagtgctggacctgtttgatggccgggagagcctgcggcccctgtgggagcaggtgcagggcttccgggaggccgtggtgcccatcatggccaaggccccccagggcgtgcacctgatctgctacagccagggcggcctggtgtgccgggccctgctgtctgtgatggatgaccacaacgtggacagcttcatcagcctgagcagcccccagatgggccagtatggagacacagactacctgaagtggctgttccccacctccatgaggagcaacctgtaccgcatctgctacagcccctggggccaggagttcagcatctgcaactactggcatgacccccaccatgatgacctgtacctgaatgccagcagcttcctggccctgatcaatggagagcgggaccaccccaatgccaccgtgtggaggaagaacttcctgcgggtgggccacctggtgctgattggaggcccagatgatggagtcatcaccccctggcagagcagcttcttcggcttctatgatgccaatgaaacagtgctggagatggaggagcagctggtgtacctgcgggacagctttggcctgaagaccctgctggcccggggggccatcgtgcgctgccccatggccggcatcagccacacagcctggcacagcaacagaaccctgtatgagacctgcatcgagccctggctgtcctag

SEQ ID NO: 163145 - DNA, 927 bp, synthetic construct
  misc_feature 1..927: note = Description of Artificial Sequence: Synthetic coding sequence
  source 1..927: mol_type = other DNA
atgaagagctgtggctccatgctgggcctgtggggccagaggctgcctgctgcctgggtgctgctgctgctgcccttcctgcccctgctgctgctggccgccccagccccccaccgggccagctacaagcctgtgattgtggtgcacggcctgtttgacagcagctacagcttccgccacctgctggagtacatcaatgagacccaccctggcaccgtggtgacagtgctggacctgtttgatggccgggagagcctgcggcccctgtgggagcaggtgcagggcttccgggaggccgtggtgcccatcatggccaaggccccccagggcgtgcacctgatctgctacagccagggcggcctggtgtgccgggccctgctgtctgtgatggatgaccacaacgtggacagcttcatcagcctgagcagcccccagatgggccagtatggagacacagactacctgaagtggctgttccccacctccatgaggagcaacctgtaccgcatctgctacagcccctggggccaggagttcagcatctgcaactactggcatgacccccaccatgatgacctgtacctgaatgccagcagcttcctggccctgatcaatggagagcgggaccaccccaatgccaccgtgtggaggaagaacttcctgcgggtgggccacctggtgctgattggaggcccagatgatggagtcatcaccccctggcagagcagcttcttcggcttctatgatgccaatgaaacagtgctggagatggaggagcagctggtgtacctgcgggacagctttggcctgaagaccctgctggcccggggggccatcgtgcgctgccccatggccggcatcagccacacagcctggcacagcaacagaaccctgtatgagacctgcatcgagccctggctgtcctag

SEQ ID NO: 163146 - DNA, 909 bp, synthetic construct; identical to SEQ ID NO: 163140
  misc_feature 1..909: note = Description of Artificial Sequence: Synthetic coding sequence
  source 1..909: mol_type = other DNA

SEQ ID NO: 163147 - DNA, 909 bp, synthetic construct
  misc_feature 1..909: note = Description of Artificial Sequence: Synthetic coding sequence
  source 1..909: mol_type = other DNA
atgctgggcctgtggggccagaggctgcctgctgcctgggtgctgctgctgctgcccttcctgcccctgctgctgctggccgccccagccccccaccgggagagctacaagcctgtgattgtggtgcacggcctgtttgacagcagctacagcttccgccacctgctggagtacatcaatgagacccaccctggcaccgtggtgacagtgctggacctgtttgatggccgggagagcctgcggcccctgtgggagcaggtgcagggcttccgggaggccgtggtgcccatcatggccaaggccccccagggcgtgcacctgatctgctacagccagggcggcctggtgtgccgggccctgctgtctgtgatggatgaccacaacgtggacagcttcatcagcctgagcagcccccagatgggccagtatggagacacagactacctgaagtggctgttccccacctccatgaggagcaacctgtaccgcatctgctacagcccctggggccaggagttcagcatctgcaactactggcatgacccccaccatgatgacctgtacctgaatgccagcagcttcctggccctgatcaatggagagcgggaccaccccaatgccaccgtgtggaggaagaacttcctgcgggtgggccacctggtgctgattggaggcccagatgatggagtcatcaccccctggcagagcagcttcttcggcttctatgatgccaatgaaacagtgctggagatggaggagcagctggtgtacctgcgggacagctttggcctgaagaccctgctggcccggggggccatcgtgcgctgccccatggccggcatcagccacacagcctggcacagcaacagaaccctgtatgagacctgcatcgagccctggctgtcctag

SEQ ID NO: 163148 - DNA, 909 bp, synthetic construct; identical to SEQ ID NO: 163147
  misc_feature 1..909: note = Description of Artificial Sequence: Synthetic coding sequence
  source 1..909: mol_type = other DNA

SEQ ID NO: 163149 - DNA, 909 bp, synthetic construct; identical to SEQ ID NO: 163147
  misc_feature 1..909: note = Description of Artificial Sequence: Synthetic coding sequence
  source 1..909: mol_type = other DNA

SEQ ID NO: 163150 - DNA, 909 bp, synthetic construct
  misc_feature 1..909: note = Description of Artificial Sequence: Synthetic coding sequence
  source 1..909: mol_type = other DNA
atgctgggcctgtggggccagaggctgcctgctgcctgggtgctgctgctgctgcccttcctgcccctgctgctgctggccgccccagccccccaccgggccagctacaagcctgtgattgtggtgcacggcctgtttgacagcagctacagcttccgccacctgctggagtacatcaatgagacccaccctggcaccgtggtgacagtgctggacctgtttgatggccgggagagcctgcggcccctgtgggagcaggtgcagggcttccgggaggccgtggtgcccatcatggccaaggccccccagggcgtgcacctgatctgctacagccagggcggcctggtgtgccgggccctgctgtctgtgatggatgaccacaacgtggacagcttcatcagcctgagcagcccccagatgggccagtatggagacacagactacctgaagtggctgttccccacctccatgaggagcaacctgtaccgcatctgctacagcccctggggccaggagttcagcatctgcaactactggcatgacccccaccatgatgacctgtacctgaatgccagcagcttcctggccctgatcaatggagagcgggaccaccccaatgccaccgtgtggaggaagaacttcctgcgggtgggccacctggtgctgattggaggcccagatgatggagtcatcaccccctggcagagcagcttcttcggcttctatgatgccaatgaaacagtgctggagatggaggagcagctggtgtacctgcgggacagctttggcctgaagaccctgctggcccggggggccatcgtgcgctgccccatggccggcatcagccacacagcctggcacagcaacagaaccctgtatgagacctgcatcgagccctggctgtcctag

SEQ ID NO: 163151 - DNA, 909 bp, synthetic construct; identical to SEQ ID NO: 163150
  misc_feature 1..909: note = Description of Artificial Sequence: Synthetic coding sequence
  source 1..909: mol_type = other DNA

SEQ ID NO: 163152 - DNA, 909 bp, synthetic construct; identical to SEQ ID NO: 163150
  misc_feature 1..909: note = Description of Artificial Sequence: Synthetic coding sequence
  source 1..909: mol_type = other DNA

SEQ ID NO: 163153 - DNA, 927 bp, synthetic construct; identical to SEQ ID NO: 163145
  misc_feature 1..927: note = Description of Artificial Sequence: Synthetic coding sequence
  source 1..927: mol_type = other DNA

SEQ ID NO: 163154 - DNA, 282 bp, synthetic construct
  misc_feature 1..282: note = Description of Artificial Sequence: Synthetic coding sequence
  source 1..282: mol_type = other DNA
atgctgggcctgtggggccagaggctgcctgctgcctgggtgctgctgctgctgcccttcctgcccctgctgctgctggccgccccagccccccaccgggccagctacaagcctgtgattgtggtgcacggcctgtttgacagcagctacagcttccgccacctgctggagtacatcaatgaaggagccctgtgtgccggcctgtgcttcctgtcctggatgatcaccacctggatcctgagcagccccagccccctgcaccgctgggacagcatggagtag

SEQ ID NO: 163155 - DNA, 543 bp, synthetic construct
  misc_feature 1..543: note = Description of Artificial Sequence: Synthetic coding sequence
  source 1..543: mol_type = other DNA
atgctgggcctgtgtggccagaggctgcctgctgcctgggtgctgctgctgctgcccttcctgcccctgctgctgctggccgccccagccccccaccgggccagctacaagcctgtgattgtggtgcacggcctgtttgacagcagctacagcttccgccacctgctggagtacatcaatgagacccaccctggcaccgtggtgacagtgctggacctgtttgatggccgggagagcctgcggcccctgtgggagcaggtgcagggcttccgggaggccgtggtgcccatcatggccaaggccccccagggcgtgcacctgatctgctacagccagggcggcctggtgtgccgggccctgctgtctgtgatggatgaccacaacgtggacagcttcatcagcctgagcagcccccagatgggccagtatggagacacagactacctgaagtggctgttccccacctccatgaggagcaacctgtaccgcatctgctacagcccctggggccaggagttcagcatctgcaactactggcactag

SEQ ID NO: 163156 - DNA, 927 bp, synthetic construct; identical to SEQ ID NO: 163145
  misc_feature 1..927: note = Description of Artificial Sequence: Synthetic coding sequence
  source 1..927: mol_type = other DNA

SEQ ID NO: 163157 - DNA, 603 bp, synthetic construct
  misc_feature 1..603: note = Description of Artificial Sequence: Synthetic coding sequence
  source 1..603: mol_type = other DNA
atgctgggcctgtggggccagaggctgcctgctgcctgggtgctgctgctgctgcccttcctgcccctgctgctgctggccgccccagccccccaccgggagagctacaagcctgtgattgtggtgcacggcctgtttgacagcagctacagcttccgccacctgctggagtacatcaatgagacccaccctggcaccgtggtgacagtgctggacctgtttgatggccgggagagcctgcggcccctgtgggagcaggtgcagggcttccgggaggccgtggtgcccatcatggccaaggccccccagggcgtgcacctgatctgctacagccagggcggcctggtgtgccgggccctgctgtctgtgatggatgaccacaacgtggacagcttcatcagcctgagcagcccccagatgggccagtatggagacacagactacctgaagtggctgttccccacctccatgaggagcaacctgtaccgcatctgctacagcccctggggccaggagttcagcatctgcaactactggcatgacccccaccatgatgacctgtacctgaatgccagcagcttcctggccctgatcaatggatag

SEQ ID NO: 163158 - DNA, 477 bp, synthetic construct
  misc_feature 1..477: note = Description of Artificial Sequence: Synthetic coding sequence
  source 1..477: mol_type = other DNA
atgctgggcctgtggggccagaggctgcctgctgcctgggtgctgctgctgctgcccttcctgcccctgctgctgctggccgccccagccccccaccgggagagctacaagcctgtgattgtggtgcacggcctgtttgacagcagctacagcttccgccacctgctggagtacatcaatgagatgggccagtatggagacacagactacctgaagtggctgttccccacctccatgaggagcaacctgtaccgcatctgctacagcccctggggccaggagttcagcatctgcaactactggcatgacccccaccatgatgacctgtacctgaatgccagcagcttcctggccctgatcaatggagagcgggaccaccccaatgccaccgtgtggaggaagaacttcctgcgggtgggccacctggtgctgattggaggcccagatgatggagtcatcaccccctggcagagctag

SEQ ID NO: 163159 - DNA, 543 bp, synthetic construct
  misc_feature 1..543: note = Description of Artificial Sequence: Synthetic coding sequence
  source 1..543: mol_type = other DNA
atgctgggcctgtggggccagaggctgcctgctgcctgggtgctgctgctgctgcccttcctgcccctgctgctgctggccgccccagccccccaccgggccagctacaagcctgtgattgtggtgcacggcctgtttgacagcagctacagcttccgccacctgctggagtacatcaatgagacccaccctggcaccgtggtgacagtgctggacctgtttgatggccgggagagcctgcggcccctgtgggagcaggtgcagggcttccgggaggccgtggtgcccatcatggccaaggccccccagggcgtgcacctgatctgctacagccagggcggcctggtgtgccgggccctgctgtctgtgatggatgaccacaacgtggacagcttcatcagcctgagcagcccccagatgggccagtatggagacacagactacctgaagtggctgttccccacctccatgaggagcaacctgtaccgcatctgctacagcccctggggccaggagttcagcatctgcaactactggcactag

SEQ ID NO: 163160 - DNA, 477 bp, synthetic construct
  misc_feature 1..477: note = Description of Artificial Sequence: Synthetic coding sequence
  source 1..477: mol_type = other DNA
atgctgggcctgtggggccagaggctgcctgctgcctgggtgctgctgctgctgcccttcctgcccctgctgctgctggccgccccagccccccaccgggccagctacaagcctgtgattgtggtgcacggcctgtttgacagcagctacagcttccgccacctgctggagtacatcaatgagatgggccagtatggagacacagactacctgaagtggctgttccccacctccatgaggagcaacctgtaccgcatctgctacagcccctggggccaggagttcagcatctgcaactactggcatgacccccaccatgatgacctgtacctgaatgccagcagcttcctggccctgatcaatggagagcgggaccaccccaatgccaccgtgtggaggaagaacttcctgcgggtgggccacctggtgctgattggaggcccagatgatggagtcatcaccccctggcagagctag

SEQ ID NO: 163161 - DNA, 543 bp, synthetic construct; identical to SEQ ID NO: 163159
  misc_feature 1..543: note = Description of Artificial Sequence: Synthetic coding sequence
  source 1..543: mol_type = other DNA

SEQ ID NO: 163162 - DNA, 909 bp, synthetic construct; identical to SEQ ID NO: 163150
  misc_feature 1..909: note = Description of Artificial Sequence: Synthetic coding sequence
  source 1..909: mol_type = other DNA

SEQ ID NO: 163163 - DNA, 909 bp, synthetic construct; identical to SEQ ID NO: 163150
  misc_feature 1..909: note = Description of Artificial Sequence: Synthetic coding sequence
  source 1..909: mol_type = other DNA

SEQ ID NO: 163164 - DNA, 927 bp, synthetic construct; identical to SEQ ID NO: 163145
  misc_feature 1..927: note = Description of Artificial Sequence: Synthetic coding sequence
  source 1..927: mol_type = other DNA

SEQ ID NO: 163165 - DNA, 282 bp, synthetic construct; identical to SEQ ID NO: 163154
  misc_feature 1..282: note = Description of Artificial Sequence: Synthetic coding sequence
  source 1..282: mol_type = other DNA

SEQ ID NO: 163166 - DNA, 909 bp, synthetic construct; identical to SEQ ID NO: 163150
  misc_feature 1..909: note = Description of Artificial Sequence: Synthetic coding sequence
  source 1..909: mol_type = other DNA

SEQ ID NO: 163167 - DNA, 477 bp, synthetic construct
  misc_feature 1..477: note = Description of Artificial Sequence: Synthetic coding sequence
  source 1..477: mol_type = other DNA
atgctgggcctgtgtggccagaggctgcctgctgcctgggtgctgctgctgctgcccttcctgcccctgctgctgctggccgccccagccccccaccgggccagctacaagcctgtgattgtggtgcacggcctgtttgacagcagctacagcttccgccacctgctggagtacatcaatgagatgggccagtatggagacacagactacctgaagtggctgttccccacctccatgaggagcaacctgtaccgcatctgctacagcccctggggccaggagttcagcatctgcaactactggcatgacccccaccatgatgacctgtacctgaatgccagcagcttcctggccctgatcaatggagagcgggaccaccccaatgccaccgtgtggaggaagaacttcctgcgggtgggccacctggtgctgattggaggcccagatgatggagtcatcaccccctggcagagctag

SEQ ID NO: 163168 - DNA, 711 bp, synthetic construct
  misc_feature 1..711: note = Description of Artificial Sequence: Synthetic coding sequence
  source 1..711: mol_type = other DNA
atgctgggcctgtggggccagaggctgcctgctgcctgggtgctgctgctgctgcccttcctgcccctgctgctgctggccgccccagccccccaccgggagagctacaagcctgtgattgtggtgcacggcctgtttgacagcagctacagcttccgccacctgctggagtacatcaatgagacccaccctggcaccgtggtgacagtgctggacctgtttgatggccgggagagcctgcggcccctgtgggagcaggtgcagggcttccgggaggccgtggtgcccatcatggccaaggccccccagggcgtgcacctgatctgctacagccagggcggcctggtgtgccgggccctgctgtctgtgatggatgaccacaacgtggacagcttcatcagcctgagcagcccccagatgggccagtatggagacacagactacctgaagtggctgttccccacctccatgaggagcaacctgtaccgcatctgctacagcccctggggccaggagttcagcatctgcaactactggcatgacccccaccatgatgacctgtacctgaatgccagcagcttcctggccctgatcaatggagagcgggaccaccccaatgccaccgtgtggaggaagaacttcctgcgggtgggccacctggtgctgattggaggcccagatgatggagtcatcaccccctggcagagctag

SEQ ID NO: 163169 - DNA, 543 bp, synthetic construct; identical to SEQ ID NO: 163159
  misc_feature 1..543: note = Description of Artificial Sequence: Synthetic coding sequence
  source 1..543: mol_type = other DNA

SEQ ID NO: 163170 - DNA, 711 bp, synthetic construct; identical to SEQ ID NO: 163168
  misc_feature 1..711: note = Description of Artificial Sequence: Synthetic coding sequence
  source 1..711: mol_type = other DNA

SEQ ID NO: 163171 - DNA, 603 bp, synthetic construct
  misc_feature 1..603: note = Description of Artificial Sequence: Synthetic coding sequence
  source 1..603: mol_type = other DNA
atgctgggcctgtggggccagaggctgcctgctgcctgggtgctgctgctgctgcccttcctgcccctgctgctgctggccgccccagccccccaccgggccagctacaagcctgtgattgtggtgcacggcctgtttgacagcagctacagcttccgccacctgctggagtacatcaatgagacccaccctggcaccgtggtgacagtgctggacctgtttgatggccgggagagcctgcggcccctgtgggagcaggtgcagggcttccgggaggccgtggtgcccatcatggccaaggccccccagggcgtgcacctgatctgctacagccagggcggcctggtgtgccgggccctgctgtctgtgatggatgaccacaacgtggacagcttcatcagcctgagcagcccccagatgggccagtatggagacacagactacctgaagtggctgttccccacctccatgaggagcaacctgtaccgcatctgctacagcccctggggccaggagttcagcatctgcaactactggcatgacccccaccatgatgacctgtacctgaatgccagcagcttcctggccctgatcaatggatag

SEQ ID NO: 163172 - DNA, 909 bp, synthetic construct; identical to SEQ ID NO: 163150
  misc_feature 1..909: note = Description of Artificial Sequence: Synthetic coding sequence
  source 1..909: mol_type = other DNA

SEQ ID NO: 163173 - DNA, 603 bp, synthetic construct; identical to SEQ ID NO: 163171
  misc_feature 1..603: note = Description of Artificial Sequence: Synthetic coding sequence
  source 1..603: mol_type = other DNA

SEQ ID NO: 163174 - DNA, 729 bp, synthetic construct
  misc_feature 1..729: note = Description of Artificial Sequence: Synthetic coding sequence
  source 1..729: mol_type = other DNA
atgaagagctgtggctccatgctgggcctgtggggccagaggctgcctgctgcctgggtgctgctgctgctgcccttcctgcccctgctgctgctggccgccccagccccccaccgggagagctacaagcctgtgattgtggtgcacggcctgtttgacagcagctacagcttccgccacctgctggagtacatcaatgagacccaccctggcaccgtggtgacagtgctggacctgtttgatggccgggagagcctgcggcccctgtgggagcaggtgcagggcttccgggaggccgtggtgcccatcatggccaaggccccccagggcgtgcacctgatctgctacagccagggcggcctggtgtgccgggccctgctgtctgtgatggatgaccacaacgtggacagcttcatcagcctgagcagcccccagatgggccagtatggagacacagactacctgaagtggctgttccccacctccatgaggagcaacctgtaccgcatctgctacagcccctggggccaggagttcagcatctgcaactactggcatgacccccaccatgatgacctgtacctgaatgccagcagcttcctggccctgatcaatggagagcgggaccaccccaatgccaccgtgtggaggaagaacttcctgcgggtgggccacctggtgctgattggaggcccagatgatggagtcatcaccccctggcagagctag

SEQ ID NO: 163175 - DNA, 711 bp, synthetic construct; identical to SEQ ID NO: 163168
  misc_feature 1..711: note = Description of Artificial Sequence: Synthetic coding sequence
  source 1..711: mol_type = other DNA

SEQ ID NO: 163176 - DNA, 543 bp, synthetic construct; identical to SEQ ID NO: 163159
  misc_feature 1..543: note = Description of Artificial Sequence: Synthetic coding sequence
  source 1..543: mol_type = other DNA

SEQ ID NO: 163177 - DNA, 477 bp, synthetic construct; identical to SEQ ID NO: 163160
  misc_feature 1..477: note = Description of Artificial Sequence: Synthetic coding sequence
  source 1..477: mol_type = other DNA

SEQ ID NO: 163178 - DNA, 603 bp, synthetic construct; identical to SEQ ID NO: 163157
  misc_feature 1..603: note = Description of Artificial Sequence: Synthetic coding sequence
  source 1..603: mol_type = other DNA

SEQ ID NO: 163179 - DNA, 603 bp, synthetic construct
  misc_feature 1..603: note = Description of Artificial Sequence: Synthetic coding sequence
  source 1..603: mol_type = other DNA
atgctgggcctgtgtggccagaggctgcctgctgcctgggtgctgctgctgctgcccttcctgcccctgctgctgctggccgccccagccccccaccgggccagctacaagcctgtgattgtggtgcacggcctgtttgacagcagctacagcttccgccacctgctggagtacatcaatgagacccaccctggcaccgtggtgacagtgctggacctgtttgatggccgggagagcctgcggcccctgtgggagcaggtgcagggcttccgggaggccgtggtgcccatcatggccaaggccccccagggcgtgcacctgatctgctacagccagggcggcctggtgtgccgggccctgctgtctgtgatggatgaccacaacgtggacagcttcatcagcctgagcagcccccagatgggccagtatggagacacagactacctgaagtggctgttccccacctccatgaggagcaacctgtaccgcatctgctacagcccctggggccaggagttcagcatctgcaactactggcatgacccccaccatgatgacctgtacctgaatgccagcagcttcctggccctgatcaatggatag

SEQ ID NO: 163180 - DNA, 441 bp, synthetic construct
  misc_feature 1..441: note = Description of Artificial Sequence: Synthetic coding sequence
  source 1..441: mol_type = other DNA
atggatgaccacaacgtggacagcttcatcagcctgagcagcccccagatgggccagtacggggacacagactacctgaagtggctgttccccacctccatgaggagcaacctgtaccgcatctgctacagcccctggggccaggagttcagcatctgcaactactggcatgacccccaccatgatgacctgtacctgaatgccagcagcttcctggccctgatcaacggggagcgggaccaccccaatgccaccgtgtggaggaagaacttcctgcgggtgggccacctggtgctgattggaggcccagatgatggagtcatcaccccctggcagagcagcttcttcggcttctatgatgccaatgagaccgtgctggagatggaggagcagctgcctgtgggcagctctgtgaaggccaaccacggcgtgcagggctag

SEQ ID NO: 163181 - DNA, 477 bp, synthetic construct; identical to SEQ ID NO: 163160
  misc_feature 1..477: note = Description of Artificial Sequence: Synthetic coding sequence
  source 1..477: mol_type = other DNA

SEQ ID NO: 163182 - DNA, 909 bp, synthetic construct; identical to SEQ ID NO: 163150
  misc_feature 1..909: note = Description of Artificial Sequence: Synthetic coding sequence
  source 1..909: mol_type = other DNA

SEQ ID NO: 163183 - DNA, 909 bp, synthetic construct; identical to SEQ ID NO: 163150
  misc_feature 1..909: note = Description of Artificial Sequence: Synthetic coding sequence
  source 1..909: mol_type = other DNA

SEQ ID NO: 163184 - DNA, 909 bp, synthetic construct; identical to SEQ ID NO: 163150
  misc_feature 1..909: note = Description of Artificial Sequence: Synthetic coding sequence
  source 1..909: mol_type = other DNA

SEQ ID NO: 163185 - DNA, 282 bp, synthetic construct
  misc_feature 1..282: note = Description of Artificial Sequence: Synthetic coding sequence
  source 1..282: mol_type = other DNA
atgctgggcctgtggggccagaggctgcctgctgcctgggtgctgctgctgctgcccttcctgcccctgctgctgctggccgccccagccccccaccgggagagctacaagcctgtgattgtggtgcacggcctgtttgacagcagctacagcttccgccacctgctggagtacatcaatgaaggagccctgtgtgccggcctgtgcttcctgtcctggatgatcaccacctggatcctgagcagccccagccccctgcaccgctgggacagcatggagtag

SEQ ID NO: 163186 - DNA, 603 bp, synthetic construct; identical to SEQ ID NO: 163171
  misc_feature 1..603: note = Description of Artificial Sequence: Synthetic coding sequence
  source 1..603: mol_type = other DNA

SEQ ID NO: 163187 - DNA, 603 bp, synthetic construct; identical to SEQ ID NO: 163171
  misc_feature 1..603: note = Description of Artificial Sequence: Synthetic coding sequence
  source 1..603: mol_type = other DNA

SEQ ID NO: 163188 - DNA, 909 bp, synthetic construct; identical to SEQ ID NO: 163150
  misc_feature 1..909: note = Description of Artificial Sequence: Synthetic coding sequence
  source 1..909: mol_type = other DNA

SEQ ID NO: 163189 - DNA, 906 bp, synthetic construct
  misc_feature 1..906: note = Description of Artificial Sequence: Synthetic coding sequence
  source 1..906: mol_type = other DNA
atgctgggcctgtgtggccagaggctgcctgctgcctgggtgctgctgctgctgcccttcctgcccctgctgctgctggccgccccagccccccaccgggccagctacaagcctgtgattgtggtgcacggcctgtttgacagcagctacagcttccgccacctgctggagtacatcaatgagacccaccctggcaccgtggtgacagtgctggacctgtttgatggccgggagagcctgcggcccctgtgggagcaggtgcagggcttccgggaggccgtggtgcccatcatggccaaggccccccagggcgtgcacctgatctgctacagccagggcggcctggtgtgccgggccctgctgtctgtgatggatgaccacaacgtggacagcttcatcagcctgagcagcccccagatgggccagtatggagacacagactacctgaagtggctgttccccacctccatgaggagcaacctgtaccgcatctgctacagcccctggggccaggagttcagcatctgcaactactggcatgacccccaccatgatgacctgtacctgaatgccagcagcttcctggccctgatcaatggagagcgggaccaccccaatgccaccgtgtggaggaagaacttcctgcgggtgggccacctggtgctgattggaggcccagatgatggagtcatcaccccctggcagagcagcttcttcggcttctatgatgccaatgaaacagtgctggagatggaggagcagctgcctgcccggcccacccaccagagcgagctgctgctgctgcggctggtgtgcctgaagccacccaggaggaagaagccagcctgccgggtgcagaggcagagcgagagctggggccctggcctgagctgtgccctgtcctag

SEQ ID NO: 163190 - DNA, 477 bp, synthetic construct; identical to SEQ ID NO: 163158
  misc_feature 1..477: note = Description of Artificial Sequence: Synthetic coding sequence
  source 1..477: mol_type = other DNA

SEQ ID NO: 163191 - DNA, 543 bp, synthetic construct; identical to SEQ ID NO: 163159
  misc_feature 1..543: note = Description of Artificial Sequence: Synthetic coding sequence
  source 1..543: mol_type = other DNA

SEQ ID NO: 163192 - DNA, 603 bp, synthetic construct; identical to SEQ ID NO: 163171
  misc_feature 1..603: note = Description of Artificial Sequence: Synthetic coding sequence
  source 1..603: mol_type = other DNA

SEQ ID NO: 163193 - DNA, 909 bp, synthetic construct; identical to SEQ ID NO: 163150
  misc_feature 1..909: note = Description of Artificial Sequence: Synthetic coding sequence
  source 1..909: mol_type = other DNA

SEQ ID NO: 163194 - DNA, 909 bp, synthetic construct; identical to SEQ ID NO: 163150
  misc_feature 1..909: note = Description of Artificial Sequence: Synthetic coding sequence
  source 1..909: mol_type = other DNA

SEQ ID NO: 163195 - DNA, 282 bp, synthetic construct; identical to SEQ ID NO: 163154
  misc_feature 1..282: note = Description of Artificial Sequence: Synthetic coding sequence
  source 1..282: mol_type = other DNA

SEQ ID NO: 163196 - DNA, 282 bp, synthetic construct
  misc_feature 1..282: note = Description of Artificial Sequence: Synthetic coding sequence
  source 1..282: mol_type = other DNA
atgctgggcctgtgtggccagaggctgcctgctgcctgggtgctgctgctgctgcccttcctgcccctgctgctgctggccgccccagccccccaccgggccagctacaagcctgtgattgtggtgcacggcctgtttgacagcagctacagcttccgccacctgctggagtacatcaatgaaggagccctgtgtgccggcctgtgcttcctgtcctggatgatcaccacctggatcctgagcagccccagccccctgcaccgctgggacagcatggagtag

SEQ ID NO: 163197 - DNA, 909 bp, synthetic construct; identical to SEQ ID NO: 163150
  misc_feature 1..909: note = Description of Artificial Sequence: Synthetic coding sequence
  source 1..909: mol_type = other DNA

SEQ ID NO: 163198 - DNA, 909 bp, synthetic construct; identical to SEQ ID NO: 163150
  misc_feature 1..909: note = Description of Artificial Sequence: Synthetic coding sequence
  source 1..909: mol_type = other DNA

SEQ ID NO: 163199 - DNA, 543 bp, synthetic construct
  misc_feature 1..543: note = Description of Artificial Sequence: Synthetic coding sequence
  source 1..543: mol_type = other DNA
atgctgggcctgtggggccagaggctgcctgctgcctgggtgctgctgctgctgcccttcctgcccctgctgctgctggccgccccagccccccaccgggagagctacaagcctgtgattgtggtgcacggcctgtttgacagcagctacagcttccgccacctgctggagtacatcaatgagacccaccctggcaccgtggtgacagtgctggacctgtttgatggccgggagagcctgcggcccctgtgggagcaggtgcagggcttccgggaggccgtggtgcccatcatggccaaggccccccagggcgtgcacctgatctgctacagccagggcggcctggtgtgccgggccctgctgtctgtgatggatgaccacaacgtggacagcttcatcagcctgagcagcccccagatgggccagtatggagacacagactacctgaagtggctgttccccacctccatgaggagcaacctgtaccgcatctgctacagcccctggggccaggagttcagcatctgcaactactggcactag

SEQ ID NO: 163200 - DNA, 543 bp, synthetic construct; identical to SEQ ID NO: 163199
  misc_feature 1..543: note = Description of Artificial Sequence: Synthetic coding sequence
  source 1..543: mol_type = other DNA

SEQ ID NO: 163201 - DNA, 282 bp, synthetic construct; identical to SEQ ID NO: 163185
  misc_feature 1..282: note = Description of Artificial Sequence: Synthetic coding sequence
  source 1..282: mol_type = other DNA

SEQ ID NO: 163202 - DNA, 711 bp, synthetic construct; identical to SEQ ID NO: 163168
  misc_feature 1..711: note = Description of Artificial Sequence: Synthetic coding sequence
  source 1..711: mol_type = other DNA

SEQ ID NO: 163203 - DNA, 165 bp, synthetic construct
  misc_feature 1..165: note = Description of Artificial Sequence: Synthetic coding sequence
  source 1..165: mol_type = other DNA
tgacatgatgacctgtacctgaatgccagcagcttcctggccctgatcaatggagagcgggaccaccccaatgccaccgtgtggaggaagaacttcctgcgggtgggccacctggtgctgattggaggcccagatgatggagtcatcaccccctggcagagctag

SEQ ID NO: 163204 - DNA, 711 bp, synthetic construct; identical to SEQ ID NO: 163168
  misc_feature 1..711: note = Description of Artificial Sequence: Synthetic coding sequence
  source 1..711: mol_type = other DNA

SEQ ID NO: 163205 - DNA, 909 bp, synthetic construct; identical to SEQ ID NO: 163150
  misc_feature 1..909: note = Description of Artificial Sequence: Synthetic coding sequence
  source 1..909: mol_type = other DNA

SEQ ID NO: 163206 - DNA, 909 bp, synthetic construct; identical to SEQ ID NO: 163150
  misc_feature 1..909: note = Description of Artificial Sequence: Synthetic coding sequence
  source 1..909: mol_type = other DNA

SEQ ID NO: 163207 - DNA, 909 bp, synthetic construct; identical to SEQ ID NO: 163150
  misc_feature 1..909: note = Description of Artificial Sequence: Synthetic coding sequence
  source 1..909: mol_type = other DNA

SEQ ID NO: 163208 - DNA, 441 bp, synthetic construct; identical to SEQ ID NO: 163180
  misc_feature 1..441: note = Description of Artificial Sequence: Synthetic coding sequence
  source 1..441: mol_type = other DNA

SEQ ID NO: 163209 - DNA, 927 bp, synthetic construct; identical to SEQ ID NO: 163145
  misc_feature 1..927: note = Description of Artificial Sequence: Synthetic coding sequence
  source 1..927: mol_type = other DNA

SEQ ID NO: 163210 - DNA, 882 bp, synthetic construct; identical to SEQ ID NO: 150980
  misc_feature 1..882: note = Description of Artificial Sequence: Synthetic coding sequence
  source 1..882: mol_type = other DNA

SEQ ID NO: 163211 - DNA, 906 bp, synthetic construct
  misc_feature 1..906: note = Description of Artificial Sequence: Synthetic coding sequence
  source 1..906: mol_type = other DNA
atgctgggcctgtggggccagaggctgcctgctgcctgggtgctgctgctgctgcccttcctgcccctgctgctgctggccgccccagccccccaccgggccagctacaagcctgtgattgtggtgcacggcctgtttgacagcagctacagcttccgccacctgctggagtacatcaatgagacccaccctggcaccgtggtgacagtgctggacctgtttgatggccgggagagcctgcggcccctgtgggagcaggtgcagggcttccgggaggccgtggtgcccatcatggccaaggccccccagggcgtgcacctgatctgctacagccagggcggcctggtgtgccgggccctgctgtctgtgatggatgaccacaacgtggacagcttcatcagcctgagcagcccccagatgggccagtatggagacacagactacctgaagtggctgttccccacctccatgaggagcaacctgtaccgcatctgctacagcccctggggccaggagttcagcatctgcaactactggcatgacccccaccatgatgacctgtacctgaatgccagcagcttcctggccctgatcaatggagagcgggaccaccccaatgccaccgtgtggaggaagaacttcctgcgggtgggccacctggtgctgattggaggcccagatgatggagtcatcaccccctggcagagcagcttcttcggcttctatgatgccaatgaaacagtgctggagatggaggagcagctgcctgcccggcccacccaccagagcgagctgctgctgctgcggctggtgtgcctgaagccacccaggaggaagaagccagcctgccgggtgcagaggcagagcgagagctggggccctggcctgagctgtgccctgtcctag

SEQ ID NO: 163212 - DNA, 909 bp, synthetic construct; identical to SEQ ID NO: 163147
  misc_feature 1..909: note = Description of Artificial Sequence: Synthetic coding sequence
  source 1..909: mol_type = other DNA

SEQ ID NO: 163213 - DNA, 441 bp, synthetic construct; identical to SEQ ID NO: 163180
  misc_feature 1..441: note = Description of Artificial Sequence: Synthetic coding sequence
  source 1..441: mol_type = other DNA

SEQ ID NO: 163214 - DNA, 882 bp, synthetic construct; identical to SEQ ID NO: 150980
  misc_feature 1..882: note = Description of Artificial Sequence: Synthetic coding sequence
  source 1..882: mol_type = other DNA

SEQ ID NO: 163215 - DNA, 906 bp, synthetic construct; identical to SEQ ID NO: 163211
  misc_feature 1..906: note = Description of Artificial Sequence: Synthetic coding sequence
  source 1..906: mol_type = other DNA

SEQ ID NO: 163216 - DNA, 441 bp, synthetic construct; identical to SEQ ID NO: 163180
  misc_feature 1..441: note = Description of Artificial Sequence: Synthetic coding sequence
  source 1..441: mol_type = other DNA

SEQ ID NO: 163217 - DNA, 906 bp, synthetic construct; identical to SEQ ID NO: 163211
  misc_feature 1..906: note = Description of Artificial Sequence: Synthetic coding sequence
  source 1..906: mol_type = other DNA

SEQ ID NO: 163218 - DNA, 441 bp, synthetic construct; identical to SEQ ID NO: 163180
  misc_feature 1..441: note = Description of Artificial Sequence: Synthetic coding sequence
  source 1..441: mol_type = other DNA

SEQ ID NO: 163219 - DNA, 882 bp, synthetic construct; identical to SEQ ID NO: 150980
  misc_feature 1..882: note = Description of Artificial Sequence: Synthetic coding sequence
  source 1..882: mol_type = other DNA

SEQ ID NO: 163220 - DNA, 882 bp, synthetic construct; identical to SEQ ID NO: 150980
  misc_feature 1..882: note = Description of Artificial Sequence: Synthetic coding sequence
  source 1..882: mol_type = other DNA

SEQ ID NO: 163221 - DNA, 909 bp, synthetic construct; identical to SEQ ID NO: 163150
  misc_feature 1..909: note = Description of Artificial Sequence: Synthetic coding sequence
  source 1..909: mol_type = other DNA

SEQ ID NO: 163222 - DNA, 441 bp, synthetic construct; identical to SEQ ID NO: 163180
  misc_feature 1..441: note = Description of Artificial Sequence: Synthetic coding sequence
  source 1..441: mol_type = other DNA

SEQ ID NO: 163223 - DNA, 909 bp, synthetic construct; identical to SEQ ID NO: 163150
  misc_feature 1..909: note = Description of Artificial Sequence: Synthetic coding sequence
  source 1..909: mol_type = other DNA

SEQ ID NO: 163224 - DNA, 441 bp, synthetic construct; identical to SEQ ID NO: 163180
  misc_feature 1..441: note = Description of Artificial Sequence: Synthetic coding sequence
  source 1..441: mol_type = other DNA

SEQ ID NO: 163225 - DNA, 906 bp, synthetic construct; identical to SEQ ID NO: 163211
  misc_feature 1..906: note = Description of Artificial Sequence: Synthetic coding sequence
  source 1..906: mol_type = other DNA

SEQ ID NO: 163226 - DNA, 906 bp, synthetic construct
  misc_feature 1..906: note = Description of Artificial Sequence: Synthetic coding sequence
  source 1..906: mol_type = other DNA
atgctgggcctgtggggccagaggctgcctgctgcctgggtgctgctgctgctgcccttcctgcccctgctgctgctggccgccccagccccccaccgggagagctacaagcctgtgattgtggtgcacggcctgtttgacagcagctacagcttccgccacctgctggagtacatcaatgagacccaccctggcaccgtggtgacagtgctggacctgtttgatggccgggagagcctgcggcccctgtgggagcaggtgcagggcttccgggaggccgtggtgcccatcatggccaaggccccccagggcgtgcacctgatctgctacagccagggcggcctggtgtgccgggccctgctgtctgtgatggatgaccacaacgtggacagcttcatcagcctgagcagcccccagatgggccagtatggagacacagactacctgaagtggctgttccccacctccatgaggagcaacctgtaccgcatctgctacagcccctggggccaggagttcagcatctgcaactactggcatgacccccaccatgatgacctgtacctgaatgccagcagcttcctggccctgatcaatggagagcgggaccaccccaatgccaccgtgtggaggaagaacttcctgcgggtgggccacctggtgctgattggaggcccagatgatggagtcatcaccccctggcagagcagcttcttcggcttctatgatgccaatgaaacagtgctggagatggaggagcagctgcctgcccggcccacccaccagagcgagctgctgctgctgcggctggtgtgcctgaagccacccaggaggaagaagccagcctgccgggtgcagaggcagagcgagagctggggccctggcctgagctgtgccctgtcctag

SEQ ID NO: 163227 - DNA, 906 bp, synthetic construct; identical to SEQ ID NO: 163211
  misc_feature 1..906: note = Description of Artificial Sequence: Synthetic coding sequence
  source 1..906: mol_type = other DNA

SEQ ID NO: 163228 - DNA, 909 bp, synthetic construct; identical to SEQ ID NO: 163150
  misc_feature 1..909: note = Description of Artificial Sequence: Synthetic coding sequence
  source 1..909: mol_type = other DNA

SEQ ID NO: 163229 - DNA, 3606 bp, synthetic construct
  misc_feature 1..3606: note = Description of Artificial Sequence: Synthetic coding sequence
  source 1..3606: mol_type = other DNA
atgaactttgagggcctggaccccggcctggccgagtatgccccagccatgcacagcgccctggaccctgtgctggatgcccacctgaaccccagcctgctgcagaatgtggagctggaccctgagggcgtggccctggaggccctgcctgtgcaggagagcgtgcacatcatggagggcgtgtacagcgagctgcacagcgtggtggccgaggtgggcgtgcctgtgtctgtgagccactttgacctgcacgaggagatgctgtgggtgggcagccatggaggccacgccaccagcttctttggacctgccctggagcgctacagcagcttccaggtgaatggaagtgatgacatccggcagatccagagcctggagaatggcatcctcttcctgaccaagaacaacctgaagtacatggcccggggcggcctcatcatctttgactacctgctggatgaaaatgaagacatgcacagcctgctgctgacagacagcagcaccctgctggtgggcggcctgcagaaccacatcattgaaattgacctgaacacagtgcaggagacccagaagtatgctgtggagaccccaggagtgaccatcatgaggcagaccaaccgcttcttcttctgtggccacaccagcggcaaggtgtccctgcgggacctgcggaccttcaaggtggagcacgagtttgatgccttcagcggcagcctgagtgactttgatgtgcacggcaacctgctggccgcctgtggcttcagcagccggctgaccggcctggcctgtgaccgcttcctgaaggtgtatgacctgaggatgatgagggccatcacccccctgcaggtgcacgtggaccctgccttcctgcgcttcatccccacctacaccagccggctggccatcatcagccagagcggccagtgccagttctgtgagcccaccggcctggccaacccagctgacatcttccacgtgaaccctgtgggccccctgctgatgacctttgatgtgtctgccagcaagcaggccctggcctttggagacagcgagggctgtgtgcacctgtggacagacagccctgagcccagcttcaacccctacagccgggagacagaatttgccctgccctgcctggtggacagcctgccccccctggactggagccaggacctgctgcccctgagcctcatccctgtgcccctgaccacagacaccctgctgagtgactggccagctgccaacagcgccccagccccccggcgggcccctcctgtggatgctgagatcctgcggaccatgaagaaggtgggcttcatcggctacgcccccaaccccaggacccggctgaggaaccagatcccctaccgcctgaaggagagtgacagcgagtttgacagcttcagccaggtgacagagagccctgtgggccgggaggaggagccccacctgcacatggtgtccaagaagtacaggaaggtgaccatcaagtacagcaagctgggcctggaggactttgacttcaagcactacaacaagaccctgtttgctggcctggagccccacatccccaatgcctactgcaactgcatgatccaggtgctgtacttcctggagcctgtgcgctgcctgatccagaaccacctgtgccagaaggagttctgcctggcctgtgagctgggcttcctgttccacatgctggacctgagcagaggagacccctgccagggcaacaacttcctgcgggccttccgcaccatccctgaggccagcgccctgggcctcatcctggccgacagtgatgaggccagcggcaagggcaacctggcccggctcatccagcgctggaaccgcttcatcctgacccagctgcaccaggacatgcaggagctggagatcccccaggcctacagaggagctgggggcagcttctgcagcagcggggacagcgtcatcggccagctgttcagctgtgagatggagaactgcagcctgtgccgctgtggcagcgagaccgtgcgggccagcagcaccctgctcttcaccctgagctacccagatggcagcaagagtgacaagacaggcaagaactatgactttgcccaggtgctgaagaggagcatctgcctggaccagaacacccaggcctggtgtgacacctgtgagaagtaccagcccaccatccagaccaggaacatccgccacctgcctgacatcctggtgatcaactgtgaggtgaacagcagcaaggaggccgacttctggaggatgcaggccgaggtggccttcaagatggctgtgaagaagcacggcggggagatcagcaagaacaaggagtttgccctggccgactggaaggagctgggcagccctgagggcgtgctggtgtgccccagcattgaggagctgaagaatgtgtggctgcccttcagcatccgcatgaagatgaccaagaacaagggcctggatgtgtgcaactggacagatggagatgagatgcagtggggccctgcccgggcagaggaggagcacggcgtgtatgtgtatgacctgatggccaccgtggtgcacatcctggacagcaggactggaggcagcctggtggcccacatcaaggtgggggagacctaccaccagaggaaggagggcgtgacccaccagcagtggtacctgttcaatgacttcctgattgagcccatcgacaagcatgaagctgtgcagtttgacatgaactggaaggtgcctgccatcctgtactacgtgaagaggaacctgaacagccgctacaacctgaacatcaagaaccccatcgaggcctctgtgctgctggccgaggccagcctggccaggaagcagaggaagacccacaccaccttcatccccctgatgctgaatgagatgccccagatcggggacctggtgggcctggatgctgagtttgtgaccctgaatgaggaggaggccgagctgcggagtgatggcaccaagagcaccatcaagcccagccagatgtctgtggcccgcatcacctgtgtgcggggccagggccccaatgaaggcatccccttcattgatgactacatcagcacccaggagcaggtggtggactacctgacccagtacagcggcatcaagccaggggacctggatgccaagatcagcagcaagcacctgaccaccctgaagagcacctacctgaagctgcgcttcctgattgacatcggcgtgaagtttgtgggccacggcctgcagaaggacttccgggtcatcaacctgatggtgcccaaggaccaggtgctggacacagtgtacctgttccacatgcccaggaagaggatgatcagcctgcgcttcctggcctggtacttcctggacctgaagatccagggcgagacccatgacagcattgaagatgccaggacagccctgcagctgtacaggaagtacctggagctgagcaagaatggaacagagcctgagagcttccacaaggtgctgaagggcctgtatgagaagggcaggaagatggactggaaggtgcctgagcctgagggccagaccagccccaagaatgctgctgtgttcagctctgtgctggccctgtag

SEQ ID NO: 163230 - DNA, 3609 bp, synthetic construct
  misc_feature 1..3609: note = Description of Artificial Sequence: Synthetic coding sequence
  source 1..3609: mol_type = other DNA
atgaactttgagggcctggaccccggcctggccgagtatgccccagccatgcacagcgccctggaccctgtgctggatgcccacctgaaccccagcctgctgcagaatgtggagctggaccctgagggcgtggccctggaggccctgcctgtgcaggagagcgtgcacatcatggagggcgtgtacagcgagctgcacagcgtggtggccgaggtgggcgtgcctgtgtctgtgagccactttgacctgcacgaggagatgctgtgggtgggcagccatggaggccacgccaccagcttctttggacctgccctggagcgctacagcagcttccaggtgaatggaagtgatgacatccggcagatccagagcctggagaatggcatcctcttcctgaccaagaacaacctgaagtacatggcccggggcggcctcatcatctttgactacctgctggatgaaaatgaagacatgcacagcctgctgctgacagacagcagcaccctgctggtgggcggcctgcagaaccacatcattgaaattgacctgaacacagtgcaggagacccagaagtatgctgtggagaccccaggagtgaccatcatgaggcagaccaaccgcttcttcttctgtggccacaccagcggcaaggtgtccctgcgggacctgcggaccttcaaggtggagcacgagtttgatgccttcagcggcagcctgagtgactttgatgtgcacggcaacctgctggccgcctgtggcttcagcagccggctgaccggcctggcctgtgaccgcttcctgaaggtgtatgacctgaggatgatgagggccatcacccccctgcaggtgcacgtggaccctgccttcctgcgcttcatccccacctacaccagccggctggccatcatcagccagagcggccagtgccagttctgtgagcccaccggcctggccaacccagctgacatcttccacgtgaaccctgtgggccccctgctgatgacctttgatgtgtctgccagcaagcaggccctggcctttggagacagcgagggctgtgtgcacctgtggacagacagccctgagcccagcttcaacccctacagccgggagacagaatttgccctgccctgcctggtggacagcctgccccccctggactggagccaggacctgctgcccctgagcctcatccctgtgcccctgaccacagacaccctgctgagtgactggccagctgccaacagcgccccagccccccggcgggcccctcctgtggatgctgagatcctgcggaccatgaagaaggtgggcttcatcggctacgcccccaaccccaggacccggctgaggaaccagatcccctaccgcctgaaggagagtgacagcgagtttgacagcttcagccaggtgacagagagccctgtgggccgggaggaggagccccacctgcacatggtgtccaagaagtacaggaaggtgaccatcaagtacagcaagctgggcctggaggactttgacttcaagcactacaacaagaccctgtttgctggcctggagccccacatccccaatgcctactgcaactgcatgatccaggtgctgtacttcctggagcctgtgcgctgcctgatccagaaccacctgtgccagaaggagttctgcctggcctgtgagctgggcttcctgttccacatgctggacctgagcagaggagacccctgccagggcaacaacttcctgcgggccttccgcaccatccctgaggccagcgccctgggcctcatcctggccgacagtgatgaggccagcggcaagggcaacctggcccggctcatccagcgctggaaccgcttcatcctgacccagctgcaccaggacatgcaggagctggagatcccccaggcctacagaggagctgggggcagcagcttctgcagcagcggggacagcgtgattggccagctgttcagctgtgagatggagaactgcagcctgtgccgctgtggcagcgagaccgtgcgggccagcagcaccctgctcttcaccctgagctacccagatggcagcaagagtgacaagacaggcaagaactatgactttgcccaggtgctgaagaggagcatctgcctggaccagaacacccaggcctggtgtgacacctgtgagaagtaccagcccaccatccagaccaggaacatccgccacctgcctgacatcctggtgatcaactgtgaggtgaacagcagcaaggaggccgacttctggaggatgcaggccgaggtggccttcaagatggctgtgaagaagcatggaggagagatcagcaagaacaaggagtttgccctggccgactggaaggagctgggcagccctgagggcgtgctggtgtgccccagcattgaggagctgaagaatgtgtggctgcccttcagcatccgcatgaagatgaccaagaacaagggcctggatgtgtgcaactggacagatggagatgagatgcagtggggccctgcccgggcagaggaggagcacggcgtgtatgtgtatgacctgatggccaccgtggtgcacatcctggacagcaggactggaggcagcctggtggcccacatcaaggtgggggagacctaccaccagaggaaggagggcgtgacccaccagcagtggtacctgttcaatgacttcctgattgagcccatcgacaagcatgaggccgtgcagtttgacatgaactggaaggtgcctgccatcctgtactacgtgaagaggaacctgaacagccgctacaacctgaacatcaagaaccccatcgaggcctctgtgctgctggccgaggccagcctggccaggaagcagaggaagacccacaccaccttcatccccctgatgctgaatgagatgccccagattggagacctggtgggcctggatgctgagtttgtgaccctgaatgaggaggaggccgagctgcggagtgatggcaccaagagcaccatcaagcccagccagatgtctgtggcccgcatcacctgtgtgcggggccagggccccaatgaaggcatccccttcattgatgactacatcagcacccaggagcaggtggtggactacctgacccagtacagcggcatcaagccaggggacctggatgccaagatcagcagcaagcacctgaccaccctgaagagcacctacctgaagctgcgcttcctgattgatattggagtgaagtttgtgggccacggcctgcagaaggacttccgggtcatcaacctgatggtgcccaaggaccaggtgctggacacagtgtacctgttccacatgcccaggaagaggatgatcagcctgcgcttcctggcctggtacttcctggacctgaagatccagggcgagacccatgacagcattgaagatgccaggacagccctgcagctgtacaggaagtacctggagctgagcaagaatggaacagagcctgagagcttccacaaggtgctgaagggcctgtatgaaaaaggaaggaagatggactggaaggtgcctgagcctgagggccagaccagccccaagaatgctgctgtgttcagctctgtgctggccctgtag

SEQ ID NO: 163231 - DNA, 3597 bp, synthetic construct
  misc_feature 1..3597: note = Description of Artificial Sequence: Synthetic coding sequence
  source 1..3597: mol_type = other DNA
atgaactttgagggcctggaccccggcctggccgagtatgccccagccatgcacagcgccctggaccctgtgctggatgcccacctgaaccccagcctgctgcagaatgtggagctggaccctgagggcgtggccctggaggccctgcctgtgcaggagagcgtgcacatcatggagggcgtgtacagcgagctgcacagcgtggtggccgaggtgggcgtgcctgtgtctgtgagccactttgacctgcacgaggagatgctgtgggtgggcagccatggaggccacgccaccagcttctttggacctgccctggagcgctacagcagcttccaggtgaatggaagtgatgacatccggcagatccagagcctggagaatggcatcctcttcctgaccaagaacaacctgaagtacatggcccggggcggcctcatcatctttgactacctgctggatgaaaatgaagacatgcacagcctgctgctgacagacagcagcaccctgctggtgggcggcctgcagaaccacatcattgaaattgacctgaacacagtgcaggagacccagaagtatgctgtggagaccccaggagtgaccatcatgaggcagaccaaccgcttcttcttctgtggccacaccagcggcaaggtgtccctgcgggacctgcggaccttcaaggtggagcacgagtttgatgccttcagcggcagcctgagtgactttgatgtgcacggcaacctgctggccgcctgtggcttcagcagccggctgaccggcctggcctgtgaccgcttcctgaaggtgtatgacctgaggatgatgagggccatcacccccctgcaggtgcacgtggaccctgccttcctgcgcttcatccccacctacaccagccggctggccatcatcagccagagcggccagtgccagttctgtgagcccaccggcctggccaacccagctgacatcttccacgtgaaccctgtgggccccctgctgatgacctttgatgtgtctgccagcaagcaggccctggcctttggagacagcgagggctgtgtgcacctgtggacagacagccctgagcccagcttcaacccctacagccgggagacagaatttgccctgccctgcctggtggacagcctgccccccctggactggagccaggacctgctgcccctgagcctcatccctgtgcccctgaccacagacaccctgctgagtgactggccagctgccaacagcgccccagccccccggcgggcccctcctgtggatgctgagatcctgcggaccatgaagaaggtgggcttcatcggctacgcccccaaccccaggacccggctgaggaaccagatcccctaccgcctgaaggagagtgacagcgagtttgacagcttcagccaggtgacagagagccctgtgggccgggaggaggagccccacctgcacatggtgtccaagaagtacaggaaggtgaccatcaagtacagcaagctgggcctggaggactttgacttcaagcactacaacaagaccctgtttgctggcctggagccccacatccccaatgcctactgcaactgcatgatccaggtgctgtacttcctggagcctgtgcgctgcctgatccagaaccacctgtgccagaaggagttctgcctggcctgtgagctgggcttcctgttccacatgctggacctgagcagaggagacccctgccagggcaacaacttcctgcgggccttccgcaccatccctgaggccagcgccctgggcctcatcctggccgacagtgatgaggccagcggcaagggcaacctggcccggctcatccagcgctggaaccgcttcatcctgacccagctgcaccaggacatgcaggagctggagatcccccaggcctacagaggagctgggggcagcagcttctgcagcagcggggacagcgtgattggccagctgttcagctgtgagatggagaactgcagcctgtgccgctgtggcagcgagaccgtgcgggccagcagcaccctgctcttcaccctgagctacccagatgacaagacaggcaagaactatgactttgcccaggtgctgaagaggagcatctgcctggaccagaacacccaggcctggtgtgacacctgtgagaagtaccagcccaccatccagaccaggaacatccgccacctgcctgacatcctggtgatcaactgtgaggtgaacagcagcaaggaggccgacttctggaggatgcaggccgaggtggccttcaagatggctgtgaagaagcatggaggagagatcagcaagaacaaggagtttgccctggccgactggaaggagctgggcagccctgagggcgtgctggtgtgccccagcattgaggagctgaagaatgtgtggctgcccttcagcatccgcatgaagatgaccaagaacaagggcctggatgtgtgcaactggacagatggagatgagatgcagtggggccctgcccgggcagaggaggagcacggcgtgtatgtgtatgacctgatggccaccgtggtgcacatcctggacagcaggactggaggcagcctggtggcccacatcaaggtgggggagacctaccaccagaggaaggagggcgtgacccaccagcagtggtacctgttcaatgacttcctgattgagcccatcgacaagcatgaggccgtgcagtttgacatgaactggaaggtgcctgccatcctgtactacgtgaagaggaacctgaacagccgctacaacctgaacatcaagaaccccatcgaggcctctgtgctgctggccgaggccagcctggccaggaagcagaggaagacccacaccaccttcatccccctgatgctgaatgagatgccccagattggagacctggtgggcctggatgctgagtttgtgaccctgaatgaggaggaggccgagctgcggagtgatggcaccaagagcaccatcaagcccagccagatgtctgtggcccgcatcacctgtgtgcggggccagggccccaatgaaggcatccccttcattgatgactacatcagcacccaggagcaggtggtggactacctgacccagtacagcggcatcaagccaggggacctggatgccaagatcagcagcaagcacctgaccaccctgaagagcacctacctgaagctgcgcttcctgattgatattggagtgaagtttgtgggccacggcctgcagaaggacttccgggtcatcaacctgatggtgcccaaggaccaggtgctggacacagtgtacctgttccacatgcccaggaagaggatgatcagcctgcgcttcctggcctggtacttcctggacctgaagatccagggcgagacccatgacagcattgaagatgccaggacagccctgcagctgtacaggaagtacctggagctgagcaagaatggaacagagcctgagagcttccacaaggtgctgaagggcctgtatgaaaaaggaaggaagatggactggaaggtgcctgagcctgagggccagaccagccccaagaatgctgctgtgttcagctctgtgctggccctgtag

SEQ ID NO: 163232 - DNA, 3609 bp, synthetic construct; identical to SEQ ID NO: 163230
  misc_feature 1..3609: note = Description of Artificial Sequence: Synthetic coding sequence
  source 1..3609: mol_type = other DNA

SEQ ID NO: 163233 - DNA, 987 bp, synthetic construct
  misc_feature 1..987: note = Description of Artificial Sequence: Synthetic coding sequence
  source 1..987: mol_type = other DNA
atggatgctgtgctgctggagcacttccctgggggcctggatgccttccccagcagctactttgatgaagatgacttcttcacagaccagagcagccgggaccccctggaggatggagatgagctgctggctgatgagcaggccgaggtggagttcctgagccaccagctgcacgagtactgctacagagatggagcctgcctgctgctgcagcctgcccccccagctgcccccctggccctggccccacccagcagcggcggcctgggggagccagatgatggcggcggcggcggctactgctgtgagaccggggcccctcctgggggcttcccctacagccctggcagcccccccagctgcctggcctacccctgtgccggggctgctgtgctgagccctggggcccggctgcggggcctgagcggggctgctgctgctgctgccaggagaagaagaagagtgcgctctgaggccgagctgcagcagctgcggcaggccgccaacgtgcgggagaggaggaggatgcagagcatcaatgatgcctttgagggcctgcggagccacatccccaccctgccctatgagaagaggctgagcaaggtggacaccctgcggctggccatcggctacatcaacttcctgtctgagctggtgcaggccgacctgcccctgcggggcggcggggccggcggctgcggcggccctgggggcggcggccgcctgggcggggacagccctggcagccaggcccagaaggtgatcatctgccaccggggcaccaggagccccagccccagcgaccctgactatggcctgccccccctggccggccacagcctgtcctggacagatgagaagcagctgaaggagcagaacatcatcagaacagccaaggtgtggaccccagaggaccccaggaagctgaacagcaagagcagcttcaacaacattgaaaatgagcccccatttgaatttgtgtcctag

SEQ ID NO: 163234 - DNA, 852 bp, synthetic construct
  misc_feature 1..852: note = Description of Artificial Sequence: Synthetic coding sequence
  source 1..852: mol_type = other DNA
atgaatggagaggagcagtactatgctgccacccagctgtacaaggacccctgtgccttccagaggggccctgcccctgagttcagcgccagccccccagcctgcctgtacatgggccggcagcccccacctcctccaccccaccccttccctggggccctgggcgccctggagcagggcagccccccagacatcagcccctatgaggtgccccccctggctgatgatcctgctgtggcccacctgcaccaccacctgcctgcccagctggccctgccccaccccccagctggccccttccctgagggcgctgagcccggggtgctggaggagcccaacagagtgcagctgcccttcccctggatgaagagcaccaaggcccacgcctggaagggccagtgggccggcggggcctatgctgctgagcctgaggagaacaagaggaccaggacagcctacacccgggcccagctgctggagctggagaaggagttcctgttcaacaagtacatcagccggcccaggagagtggagctggccgtgatgctgaacctgacagagcggcacatcaagatctggttccagaacagaaggatgaagtggaagaaggaggaggacaagaagaggggcggcggcacagctgtgggcggcggcggcgtggccgagcctgagcaggactgtgctgtgaccagcggggaggagctgctggccctgcccccacctcctcctcctgggggcgctgtgcccccagctgcccctgtggccgcccgggagggccgcctgcccccaggcctgagcgccagcccccagcccagctctgtggccccccggcggccccaggagcccaggtag

SEQ ID NO: 163235 - DNA, 1398 bp, synthetic construct
  misc_feature 1..1398: note = Description of Artificial Sequence: Synthetic coding sequence
  source 1..1398: mol_type = other DNA
atgctgcccctgtggaccctgagcctgctgctgggcgctgtggccggcaaggaggtgtgctatgagcggctgggctgcttcagtgatgacagcccctggagcggcatcacagagcggcccctgcacatcctgccctggagccccaaggatgtgaacacccgcttcctgctgtacaccaatgaaaaccccaacaacttccaggaggtggccgctgacagcagcagcatcagcggcagcaacttcaagaccaacaggaagacccgcttcatcatccacggcttcatcgacaagggggaggagaactggctggccaacgtgtgcaagaacctcttcaaggtggagagcgtgaactgcatctgtgtggactggaagggcggcagcaggacaggctacacccaggccagccagaacatccgcatcgtgggcgctgaggtggcctactttgtggagttcctgcagagcgccttcggctacagccccagcaatgtgcacgtgattggccacagcctgggcgcccacgccgccggggaggccggccgccgcaccaacggcaccatcggccgcatcaccggcctggaccctgctgagccctgcttccagggcaccccagagctggtgcggctggaccccagtgatgccaagtttgtggatgtgatccacacagatggagcccccatcgtgcccaacctgggcttcggcatgagccaggtggtgggccacctggacttcttccccaacggcggcgtggagatgcctggctgcaagaagaacatcctgagccagatcgtggacattgatggcatctgggagggcacccgggactttgctgcctgcaaccacctgcggagctacaagtactacacagacagcatcgtgaacccagatggctttgctggcttcccctgtgccagctacaacgtgttcaccgccaacaagtgcttcccctgccccagcggcggctgcccccagatgggccactacgccgaccgctacccaggcaagaccaatgatgtgggccagaagttctacctggacacaggagatgccagcaactttgcccgctggagatacaaggtgtctgtgaccctgagcggcaagaaggtgacaggccacatcctggtgtccctgtttggaaacaagggcaacagcaagcagtatgagatcttcaagggcaccctgaagccagacagcacccacagcaatgaatttgacagtgatgtggatgtgggggacctgcagatggtgaagttcatctggtacaacaacgtcatcaaccccaccctgccccgggtgggcgccagcaagatcatcgtggagaccaacgtgggcaagcagttcaacttctgcagccctgagaccgtgcgggaggaggtgctgctgaccctgaccccctgctag

SEQ ID NO: 163236 - DNA, 3372 bp, synthetic construct
  misc_feature 1..3372: note = Description of Artificial Sequence: Synthetic coding sequence
  source 1..3372: mol_type = other DNA
atgaacagccccaatgaatctgcagatggcatgagcggccgggagcccagcctggagatcctgcccaggaccagcctgcacagcatccctgtgacagtggaggtgaagcctgtgctgccccgggccatgcccagctccatgggcggcggcggcggcggcagccccagccctgtggagctgcggggggccctggtgggctctgtggaccccaccctgcgggagcagcagctgcagcaggagctgctggccctgaagcagcagcagcagctgcagaagcagctgctgtttgctgagttccagaagcagcacgaccacctgacccggcagcacgaggtgcagctgcagaagcacctgaagcagcagcaggagatgctggccgccaagcagcagcaggagatgctggccgccaagaggcagcaggagctggagcagcagaggcagcgggagcagcagaggcaggaggagctggagaagcagaggctggagcagcagctgctgatcctgaggaacaaggagaagagcaaggagagcgccatcgccagcacagaggtgaagctgcggctgcaggagttcctgctgagcaagagcaaggagcccaccccaggcggcctgaaccacagcctgccccagcaccccaagtgctggggcgcccaccacgccagcctggaccagagcagccccccccagagcggccccccaggcaccccacccagctacaagctgcccctgcccggcccctatgacagcagagatgacttccccctgaggaagacagccagcgagcccaacctgaaggtgcgcagccggctgaagcagaaggtggccgagaggaggagcagccccctgctgcggaggaaggatggcaccgtcatcagcaccttcaagaagagagctgtggagatcaccggggccggccctggggccagctctgtgtgcaacagcgcccctggcagcggccccagcagccccaacagcagccacagcaccatcgccgagaatggcttcaccggctctgtgcccaacatccccacagagatgctgccccagcaccgggccctgcccctggacagcagccccaaccagttcagcctgtacaccagccccagcctgcccaacatcagcctgggcctgcaggccaccgtgacagtgaccaacagccacctgacagccagccccaagctgagcacccagcaggaggccgagcggcaggccctgcagagcctgcggcagggcggcaccctgaccgggaagttcatgagcaccagcagcatccctggctgcctgctgggcgtggccctggagggagatggcagcccccacggccacgccagcctgctgcagcacgtgctgctgctggagcaggcccggcagcagagcaccctgattgctgtgcccctgcacggccagagccccctggtgactggagagcgggtggccacctccatgaggacagtgggcaagctgcccaggcaccggcccctgagcaggacccagagcagccccctgccccagagcccccaggccctgcagcagctggtgatgcagcagcagcaccagcagttcctggagaagcagaagcagcagcagctgcagctgggcaagatcctgaccaagacaggagagctgccccggcagcccaccacccaccctgaggagacagaggaggagctgacagagcagcaggaggtgctgctgggggagggcgccctgaccatgccccgggagggcagcacagagagcgagagcacccaggaggacctggaggaggaggatgaagaagatgatggagaggaggaggaggactgcatccaggtgaaggatgaggagggggagagcggggctgaggagggccctgacctggaggagcctggagctggctacaagaagctgttcagtgatgcccagcccctgcagcccctgcaggtgtaccaggcccccctgagcctggccaccgtgccccaccaggccctgggccgcacccagagcagccctgctgcccctgggggcatgaagagccccccagaccagcctgtgaagcacctgttcaccaccggggtggtgtatgacaccttcatgctgaagcaccagtgcatgtgtggcaacacccacgtgcaccctgagcacgccggccgcatccagagcatctggagccggctgcaggagaccggcctgctgagcaaatgtgagcgcatccggggcaggaaggccaccctggatgagatccagacagtgcacagcgagtaccacaccctgctgtatggcaccagccccctgaaccggcagaagctggacagcaagaagctgctgggccccatcagccagaagatgtatgctgtgctgccctgtggcggcattggagtggacagcgacacagtgtggaatgagatgcacagcagcagcgctgtgaggatggctgtgggctgcctgctggagctggccttcaaggtggccgccggggagctgaagaatggatttgccatcatccggcccccaggccaccacgccgaggagagcacagccatgggcttctgcttcttcaacagcgtggccatcacagccaagctgctgcagcagaagctgaatgtgggcaaggtgctgattgtggactgggacatccaccacggcaatggcacccagcaggccttctacaatgaccccagcgtgctgtacatcagcctgcacagatatgacaatggaaacttcttccctggcagcggggcccctgaggaggtgggcggcggccctggggtgggctacaacgtgaatgtggcctggacaggaggagtggacccccccatcggagatgtggagtacctgacagccttcagaacagtggtgatgcccatcgcccacgagttctccccagatgtggtgctggtgtctgctggctttgatgctgtggagggccacctgagccccctgggcggctacagcgtgacagcccgctgcttcggccacctgacccggcagctgatgaccctggccggcggccgggtggtgctggccctggagggcggccatgacctgacagccatctgtgatgccagcgaggcctgtgtgtctgccctgctgtctgtggagctgcagcccctggatgaggccgtgctgcagcagaagcccaacatcaatgctgtggccaccctggagaaggtgattgagatccagagcaagcactggagctgtgtgcagaagtttgctgctggcctgggccgcagcctgcgggaggcccaggccggggagacagaggaggccgagaccgtgtctgccatggccctgctgtctgtgggcgctgagcaggcccaggccgccgccgcccgggagcacagccccaggcctgctgaggagcccatggagcaggagcccgccctgtag

SEQ ID NO: 163237 - DNA, 1128 bp, synthetic construct
  misc_feature 1..1128: note = Description of Artificial Sequence: Synthetic coding sequence
  source 1..1128: mol_type = other DNA
atgaacaccagccacctgctggccctgctgctgcccaagagcccccagggcgagaacagaagcaagcccctgggcaccccctacaacttcagcgagcactgccaggacagcgtggatgtgatggtgttcatcgtgaccagctacagcattgagaccgtggtgggcgtgctgggcaacctgtgcctgatgtgtgtgacagtgcggcagaaggagaaggccaacgtgaccaacctgctgattgccaacctggccttcagtgacttcctgatgtgcctgctgtgccagcccctgacagctgtgtacaccatcatggactactggatctttggagagaccctgtgcaagatgtctgccttcatccagtgcatgtctgtgacagtgtccatcctgagcctggtgctggtggccctggagcggcaccagctgatcatcaaccccaccggctggaagcccagcatcagccaggcctacctgggcatcgtgctgatctgggtgattgcctgtgtgctgagcctgcccttcctggccaacagcatcctggagaatgtgttccacaagaaccacagcaaggccctggagttcctggccgacaaggtggtgtgcacagagagctggcccctggcccaccacaggaccatctacaccaccttcctgctgctcttccagtactgcctgcccctgggcttcatcctggtgtgctacgcccgcatctacagaaggctgcagaggcagggccgggtcttccacaagggcacctacagcctgcgggccggccacatgaagcaggtgaatgtggtgctggtggtgatggtggtggcctttgctgtgctgtggctgcccctgcacgtgttcaacagcctggaggactggcaccacgaggccatccccatctgccacggcaacctgatcttcctggtgtgccacctgctggccatggccagcacctgtgtgaaccccttcatctacggcttcctgaacaccaacttcaagaaggagatcaaggccctggtgctgacctgccagcagagcgcccccctggaggagagcgagcacctgcccctgagcacagtgcacacagaggtgtccaagggcagcctgcggctgagcggccgcagcaaccccatctag

SEQ ID NO: 163238 - DNA, 1128 bp, synthetic construct; identical to SEQ ID NO: 163237
  misc_feature 1..1128: note = Description of Artificial Sequence: Synthetic coding sequence
  source 1..1128: mol_type = other DNA

SEQ ID NO: 163239 - DNA, 1797 bp, synthetic construct
  misc_feature 1..1797: note = Description of Artificial Sequence: Synthetic coding sequence
  source 1..1797: mol_type = other DNA
atgctgaagctggtgggcggcggcggcggccaggactgggcctgcagcgtggccggcaccagcctgggcggggaggaggccgcctttgaggtggcccggcctggggaccagggcaaggccggcggcggcagccctggctggggctgtgccggcatcccagattctgcccctggagctggggtgctgcaggccggggctgtgggccctgcccggggcggccagggcgctgaggaggtgggggagagcgctgggggcggggaggagaggagagtgcgccacccccaggccccagccctgcggctgctgaacaggaagccccagggcggcagcggggagatcaagaccccagaaaatgacctgcagaggggccgcctgagccggggccccaggacagcccccccagcccctggcatgggagacaggagcggccagcaggagaggtctgtgccccacagccctggggcccctgtgggcaccagcgctgctgctgtgaatggcctgctgcacaacggcttccaccccccacctgtgcagccccctcatgtgtgcagccggggccctgtgggcggcagtgatgctgccccccagaggctgcccctgctgcctgagctgcagccccagcccctgctgccccagcacgacagccctgccaagaagtgccgcctgcggcggaggatggacagcggcaggaagaaccggccccccttcccctggtttggcatggacattggaggcaccctggtgaagctggtgtactttgagcccaaggacatcacagctgaggaggagcaggaggaggtggagaacctgaagagcatcaggaagtacctgaccagcaacacagcctacggcaagacaggcatcagagatgtgcacctggagctgaagaacctgaccatgtgtggcaggaagggcaacctgcacttcatccgcttccccagctgtgccatgcaccgcttcatccagatgggcagcgagaagaacttcagcagcctgcacaccaccctgtgtgccactggaggaggagccttcaagtttgaggaggacttcaggatgattgctgacctgcagctgcacaagctggatgagctggactgcctgatccagggcctgctgtatgtggacagcgtgggcttcaacgggaagccagagtgctactactttgagaaccccaccaaccctgagctgtgccagaagaagccctactgcctggacaacccctaccccatgctgctggtgaacatgggcagcggcgtgtccatcctggccgtgtacagcaaggacaactacaagagggtgacaggcaccagcctgggcggcggcaccttcctgggcctgtgctgcctgctgaccggctgtgagacctttgaggaggccctggagatggccgccaagggggacagcaccaacgtggacaagctggtgaaggacatctatggaggagactatgagcgcttcggcctgcagggcagcgctgtggccagcagctttggaaacatgatgagcaaggagaagagggacagcatcagcaaggaggacctggcccgggccaccctggtgaccatcaccaacaacatcggcagcatcgccaggatgtgtgccctgaatgaaaatattgacagagtggtgtttgtgggcaacttcctgcgcatcaacatggtgtccatgaagctgctggcctatgccatggacttctggagcaagggccagctgaaggccctcttcctggagcacgagggctactttggagctgtgggcgccctgctggagctgttcaagatgacagatgacaagtag

SEQ ID NO: 163240 - DNA, 945 bp, synthetic construct
  misc_feature 1..945: note = Description of Artificial Sequence: Synthetic coding sequence
  source 1..945: mol_type = other DNA
atgaagctgatcaatggcaagaagcagaccttcccctggtttggcatggacatcggcggcaccctggtgaagctggtgtactttgagcccaaggacatcacagctgaggaggagcaggaggaggtggagaacctgaagagcatcaggaagtacctgaccagcaacacagcctacggcaagacaggcatcagagatgtgcacctggagctgaagaacctgaccatgtgtggcaggaaaggaaacctgcacttcatccgcttccccagctgtgccatgcaccgcttcatccagatgggcagcgagaagaacttcagcagcctgcacaccaccctgtgtgccaccggcggcggggccttcaagtttgaggaggacttcaggatgattgctgacctgcagctgcacaagctggatgagctggactgcctgatccagggcctgctgtatgtggacagcgtgggcttcaacgggaagccagagtgctactactttgagaaccccaccaaccctgagctgtgccagaagaagccctactgcctggacaacccctaccccatgctgctggtgaacatgggcagcggcgtgtccatcctggccgtgtacagcaaggacaactacaagagggtgacaggcaccagctttggaaacatgatgagcaaggagaagagggacagcatcagcaaggaggacctggcccgggccaccctggtgaccatcaccaacaacatcggcagcatcgccaggatgtgtgccctgaatgaaaatattgacagagtggtgtttgtgggcaacttcctgcgcatcaacatggtgtccatgaagctgctggcctatgccatggacttctggagcaagggccagctgaaggccctcttcctggagcacgagggctactttggagctgtgggcgccctgctggagctgttcaagatgacagatgacaagtag

SEQ ID NO: 163241 - DNA, 1122 bp, synthetic construct
  misc_feature 1..1122: note = Description of Artificial Sequence: Synthetic coding sequence
  source 1..1122: mol_type = other DNA
atgaagctgatcaatggcaagaagcagaccttcccctggtttggcatggacatcggcggcaccctggtgaagctggtgtactttgagcccaaggacatcacagctgaggaggagcaggaggaggtggagaacctgaagagcatcaggaagtacctgaccagcaacacagcctacggcaagacaggcatcagagatgtgcacctggagctgaagaacctgaccatgtgtggcaggaaaggaaacctgcacttcatccgcttccccagctgtgccatgcaccgcttcatccagatgggcagcgagaagaacttcagcagcctgcacaccaccctgtgtgccaccggcggcggggccttcaagtttgaggaggacttcaggatgattgctgacctgcagctgcacaagctggatgagctggactgcctgatccagggcctgctgtatgtggacagcgtgggcttcaacgggaagccagagtgctactactttgagaaccccaccaaccctgagctgtgccagaagaagccctactgcctggacaacccctaccccatgctgctggtgaacatgggcagcggcgtgtccatcctggccgtgtacagcaaggacaactacaagagggtgacaggcaccagcctgggcggcggcaccttcctgggcctgtgctgcctgctgaccggctgtgagacctttgaggaggccctggagatggccgccaagggggacagcaccaacgtggacaagctggtgaaggacatctacggcggggactatgaaagatttggcctgcagggcagcgctgtggccagcagctttggaaacatgatgagcaaggagaagagggacagcatcagcaaagaagacctggcccgggccaccctggtgaccatcaccaacaacatcggcagcatcgccaggatgtgtgccctgaatgaaaacatcgacagagtggtgtttgtgggcaacttcctgcgcatcaacatggtgtccatgaagctgctggcctatgccatggacttctggagcaagggccagctgaaggccctcttcctggagcacgagggctactttggagctgtgggcgccctgctggagctgttcaagatgacagatgacaagtag

SEQ ID NO: 163242 - DNA, 1203 bp, synthetic construct
  misc_feature 1..1203: note = Description of Artificial Sequence: Synthetic coding sequence
  source 1..1203: mol_type = other DNA
atggccaagagcaagcacgccctgctgcccttctgccacggcatgatgcagcaggagggcctgcaccagatgcagagcctggacctgggcctgctgagcctgcagaacagcttcccctggtttggcatggacattggaggcaccctggtgaagctggtgtactttgagcccaaggacatcacagctgaggaggagcaggaggaggtggagaacctgaagagcatcaggaagtacctgaccagcaacacagcctacggcaagacaggcatcagagatgtgcacctggagctgaagaacctgaccatgtgtggcaggaagggcaacctgcacttcatccgcttccccagctgtgccatgcaccgcttcatccagatgggcagcgagaagaacttcagcagcctgcacaccaccctgtgtgccactggaggaggagccttcaagtttgaggaggacttcaggatgattgctgacctgcagctgcacaagctggatgagctggactgcctgatccagggcctgctgtatgtggacagcgtgggcttcaacgggaagccagagtgctactactttgagaaccccaccaaccctgagctgtgccagaagaagccctactgcctggacaacccctaccccatgctgctggtgaacatgggcagcggcgtgtccatcctggccgtgtacagcaaggacaactacaagagggtgacaggcaccagcctgggcggcggcaccttcctgggcctgtgctgcctgctgaccggctgtgagacctttgaggaggccctggagatggccgccaagggggacagcaccaacgtggacaagctggtgaaggacatctatggaggagactatgagcgcttcggcctgcagggcagcgctgtggccagcagctttggaaacatgatgagcaaggagaagagggacagcatcagcaaggaggacctggcccgggccaccctggtgaccatcaccaacaacatcggcagcatcgccaggatgtgtgccctgaatgaaaatattgacagagtggtgtttgtgggcaacttcctgcgcatcaacatggtgtccatgaagctgctggcctatgccatggacttctggagcaagggccagctgaaggccctcttcctggagcacgagggctactttggagctgtgggcgccctgctggagctgttcaagatgacagatgacaagtag

SEQ ID NO: 163243 - DNA, 1386 bp, synthetic construct
  misc_feature 1..1386: note = Description of Artificial Sequence: Synthetic coding sequence
  source 1..1386: mol_type = other DNA
atgggagacagaagtggccagcaggagaggtctgtgccccacagccctggggcccctgtgggcaccagcgctgctgctgtgaatggcctgctgcacaacggcttccaccccccacctgtgcagcccccccacgtgtgcagccggggccctgtgggcggcagtgatgctgccccccagaggctgcccctgctgcctgagctgcagccccagcccctgctgccccagcacgacagccctgccaagaagtgccgcctgcggcggaggatggattctggcaggaagaacagaccacccttcccctggtttggcatggacatcggcggcaccctggtgaagctggtgtactttgagcccaaggacatcacagctgaggaggagcaggaggaggtggagaacctgaagagcatcaggaagtacctgaccagcaacacagcctacggcaagacaggcatcagagatgtgcacctggagctgaagaacctgaccatgtgtggcaggaaaggaaacctgcacttcatccgcttccccagctgtgccatgcaccgcttcatccagatgggcagcgagaagaacttcagcagcctgcacaccaccctgtgtgccaccggcggcggggccttcaagtttgaggaggacttcaggatgattgctgacctgcagctgcacaagctggatgagctggactgcctgatccagggcctgctgtatgtggacagcgtgggcttcaacgggaagccagagtgctactactttgagaaccccaccaaccctgagctgtgccagaagaagccctactgcctggacaacccctaccccatgctgctggtgaacatgggcagcggcgtgtccatcctggccgtgtacagcaaggacaactacaagagggtgacaggcaccagcctgggcggcggcaccttcctgggcctgtgctgcctgctgaccggctgtgagacctttgaggaggccctggagatggccgccaagggggacagcaccaacgtggacaagctggtgaaggacatctacggcggggactatgaaagatttggcctgcagggcagcgctgtggccagcagctttggaaacatgatgagcaaggagaagagggacagcatcagcaaagaagacctggcccgggccaccctggtgaccatcaccaacaacatcggcagcatcgccaggatgtgtgccctgaatgaaaacatcgacagagtggtgtttgtgggcaacttcctgcgcatcaacatggtgtccatgaagctgctggcctatgccatggacttctggagcaagggccagctgaaggccctcttcctggagcacgagggctactttggagctgtgggcgccctgctggagctgttcaagatgacagatgacaagtag

SEQ ID NO: 163244 - DNA, 1713 bp, synthetic construct
  misc_feature 1..1713: note = Description of Artificial Sequence: Synthetic coding sequence
  source 1..1713: mol_type = other DNA
atgaggcggctgggccccttccacccccgggtgcactgggccgccccacccagcctgagcagcggcctgcaccggctgctcttcctgcggggcacccgcatccccagcagcaccaccctgagcccccccaggcatgacagcctgagcctggatggcggcaccgtgaaccccccccgggtgcgggagcccaccggccgggaggccttcggccccagccctgccagcagtgactggctgcctgcccgctggagaaatggccggggcggccggccccgggcccggctgtgcagcggctggacagctgctgaggaggcccggaggaaccccaccctgggcggcctgctgggccggcagaggctgctgctgaggatgggcggcggccgcctgggcgcccccatggagcggcacggccgggccagcgccacctctgtgagcagcgctggggagcaggccgccggggaccctgagggccggcggcaggagcccctgcggcggcgggccagcagcgcctctgtgcctgctgtgggcgccagcgctgagggcacccggcgggaccggctgggcagctacagcggccccacctctgtgtcccggcagagggtggagagcctgaggaagaagaggcccctcttcccctggtttggcctggacatcggcggcaccctggtgaagctggtgtactttgagcccaaggacatcacagctgaggaggaggaggaggaggtggagagcctgaagagcatcaggaagtacctgaccagcaatgtggcctacggcagcacaggcatcagagatgtgcacctggagctgaaggacctgaccctgtgtggcaggaaaggaaacctgcacttcatccgcttccccacccatgacatgcctgccttcatccagatgggccgggacaagaacttcagcagcctgcacacagtgttctgtgccaccggcggcggggcctacaagtttgagcaggacttcctgaccatcggggacctgcagctgtgcaagctggatgagctggactgcctgatcaagggcatcctgtacattgattctgtgggcttcaacggccgcagccagtgctactactttgagaacccagctgacagcgagaagtgccagaagctgccctttgacctgaagaacccctaccccctgctgctggtgaacatcggcagcggcgtgtccatcctggccgtgtacagcaaggacaactacaagagggtgacaggcaccagcctgggcggcggcaccttcttcggcctgtgctgcctgctgaccggctgcaccacctttgaggaggccctggagatggccagcagaggagacagcaccaaggtggacaagctggtgcgggacatctacggcggggactatgaaagatttggcctgcccggctgggccgtggccagcagctttggaaacatgatgagcaaggagaagcgggaggccgtgtccaaagaagacctggcccgggccaccctcatcaccatcaccaacaacatcggcagcatcgccaggatgtgtgccctgaatgaaaacatcaaccaggtggtgtttgtgggcaacttcctgcgcatcaacaccatcgccatgaggctgctggcctatgccctggactactggagcaagggccagctgaaggccctcttcagcgagcacgagggctactttggagctgtgggcgccctgctggagctgctgaagatcccctag

SEQ ID NO: 163245 - DNA, 1161 bp, synthetic construct
  misc_feature 1..1161: note = Description of Artificial Sequence: Synthetic coding sequence
  source 1..1161: mol_type = other DNA
tctggccgggtgaacccagctgggggcctgggctgcagcgagagcggcaccttcggcggccccccagcccccatcgtgttcccctggtttggcctggacatcggcggcaccctggtgaagctggtgtactttgagcccaaggacatcacagctgaggaggaggaggaggaggtggagagcctgaagagcatcaggaagtacctgaccagcaatgtggcctacggcagcacaggcatcagagatgtgcacctggagctgaaggacctgaccctgtgtggcaggaaaggaaacctgcacttcatccgcttccccacccatgacatgcctgccttcatccagatgggccgggacaagaacttcagcagcctgcacacagtgttctgtgccaccggcggcggggcctacaagtttgagcaggacttcctgaccatcggggacctgcagctgtgcaagctggatgagctggactgcctgatcaagggcatcctgtacattgattctgtgggcttcaacggccgcagccagtgctactactttgagaacccagctgacagcgagaagtgccagaagctgccctttgacctgaagaacccctaccccctgctgctggtgaacatcggcagcggcgtgtccatcctggccgtgtacagcaaggacaactacaagagggtgacaggcaccagcctgggcggcggcaccttcttcggcctgtgctgcctgctgaccggctgcaccacctttgaggaggccctggagatggccagcagaggagacagcaccaaggtggacaagctggtgcgggacatctacggcggggactatgaaagatttggcctgcccggctgggccgtggccagcagctttggaaacatgatgagcaaggagaagcgggaggccgtgtccaaagaagacctggcccgggccaccctcatcaccatcaccaacaacatcggcagcatcgccaggatgtgtgccctgaatgaaaacatcaaccaggtggtgtttgtgggcaacttcctgcgcatcaacaccatcgccatgaggctgctggcctatgccctggactactggagcaagggccagctgaaggccctcttcagcgagcacgagggctactttggagctgtgggcgccctgctggagctgctgaagatcccctag

SEQ ID NO: 163246 - DNA, 840 bp, synthetic construct
  misc_feature 1..840: note = Description of Artificial Sequence: Synthetic coding sequence
  source 1..840: mol_type = other DNA
atgcctgccttcatccagatgggccgggacaagaacttcagcagcctgcacacagtgttctgtgccactggaggaggagcctacaagtttgagcaggacttcctgaccatcggggacctgcagctgtgcaagctggatgagctggactgcctgatcaagggcatcctgtacatcgacagcgtgggcttcaacggccgcagccagtgctactactttgaaaatcctgctgacagcgagaagtgccagaagctgccctttgacctgaagaacccctaccccctgctgctggtgaacatcggcagcggcgtgtccatcctggccgtgtacagcaaggacaactacaagagggtgacaggcaccagcctgggcggcggcaccttcttcggcctgtgctgcctgctgaccggctgcaccacctttgaggaggccctggagatggccagcagaggagacagcaccaaggtggacaagctggtgcgggacatctatggaggagactatgagcgcttcggcctgcccggctgggccgtggccagcagctttggaaacatgatgagcaaggagaagcgggaggccgtgtccaaggaggacctggcccgggccaccctcatcaccatcaccaacaacatcggcagcatcgccaggatgtgtgccctgaatgaaaacatcaaccaggtggtgtttgtgggcaacttcctgcgcatcaacaccatcgccatgaggctgctggcctatgccctggactactggagcaagggccagctgaaggccctcttcagcgagcacgagggctactttggagctgtgggcgccctgctggagctgctgaagatcccctag

SEQ ID NO: 163247 - DNA, 1113 bp, synthetic construct
  misc_feature 1..1113: note = Description of Artificial Sequence: Synthetic coding sequence
  source 1..1113: mol_type = other DNA
atgaagatcaaggatgccaagaagcccagcttcccctggtttggcatggacatcggcggcaccctggtgaagctgagctactttgagcccatcgacatcacagctgaggaggagcaggaggaggtggagagcctgaagagcatcaggaagtacctgaccagcaatgtggcctacggcagcacaggcatcagagatgtgcacctggagctgaaggacctgaccctgtttggccggcggggcaacctgcacttcatccgcttccccacccaggacctgcccaccttcatccagatgggccgggacaagaacttcagcaccctgcagacagtgctgtgtgccaccggcggcggggcctacaagtttgagaaggacttccgcaccatcggcaacctgcacctgcacaagctggatgagctggactgcctggtgaagggcctgctgtacattgattctgtgtccttcaacggccaggccgagtgctactactttgccaatgccagcgagcctgagcgctgccagaagatgcccttcaacctggatgacccctaccccctgctggtggtgaacatcggcagcggcgtgtccatcctggccgtgcacagcaaggacaactacaagagggtgacaggcaccagcctgggcggcggcaccttcctgggcctgtgcagcctgctgaccggctgtgagagctttgaggaggccctggagatggccagcaagggggacagcacccaggccgacaagctggtgcgggacatctacggcggggactatgaaagatttggcctgcccggctgggccgtggccagcagctttggaaacatgatctacaaggagaagcgggagagcgtgtccaaagaagacctggcccgggccaccctggtgaccatcaccaacaacatcggctctgtggccaggatgtgtgctgtgaatgagaagatcaacagagtggtgtttgtgggcaacttcctgcgggtgaacaccctgtccatgaagctgctggcctatgccctggactactggagcaagggccagctgaaggccctcttcctggagcacgagggctactttggagctgtgggcgccctgctgggcctgcccaacttctcctag

SEQ ID NO: 163248 - DNA, 2322 bp, synthetic construct
  misc_feature 1..2322: note = Description of Artificial Sequence: Synthetic coding sequence
  source 1..2322: mol_type = other DNA
atggctgaatgtggggccagcggcagcggcagcagcggggacagcctggacaagagcatcaccctgcccccagatgagatcttcaggaacctggagaatgccaagagatttgccattgatattggaggcagcctgaccaagctggcctactacagcacagtgcagcacaaggtggccaaggtgcgcagctttgaccacagcggcaaggacacagagcgggagcacgagcccccctatgagatctctgtgcaggaggagatcacagcccggctgcacttcatcaagtttgagaacacctacatcgaggcctgcctggacttcatcaaggaccacctggtgaacacagagaccaaggtgatccaggccactggaggaggagcctacaagttcaaggacctgattgaggagaagctgcggctgaaggtggacaaggaggatgtgatgacctgcctgatcaagggctgcaactttgtgctgaagaacatcccccatgaggcctttgtgtaccagaaggacagcgaccctgagttccgcttccagaccaaccacccccacatcttcccctacctgctggtgaacatcggcagcggcgtgtccatcgtgaaggtggagacagaggacagatttgagtgggtgggcggcagcagcattggaggcggcaccttctggggcctgggcgccctgctgaccaagaccaagaagtttgatgagctgctgcacctggccagccggggccagcacagcaatgtggacatgctggtgagagatgtgtatggaggagcccaccagaccctgggcctgagcggcaacctgattgccagcagctttgggaagagcgccacagctgaccaggagttcagcaaagaagacatggccaagagcctgctgcacatgatcagcaatgacatcggccagctggcctgcctgcacgcccggctgcacagcctggacagagtgtactttggaggcttcttcatccggggccaccctgtgaccatgaggaccatcacctacagcatcaacttcttcagcaaaggagaggtgcaggccctcttcctgcggcatgagggctacctgggcgccatcggggccttcctgaagggagctgagcaggacaaccccaaccagtacagctggggagaaaattatgccggcagcagcggcctgatgtctgccagccctgagctgggccctgcccagagggcccggagcggcacctttgacctgctggagatggaccggctggagcggcccctggtggacctgcccctgctgctggacccccccagctatgtgcctgacacagtggacctgacagatgatgccctggccaggaagtactggctgacctgctttgaggaggccctggatggagtggtgaagagagctgtggccagccagcctgacagcgtggatgctgctgagagagctgagaagttccggcagaagtactggaacaagctgcagaccctgcggcagcagccctttgcctacggcaccctgactgtgcgcagcctgctggacacccgggagcactgcctgaatgagttcaacttcccagacccctacagcaaggtgaagcagcgggagaatggagtggccctgcgctgcttccctggggtggtgcgcagcctggatgccctgggctgggaggagcggcagctggccctggtgaagggcctgctggccggaaatgtgtttgactggggcgccaaggctgtgtctgctgtgctggagagtgacccctacttcggctttgaggaggccaagaggaagctgcaggagcggccctggctggtggacagctacagcgagtggctgcagaggctgaagggccccccccacaagtgtgccctgatctttgctgacaacagcggcatcgacatcatcctgggcgtcttcccctttgtgcgggagctgctgctgcggggcacagaggtgatcctggcctgcaacagcggccctgccctgaatgatgtgacccacagcgagagcctgattgtggccgagagaattgctggcatggaccctgtggtgcacagcgccctgcaggaggagcggctgctgctggtgcagacaggcagcagcagcccctgcctggacctgagccggctggacaagggcctggccgccctggtgcgggagagaggagctgacctggtggtgattgagggcatgggccgggctgtgcacaccaactaccacgccgccctgcgctgtgagagcctgaagctggccgtcatcaagaatgcctggctggccgagcggctgggcggccgcctcttcagcgtcatcttcaagtatgaggtgcctgctgagtag

SEQ ID NO: 163249 - DNA, 1455 bp, synthetic construct
  misc_feature 1..1455: note = Description of Artificial Sequence: Synthetic coding sequence
  source 1..1455: mol_type = other DNA
atgttccccaacagcatcctgggccggccccccttcacccccaaccaccagcagcacaacaacttcttcaccctgagccccaccgtgtacagccaccagcagctgattgatgcccagttcaacttccagaatgctgacctgagcagagctgtgtccctgcagcagctgacctatggaaatgtgagccccatccagaccagcgccagccccctcttccggggcaggaagaggctgagtgatgagaagaacctgcccctggatggcaagaggcagcgcttccacagcccccaccaggagcccaccgtggtgaaccagatcgtgcccctgagcggggagcggcgctacagcatgccacccctcttccacacccactacgtgcctgacatcgtgcgctgtgtgccccccttccgggagatcgccttcctggagccccgggagatcaccctgcctgaggccaaggacaagctgagccagcagatcctggagctgtttgagacctgccagcagcagatcagtgacctgaagaagaaggagctgtgcaggacccagctgcagcgggagatccagctgctcttcccccagagccgcctcttcctggtgggcagcagcctgaatggatttggcaccaggagcagtgatggagacctgtgcctggtggtgaaggaggagccctgcttcttccaggtgaaccagaagacagaggcccggcacatcctgaccctggtgcacaagcacttctgcacccggctgagcggctacatcgagcggccccagctgatccgggccaaggtgcccatcgtgaagttccgggacaaggtgtcctgtgtggagtttgacctgaatgtgaacaacatcgtgggcatccggaacaccttcctgctgcggacctacgcctacctggagaacagagtgcggcccctggtgctggtgatcaagaagtgggccagccaccaccagatcaatgatgccagccggggcaccctgagcagctacagcctggtgctgatggtgctgcactacctgcagaccctgcctgagcccatcctgcccagcctgcagaagatctacccagagagcttcagccctgccatccagctgcacctggtgcaccaggccccctgcaatgtgcccccctacctgagcaagaatgaaagcaacctgggggacctgctgctgggcttcctgaagtactatgccacagaatttgactggaacagccagatgatctctgtgcgggaggccaaggccatccccaggccagatggcatcgagtggaggaacaagtacatctgtgtggaggagccctttgatggcaccaacacagcccgggctgtgcatgagaagcagaagtttgacatgatcaaggaccagttcctgaagtcctggcaccggctgaagaacaagagggacctgaacagcatcctgcctgtgcgggctgctgtgctgaagaggtag

SEQ ID NO: 163250 - DNA, 1443 bp, synthetic construct
  misc_feature 1..1443: note = Description of Artificial Sequence: Synthetic coding sequence
  source 1..1443: mol_type = other DNA
atgttccccaacagcatcctgggccggccccccttcacccccaaccaccagcagcacaacaacttcttcaccctgagccccaccgtgtacagccaccagcagctgattgatgcccagttcaacttccagaatgctgacctgagcagagctgtgtccctgcagcagctgacctatggaaatgtgagccccatccagaccagcgccagccccctcttccggggcaggaagaggctgagtgatgagaagaacctgcccctggatggcaagaggcagcgcttccacagcccccaccaggagcccaccgtggtgaaccagatcgtgcccctgagcggggagcggcgctacagcatgccacccctcttccacacccactacgtgcctgacatcgtgcgctgtgtgccccccttccgggagatcgccttcctggagccccgggagatcaccctgcctgaggccaaggacaagctgagccagcagatcctggagctgtttgagacctgccagcagcagatcagtgacctgaagaagaaggagctgtgcaggacccagctgcagcgggagatccagctgctcttcccccagagccgcctcttcctggtgggcagcagcctgaatggatttggcaccaggagcagtgatggagacctgtgcctggtggtgaaggaggagcctgtgaaccagaagacagaggcccggcacatcctgaccctggtgcacaagcacttctgcacccggctgagcggctacatcgagcggccccagctgatccgggccaaggtgcccatcgtgaagttccgggacaaggtgtcctgtgtggagtttgacctgaatgtgaacaacatcgtgggcatccggaacaccttcctgctgcggacctacgcctacctggagaacagagtgcggcccctggtgctggtgatcaagaagtgggccagccaccaccagatcaatgatgccagccggggcaccctgagcagctacagcctggtgctgatggtgctgcactacctgcagaccctgcctgagcccatcctgcccagcctgcagaagatctacccagagagcttcagccctgccatccagctgcacctggtgcaccaggccccctgcaatgtgcccccctacctgagcaagaatgaaagcaacctgggggacctgctgctgggcttcctgaagtactatgccacagaatttgactggaacagccagatgatctctgtgcgggaggccaaggccatccccaggccagatggcatcgagtggaggaacaagtacatctgtgtggaggagccctttgatggcaccaacacagcccgggctgtgcatgagaagcagaagtttgacatgatcaaggaccagttcctgaagtcctggcaccggctgaagaacaagagggacctgaacagcatcctgcctgtgcgggctgctgtgctgaagaggtag

SEQ ID NO: 163251 - DNA, 1455 bp, synthetic construct; identical to SEQ ID NO: 163249
  misc_feature 1..1455: note = Description of Artificial Sequence: Synthetic coding sequence
  source 1..1455: mol_type = other DNA

SEQ ID NO: 163252 - DNA, 1455 bp, synthetic construct; identical to SEQ ID NO: 163249
  misc_feature 1..1455: note = Description of Artificial Sequence: Synthetic coding sequence
  source 1..1455: mol_type = other DNA

SEQ ID NO: 163253 - DNA, 1476 bp, synthetic construct
  misc_feature 1..1476: note = Description of Artificial Sequence: Synthetic coding sequence
  source 1..1476: mol_type = other DNA
atgagcctggtggcctatgccagcagtgatgagagcgagccagatgaagctgagcctgagcctgaggaggaggaggccgtggcccccaccagcggccctgccctgggcggcctgtttgccagcctgcctgcccccaagggccctgccctgctgcccccaccaccccagatgctggccccagccttccccccacccctgctgctgcccccacccaccggggacccccggctgcagcccccaccacccctgcccttcggcctgggcggcttccccccacctcctggggtgtccccagctgaggccgccggcgtgggggagggcctgggcctgggcctgcccagcccccggggccctggcctgaacctgcccccacccatcggcggggccggcccccccctgggcctgcccaagcccaagaagaggaaggagcctgtgaagattgctgcccctgagctgcacaagggggacagcgacagtgaagaagatgagcccaccaagaagaagaccatcctgcagggcagcagcgagggcaccggcctgagcgccctgctgccccagcccaagaacctgactgtgaaggagaccaaccggctgctgctgccccacgccttcagcaggaagcccagtgatggcagcccagacaccaagcccagccggctggccagcaagaccaagaccagcagcctggcccctgtggtgggcaccaccaccaccacccccagccccagcgccatcaaggccgccgccaagtctgctgccctgcaggtgaccaagcagatcacccaggaggaggatgacagtgatgaggaggtggcccctgagaacttcttcagcctgcctgagaaggccgagcccccaggagtggagccctacccctaccccatccccaccgtgcctgaggagctgcccccaggcacagagcctgagcccgccttccaggatgatgctgccaatgcccccctggagttcaagatggctgctggcagcagcggggccccctggatgcccaagccaggagatgactacagctacaaccagttcagcacctatggagatgccaatgctgctggggcctactaccaggactactacagcggcggctactacccagcccaggaccctgccctggtgcccccccaggagatcgccccagatgccagcttcattgatgatgaggccttcaagaggctgcagggcaagaggaacagaggccgggaggagatcaactttgtggagatcaagggagatgaccagctgagcggggcccagcagtggatgaccaagagcctgacagaggagaagaccatgaagagcttcagcaagaagaagggggagcagcccaccggccagcagaggaggaagcaccagatcacctacctgatccaccaggccaaggagcgggagctggagctgaagaacacctggagcgagaacaagctgagccggcggcagacccaggccaagtatggcttctag

SEQ ID NO: 163254 - DNA, 1380 bp, synthetic construct
  misc_feature 1..1380: note = Description of Artificial Sequence: Synthetic coding sequence
  source 1..1380: mol_type = other DNA
atgagcctggtggcctatgccagcagtgatgagagcgagccagatgaagctgagcctgagcctgaggaggaggaggccgtggcccccaccagcggccctgccctgggcggcctgtttgccagcctgcctgcccccaagggccctgccctgctgcccccaccaccccagatgctggccccagccttccccccacccctgctgctgcccccacccaccggggacccccggctgcagcccccaccacccctgcccttcggcctgggcggcttccccccacctcctggggtgtccccagctgaggccgccggcgtgggggagggcctgggcctgggcctgcccagcccccggggccctggcctgaacctgcccccacccatcggcggggccggcccccccctgggcctgcccaagcccaagaagaggaaggagcctgtgaagattgctgcccctgagctgcacaagggggacagcgacagtgaagaagatgagcccaccaagaagaagaccatcctgcagggcagcagcgagggcaccggcctgagcgccctgctgccccagcccaagaacctgactgtgaaggagaccaaccggctgctgctgccccacgccttcagcaggaagcccagtgatggcagcccagacaccaagcccagccggctggccagcaagaccaagaccagcagcctggcccctgtggtgggcaccaccaccaccacccccagccccagcgccatcaaggccgccgccaagtctgctgccctgcaggtgaccaagcagatcacccaggaggaggatgacagtgatgaggaggtggcccctgagaacttcttcagcctgcctgagaaggccgagcccccaggagtggagccctacccctaccccatccccaccgtgcctgaggagctgcccccaggcacagagcctgagcccgccttccaggatgatgctgccaatgcccccctggagttcaagatggctgctggcagcagcggggccccctggatgcccaagccaggagatgactacagctacaaccagttcagcacctatggagatgccaatgctgctggggcctactaccagttcaagaggctgcagggcaagaggaacagaggccgggaggagatcaactttgtggagatcaagggagatgaccagctgagcggggcccagcagtggatgaccaagagcctgacagaggagaagaccatgaagagcttcagcaagaagaagggggagcagcccaccggccagcagaggaggaagcaccagatcacctacctgatccaccaggccaaggagcgggagctggagctgaagaacacctggagcgagaacaagctgagccggcggcagacccaggccaagtatggcttctag

SEQ ID NO: 163255 - DNA, 1404 bp, synthetic construct
  misc_feature 1..1404: note = Description of Artificial Sequence: Synthetic coding sequence
  source 1..1404: mol_type = other DNA
atgctggccccagccttccccccacccctgctgctgcccccacccaccggggacccccggctgcagcccccaccacccctgcccttcggcctgggcggcttccccccacctcctggggtgtccccagctgaggccgccggcgtgggggagggcctgggcctgggcctgcccagcccccggggccctggcctgaacctgcccccacccatcggcggggccggcccccccctgggcctgcccaagcccaagaagaggaaggagcctgtgaagattgctgcccctgagctgcacaagggggacagcgacagtgaagaagatgagcccaccaagaagaagaccatcctgcagggcagcagcgagggcaccggcctgagcgccctgctgccccagcccaagaacctgactgtgaaggagaccaaccggctgctgctgccccacgccttcagcaggaagcccagtgatggcagcccagacaccaagcccagccggctggccagcaagaccaagaccagcagcctggcccctgtggtgggcaccaccaccaccacccccagccccagcgccatcaaggccgccgccaagtctgctgccctgcaggtgaccaagcagatcacccaggaggaggatgacagtgatgaggaggtggcccctgagaacttcttcagcctgcctgagaaggccgagcccccaggagtggagccctacccctaccccatccccaccgtgcctgaggagctgcccccaggcacagagcctgagcccgccttccaggatgatgctgccaatgcccccctggagttcaagatggctgctggcagcagcggggccccctggatgcccaagccaggagatgactacagctacaaccagttcagcacctatggagatgccaatgctgctggggcctactaccagggcctgcagcagcacctgggccacagccccctgcggggcatcatgaggttcctgaacagcaagagcggcaagaggacctgctttgtgcccagctttgactactacagcggcggctactacccagcccaggaccctgccctggtgcccccccaggagatcgccccagatgccagcttcattgatgatgaggccttcaagaggctgcagggcaagaggaacagaggccgggaggagatcaactttgtggagatcaagggagatgaccagctgagcggggcccagcagtggatgaccaagagcctgacagaggagaagaccatgaagagcttcagcaagaagaagggggagcagcccaccggccagcagaggaggaagcaccagatcacctacctgatccaccaggccaaggagcgggagctggagctgaagaacacctggagcgagaacaagctgagccggcggcagacccaggccaagtatggcttctag

SEQ ID NO: 163256 - DNA, 3096 bp, synthetic construct
  misc_feature 1..3096: note = Description of Artificial Sequence: Synthetic coding sequence
  source 1..3096: mol_type = other DNA
atgaaggtgacagtgtgctttggaagaaccagggtggtggtgccctgtggagatggccacatgaaggtgttcagcctcatccagcaggccgtgacccgctacaggaaggccatcgccaaggaccccaactactggatccaggtgcaccggctggagcacggagatggcggcatcctggacctggatgacatcctgtgtgatgtggctgatgacaaggaccggctggtggccgtgtttgatgagcaggacccccaccacggcggagatggcaccagcgccagcagcacaggcacccagagccctgagatcttcggcagcgagctgggcaccaacaacgtgtctgccttccagccctaccaggccaccagcgagattgaggtgacccccagcgtgctgcgggccaacatgcccctgcacgtgagaagaagcagtgaccctgccctgattggcctgagcacctctgtgtctgacagcaacttcagcagcgaggagcccagcaggaagaaccccacccgctggagcaccacagctggcttcctgaagcagaacacagctggcagccccaagacctgtgacaggaagaaggatgagaactaccgcagcctgccccgggacaccagcaactggagcaaccagttccagagggacaatgcccggagcagcctgagcgccagccaccccatggtgggcaagtggctggagaagcaggagcaggatgaagatggaacagaggaggacaacagccgggtggagcctgtgggccacgccgacaccggcctggagcacatccccaacttcagcctggatgacatggtgaagctggtggaggtgcccaatgatggcggccccctgggcatccacgtggtgcccttcagcgcccggggcggccgcaccctgggcctgctggtgaagaggctggagaagggcggcaaggccgagcatgaaaatctcttccgggagaatgactgcatcgtgcgcatcaatgatggagacctgaggaacagaagatttgagcaggcccagcacatgttccggcaggccatgaggacccccatcatctggttccacgtggtgcctgctgccaacaaggagcagtatgagcagctgagccagagcgagaagaacaactactacagcagccgcttctccccagacagccagtacatcgacaacagatctgtgaacagcgctggcctgcacacagtgcagagggccccccggctgaaccaccccccagagcagattgacagccacagccggctgccccacagcgcccaccccagcggcaagcccccatctgccccagccagcgccccccagaatgtgttcagcaccaccgtgagcagcggctacaacaccaagaagattggcaagaggctgaacatccagctgaagaagggcacagagggcctgggcttcagcatcaccagcagagatgtgaccatcggcggcagcgcccccatctacgtgaagaacatcctgcccaggggggccgccatccaggacggccgcctgaaggccggggacaggctcatcgaggtgaatggagtggacctggtgggcaagagccaggaggaggtggtgtccctgctgcggagcaccaagatggagggcaccgtgtccctgctggtgttccggcaggaggatgccttccacccccgggagctgaatgctgagcccagccagatgcagatccccaaggagaccaaggccgaggatgaggacatcgtgctgaccccagatggcacccgggagttcctgacctttgaggtgcccctgaatgacagcggcagcgctggcctgggcgtgtctgtgaagggcaacagaagcaaggagaaccacgccgacctgggcatctttgtgaagagcatcatcaatggaggagctgccagcaaggatggccgcctgcgggtgaatgaccagctgattgctgtgaatggagagagcctgctgggcaagaccaaccaggatgccatggagaccctgcggcgctccatgagcacagagggcaacaagaggggcatgatccagctgattgtggcccggcgcatcagcaagtgcaatgagctgaagagccctggcagccccccaggccctgagctgcccattgaaacagccctggatgaccgggagcggcgcatcagccacagcctgtacagcggcatcgagggcctggatgagagccccagcagaaatgctgccctgagccgcatcatgggcaagtaccagctgagccccaccgtgaacatgccccaggatgacaccgtcatcattgaagatgaccggctgcctgtgctgcccccccacctgagtgaccagagcagcagcagcagccatgatgatgtgggctttgtgacagcagatgctggcacctgggccaaggccgccatcagtgacagcgctgactgcagcctgagcccagatgtggaccctgtgctggccttccagcgggagggcttcggccggcagagcatgtctgagaagaggaccaagcagttcagtgatgccagccagctggactttgtgaagaccaggaagagcaagtccatggacctgggcattgctgatgagaccaagctgaacacagtggatgaccagaaggccggcagccccagcagagatgtgggccccagcctgggcctgaagaagagcagcagcctggagagcctgcagacagctgtggccgaggtgaccctgaatggagacatccccttccaccggccccggccccgcatcatccggggccggggctgcaatgaaagcttccgggccgccatcgacaagagctatgacaagccagctgtggatgatgatgatgagggcatggagaccctggaggaggacacagaggagagcagccgcagcggccgggagagcgtgtccacagccagtgaccagcccagccacagcctggagcggcagatgaatggaaaccaggagaagggggacaagacagacaggaagaaggacaagacaggcaaggagaagaagaaggaccgggacaaggagaaggacaagatgaaggccaagaagggcatgctgaagggcctgggggacatgttcagcctggccaagctgaagccagagaagaggtag

SEQ ID NO: 163257 - DNA, 3960 bp, synthetic construct
  misc_feature 1..3960: note = Description of Artificial Sequence: Synthetic coding sequence
  source 1..3960: mol_type = other DNA
atgaaggtgacagtgtgctttggaagaaccagggtggtggtgccctgtggagatggccacatgaaggtgttcagcctcatccagcaggccgtgacccgctacaggaaggccatcgccaaggaccccaactactggatccaggtgcaccggctggagcacggagatggcggcatcctggacctggatgacatcctgtgtgatgtggctgatgacaaggaccggctggtggccgtgtttgatgagcaggacccccaccacggcggagatggcaccagcgccagcagcacaggcacccagagccctgagatcttcggcagcgagctgggcaccaacaacgtgtctgccttccagccctaccaggccaccagcgagattgaggtgacccccagcgtgctgcgggccaacatgcccctgcacgtgagaagaagcagtgaccctgccctgattggcctgagcacctctgtgtctgacagcaacttcagcagcgaggagcccagcaggaagaaccccacccgctggagcaccacagctggcttcctgaagcagaacacagctggcagccccaagacctgtgacaggaagaaggatgagaactaccgcagcctgccccgggacaccagcaactggagcaaccagttccagagggacaatgcccggagcagcctgagcgccagccaccccatggtgggcaagtggctggagaagcaggagcaggatgaagatggaacagaggaggacaacagccgggtggagcctgtgggccacgccgacaccggcctggagcacatccccaacttcagcctggatgacatggtgaagctggtggaggtgcccaatgatggcggccccctgggcatccacgtggtgcccttcagcgcccggggcggccgcaccctgggcctgctggtgaagaggctggagaagggcggcaaggccgagcatgaaaatctcttccgggagaatgactgcatcgtgcgcatcaatgatggagacctgaggaacagaagatttgagcaggcccagcacatgttccggcaggccatgaggacccccatcatctggttccacgtggtgcctgctgccaacaaggagcagtatgagcagctgagccagagcgagaagaacaactactacagcagccgcttctccccagacagccagtacatcgacaacagatctgtgaacagcgctggcctgcacacagtgcagagggccccccggctgaaccaccccccagagcagattgacagccacagccggctgccccacagcgcccaccccagcggcaagcccccatctgccccagccagcgccccccagaatgtgttcagcaccaccgtgagcagcggctacaacaccaagaagattggcaagaggctgaacatccagctgaagaagggcacagagggcctgggcttcagcatcaccagcagagatgtgaccatcggcggcagcgcccccatctacgtgaagaacatcctgcccaggggggccgccatccaggacggccgcctgaaggccggggacaggctcatcgaggtgaatggagtggacctggtgggcaagagccaggaggaggtggtgtccctgctgcggagcaccaagatggagggcaccgtgtccctgctggtgttccggcaggaggatgccttccacccccgggagctgaatgctgagcccagccagatgcagatccccaaggagaccaaggccgaggatgaggacatcgtgctgaccccagatggcacccgggagttcctgacctttgaggtgcccctgaatgacagcggcagcgctggcctgggcgtgtctgtgaagggcaacagaagcaaggagaaccacgccgacctgggcatctttgtgaagagcatcatcaatggaggagctgccagcaaggatggccgcctgcgggtgaatgaccagctgattgctgtgaatggagagagcctgctgggcaagaccaaccaggatgccatggagaccctgcggcgctccatgagcacagagggcaacaagaggggcatgatccagctgattgtggcccggcgcatcagcaagtgcaatgagctgaagagccctggcagccccccaggccctgagctgcccattgaaacagccctggatgaccgggagcggcgcatcagccacagcctgtacagcggcatcgagggcctggatgagagccccagcagaaatgctgccctgagccgcatcatgggagagagcggcaagtaccagctgagccccaccgtgaacatgccccaggatgacaccgtcatcattgaagatgaccggctgcctgtgctgcccccccacctgagtgaccagagcagcagcagcagccatgatgatgtgggctttgtgacagcagatgctggcacctgggccaaggccgccatcagtgacagcgctgactgcagcctgagcccagatgtggaccctgtgctggccttccagcgggagggcttcggccggcagagcatgtctgagaagaggaccaagcagttcagtgatgccagccagctggactttgtgaagaccaggaagagcaagtccatggacctgggcattgctgatgagaccaagctgaacacagtggatgaccagaaggccggcagccccagcagagatgtgggccccagcctgggcctgaagaagagcagcagcctggagagcctgcagacagctgtggccgaggtgaccctgaatggagacatccccttccaccggccccggccccgcatcatccggggccggggctgcaatgaaagcttccgggccgccatcgacaagagctatgacaagccagctgtggatgatgatgatgagggcatggagaccctggaggaggacacagaggagagcagccgcagcggccgggagagcgtgtccacagccagtgaccagcccagccacagcctggagcggcagatgaatggaaaccaggagaagggggacaagacagacaggaagaaggacaagacaggcaaggagaagaagaaggaccgggacaaggagaaggacaagatgaaggccaagaagggcatgctgaagggcctgggggacatgttccgcatccaggccaagacccgggagttccgggagcggcaggcccgggagcgggactatgcagagatccaggacttccacaggaccttcggctgtgatgatgagctgatgtatggaggagtgagcagctatgagggctccatggccctgaatgcccggccccagagcccccgggagggccacatgatggatgccctgtatgcccaggtgaagaagcccaggaacagcaagcccagccctgtggacagcaacagaagcacccccagcaaccacgaccgcatccagaggctgcggcaggagttccagcaggccaagcaggatgaagatgtggaggacagaagaaggacctacagctttgagcagccctggcccaatgcccggcctgccacccagagcggccgccacagcgtgtctgtggaggtgcagatgcagaggcagaggcaggaggagcgggagagcagccagcaggcccagaggcagtacagcagcctgccccggcagagcaggaagaatgccagctctgtgtcccaggacagctgggagcagaactacagccctggagagggcttccagagcgccaaggagaacccccgctacagcagctaccagggcagcagaaatggctacctgggcggccacggcttcaatgcccgggtgatgctggagacccaggagctgctgcggcaggagcagaggaggaaggagcagcagatgaagaagcagcccccatctgagggccccagcaactatgacagctacaagaaggtgcaggaccccagctatgccccacccaagggccccttccggcaggatgtgccccccagccccagccaggtggcccggctgaaccggctgcagaccccagagaagggccggcccttctacagctag

SEQ ID NO: 163258 - DNA, 3933 bp, synthetic construct
  misc_feature 1..3933: note = Description of Artificial Sequence: Synthetic coding sequence
  source 1..3933: mol_type = other DNA
atgaaggtgacagtgtgctttggaagaaccagggtggtggtgccctgtggagatggccacatgaaggtgttcagcctcatccagcaggccgtgacccgctacaggaaggccatcgccaaggaccccaactactggatccaggtgcaccggctggagcacggagatggcggcatcctggacctggatgacatcctgtgtgatgtggctgatgacaaggaccggctggtggccgtgtttgatgagcaggacccccaccacggcggagatggcaccagcgccagcagcacaggcacccagagccctgagatcttcggcagcgagctgggcaccaacaacgtgtctgccttccagccctaccaggccaccagcgagattgaggtgacccccagcgtgctgcgggccaacatgcccctgcacgtgagaagaagcagtgaccctgccctgattggcctgagcacctctgtgtctgacagcaacttcagcagcgaggagcccagcaggaagaaccccacccgctggagcaccacagctggcttcctgaagcagaacacagctggcagccccaagacctgtgacaggaagaaggatgagaactaccgcagcctgccccgggacaccagcaactggagcaaccagttccagagggacaatgcccggagcagcctgagcgccagccaccccatggtgggcaagtggctggagaagcaggagcaggatgaagatggaacagaggaggacaacagccgggtggagcctgtgggccacgccgacaccggcctggagcacatccccaacttcagcctggatgacatggtgaagctggtggaggtgcccaatgatggcggccccctgggcatccacgtggtgcccttcagcgcccggggcggccgcaccctgggcctgctggtgaagaggctggagaagggcggcaaggccgagcatgaaaatctcttccgggagaatgactgcatcgtgcgcatcaatgatggagacctgaggaacagaagatttgagcaggcccagcacatgttccggcaggccatgaggacccccatcatctggttccacgtggtgcctgctgccaacaaggagcagtatgagcagctgagccagagcgagaagaacaactactacagcagccgcttctccccagacagccagtacatcgacaacagatctgtgaacagcgctggcctgcacacagtgcagagggccccccggctgaaccaccccccagagcagattgacagccacagccggctgccccacagcgcccaccccagcggcaagcccccatctgccccagccagcgccccccagaatgtgttcagcaccaccgtgagcagcggctacaacaccaagaagattggcaagaggctgaacatccagctgaagaagggcacagagggcctgggcttcagcatcaccagcagagatgtgaccatcggcggcagcgcccccatctacgtgaagaacatcctgcccaggggggccgccatccaggacggccgcctgaaggccggggacaggctcatcgaggtgaatggagtggacctggtgggcaagagccaggaggaggtggtgtccctgctgcggagcaccaagatggagggcaccgtgtccctgctggtgttccggcaggaggatgccttccacccccgggagctgaaggcagaagatgaagatattgtgctgaccccagatggcacccgggagttcctgacctttgaggtgcccctgaatgattctggcagcgctggcctgggcgtgtctgtgaagggcaacagaagcaaagaaaatcatgctgacctgggcatctttgtgaagagcatcatcaatggaggagctgccagcaaggatggccgcctgcgggtgaatgaccagctgattgctgtgaatggagagagcctgctgggcaagaccaaccaggatgccatggagaccctgcggcgctccatgagcacagagggcaacaagaggggcatgatccagctgattgtggcccggcgcatcagcaaatgtaatgagctgaagagccctggcagccccccaggccctgagctgcccatcgagacagccctggatgaccgggagcggcgcatcagccacagcctgtacagcggcatcgagggcctggatgagagccccagcagaaatgctgccctgagccgcatcatgggcaagtaccagctgagccccaccgtgaacatgccccaggatgacaccgtcatcattgaagatgaccggctgcctgtgctgcccccccacctgagtgaccagagcagcagcagcagccatgatgatgtgggctttgtgacagcagatgctggcacctgggccaaggccgccatcagtgacagcgctgactgcagcctgagcccagatgtggaccctgtgctggccttccagcgggagggcttcggccggcagattgctgatgagaccaagctgaacacagtggatgaccagaaggccggcagccccagcagagatgtgggccccagcctgggcctgaagaagagcagcagcctggagagcctgcagacagctgtggccgaggtgaccctgaatggagacatccccttccaccggccccggccccgcatcatccggggccggggctgcaatgaaagcttccgggccgccatcgacaagagctatgacaagccagctgtggatgatgatgatgagggcatggagaccctggaggaggacacagaggagagcagccgcagcggccgggagagcgtgtccacagccagtgaccagcccagccacagcctggagcggcagatgaatggaaaccaggagaagggggacaagacagacaggaagaaggacaagacaggcaaggagaagaagaaggaccgggacaaggagaaggacaagatgaaggccaagaagggcatgctgaagggcctgggggacatgttccgctttgggaagcacaggaaggatgacaagattgagaagacaggcaagatcaagatccaggagagcttcaccagcgaggaggagcgcatccgcatgaagcaggagcaggagcgcatccaggccaagacccgggagttccgggagcggcaggcccgggagcgggactatgcagagatccaggacttccacaggaccttcggctgtgatgatgagctgatgtatggaggagtgtcctcctatgagggctccatggccctgaatgcccggccccagagcccccgggagggccacatgatggatgccctgtatgcccaggtgaagaagcccaggaacagcaagcccagccctgtggacagcaacagaagcacccccagcaaccacgaccgcatccagaggctgcggcaggagttccagcaggccaagcaggatgaagatgtggaggacagaagaaggacctacagctttgagcagccctggcccaatgcccggcctgccacccagagcggccgccacagcgtgtctgtggaggtgcagatgcagaggcagaggcaggaggagcgggagagcagccagcaggcccagaggcagtacagcagcctgccccggcagagcaggaagaatgccagctctgtgtcccaggacagctgggagcagaactacagccctggagagggcttccagagcgccaaggagaacccccgctacagcagctaccagggcagcagaaatggctacctgggcggccacggcttcaatgcccgggtgatgctggagacccaggagctgctgcggcaggagcagaggaggaaggagcagcagatgaagaagcagccccccagcgagggccccagcaactatgacagctacaagaaggtgcaggaccccagctatgccccacccaagggccccttccggcaggatgtgccccccagccccagccaggtggcccggctgaaccggctgcagaccccagagaagggccggcccttctacagctag

SEQ ID NO: 163259 - DNA, 540 bp, synthetic construct
  misc_feature 1..540: note = Description of Artificial Sequence: Synthetic coding sequence
  source 1..540: mol_type = other DNA
atgcagatccccaaggagaccaaggccgaggatgaggacatcgtgctgaccccagatggcacccgggagttcctgacctttgaggtgcccctgaatgacagcggcagcgctggcctgggcgtgtctgtgaagggcaacagaagcaaggagaaccacgccgacctgggcatctttgtgaagagcatcatcaatggaggagctgccagcaaggatggccgcctgcgggtgaatgaccagctgattgctgtgaatggagagagcctgctgggcaagaccaaccaggatgccatggagaccctgcggcgctccatgagcacagagggcaacaagaggggcatgatccagctgattgtggcccggcgcatcagcaagtgcaatgagctgaagagccctggcagccccccaggccctgagctgcccattgaaacagccctggatgaccgggagcggcgcatcagccacagcctgtacagcggcatcgagggcctggatgagagccccagcagaaatgctgccctgagccgcatcatgggcacctag

SEQ ID NO: 163260 - DNA, 3006 bp, synthetic construct
  misc_feature 1..3006: note = Description of Artificial Sequence: Synthetic coding sequence
  source 1..3006: mol_type = other DNA
atgaaggtgacagtgtgctttggaagaaccagggtggtggtgccctgtggagatggccacatgaaggtgttcagcctcatccagcaggccgtgacccgctacaggaaggccatcgccaaggaccccaactactggatccaggtgcaccggctggagcacggagatggcggcatcctggacctggatgacatcctgtgtgatgtggctgatgacaaggaccggctggtggccgtgtttgatgagcaggacccccaccacggcggagatggcaccagcgccagcagcacaggcacccagagccctgagatcttcggcagcgagctgggcaccaacaacgtgtctgccttccagccctaccaggccaccagcgagattgaggtgacccccagcgtgctgcgggccaacatgcccctgcacgtgagaagaagcagtgaccctgccctgattggcctgagcacctctgtgtctgacagcaacttcagcagcgaggagcccagcaggaagaaccccacccgctggagcaccacagctggcttcctgaagcagaacacagctggcagccccaagacctgtgacaggaagaaggatgagaactaccgcagcctgccccgggacaccagcaactggagcaaccagttccagagggacaatgcccggagcagcctgagcgccagccaccccatggtgggcaagtggctggagaagcaggagcaggatgaagatggaacagaggaggacaacagccgggtggagcctgtgggccacgccgacaccggcctggagcacatccccaacttcagcctggatgacatggtgaagctggtggaggtgcccaatgatggcggccccctgggcatccacgtggtgcccttcagcgcccggggcggccgcaccctgggcctgctggtgaagaggctggagaagggcggcaaggccgagcatgaaaatctcttccgggagaatgactgcatcgtgcgcatcaatgatggagacctgaggaacagaagatttgagcaggcccagcacatgttccggcaggccatgaggacccccatcatctggttccacgtggtgcctgctgccaacaaggagcagtatgagcagctgagccagagcgagaagaacaactactacagcagccgcttctccccagacagccagtacatcgacaacagatctgtgaacagcgctggcctgcacacagtgcagagggccccccggctgaaccaccccccagagcagattgacagccacagccggctgccccacagcgcccaccccagcggcaagcccccatctgccccagccagcgccccccagaatgtgttcagcaccaccgtgagcagcggctacaacaccaagaagattggcaagaggctgaacatccagctgaagaagggcacagagggcctgggcttcagcatcaccagcagagatgtgaccatcggcggcagcgcccccatctacgtgaagaacatcctgcccaggggggccgccatccaggacggccgcctgaaggccggggacaggctcatcgaggtgaatggagtggacctggtgggcaagagccaggaggaggtggtgtccctgctgcggagcaccaagatggagggcaccgtgtccctgctggtgttccggcaggaggatgccttccacccccgggagctgaatgctgagcccagccagatgcagatccccaaggagaccaaggccgaggatgaggacatcgtgctgaccccagatggcacccgggagttcctgacctttgaggtgcccctgaatgacagcggcagcgctggcctgggcgtgtctgtgaagggcaacagaagcaaggagaaccacgccgacctgggcatctttgtgaagagcatcatcaatggaggagctgccagcaaggatggccgcctgcgggtgaatgaccagctgattgctgtgaatggagagagcctgctgggcaagaccaaccaggatgccatggagaccctgcggcgctccatgagcacagagggcaacaagaggggcatgatccagctgattgtggcccggcgcatcagcaagtgcaatgagctgaagagccctggcagccccccaggccctgagctgcccattgaaacagccctggatgaccgggagcggcgcatcagccacagcctgtacagcggcatcgagggcctggatgagagccccagcagaaatgctgccctgagccgcatcatgggcaagtaccagctgagccccaccgtgaacatgccccaggatgacaccgtcatcattgaagatgaccggctgcctgtgctgcccccccacctgagtgaccagagcagcagcagcagccatgatgatgtgggctttgtgacagcagatgctggcacctgggccaaggccgccatcagtgacagcgctgactgcagcctgagcccagatgtggaccctgtgctggccttccagcgggagggcttcggccggcagattgctgatgagaccaagctgaacacagtggatgaccagaaggccggcagccccagcagagatgtgggccccagcctgggcctgaagaagagcagcagcctggagagcctgcagacagctgtggccgaggtgaccctgaatggagacatccccttccaccggccccggccccgcatcatccggggccggggctgcaatgaaagcttccgggccgccatcgacaagagctatgacaagccagctgtggatgatgatgatgagggcatggagaccctggaggaggacacagaggagagcagccgcagcggccgggagagcgtgtccacagccagtgaccagcccagccacagcctggagcggcagatgaatggaaaccaggagaagggggacaagacagacaggaagaaggacaagacaggcaaggagaagaagaaggaccgggacaaggagaaggacaagatgaaggccaagaagggcatgctgaagggcctgggggacatgttcagcctggccaagctgaagccagagaagaggtag

SEQ ID NO: 163261 - DNA, 2967 bp, synthetic construct
  misc_feature 1..2967: note = Description of Artificial Sequence: Synthetic coding sequence
  source 1..2967: mol_type = other DNA
atgaaggtgacagtgtgctttggaagaaccagggtggtggtgccctgtggagatggccacatgaaggtgttcagcctcatccagcaggccgtgacccgctacaggaaggccatcgccaaggaccccaactactggatccaggtgcaccggctggagcacggagatggcggcatcctggacctggatgacatcctgtgtgatgtggctgatgacaaggaccggctggtggccgtgtttgatgagcaggacccccaccacggcggagatggcaccagcgccagcagcacaggcacccagagccctgagatcttcggcagcgagctgggcaccaacaacgtgtctgccttccagccctaccaggccaccagcgagattgaggtgacccccagcgtgctgcgggccaacatgcccctgcacgtgagaagaagcagtgaccctgccctgattggcctgagcacctctgtgtctgacagcaacttcagcagcgaggagcccagcaggaagaaccccacccgctggagcaccacagctggcttcctgaagcagaacacagctggcagccccaagacctgtgacaggaagaaggatgagaactaccgcagcctgccccgggacaccagcaactggagcaaccagttccagagggacaatgcccggagcagcctgagcgccagccaccccatggtgggcaagtggctggagaagcaggagcaggatgaagatggaacagaggaggacaacagccgggtggagcctgtgggccacgccgacaccggcctggagcacatccccaacttcagcctggatgacatggtgaagctggtggaggtgcccaatgatggcggccccctgggcatccacgtggtgcccttcagcgcccggggcggccgcaccctgggcctgctggtgaagaggctggagaagggcggcaaggccgagcatgaaaatctcttccgggagaatgactgcatcgtgcgcatcaatgatggagacctgaggaacagaagatttgagcaggcccagcacatgttccggcaggccatgaggacccccatcatctggttccacgtggtgcctgctgccaacaaggagcagtatgagcagctgagccagagcgagaagaacaactactacagcagccgcttctccccagacagccagtacatcgacaacagatctgtgaacagcgctggcctgcacacagtgcagagggccccccggctgaaccaccccccagagcagattgacagccacagccggctgccccacagcgcccaccccagcggcaagcccccatctgccccagccagcgccccccagaatgtgttcagcaccaccgtgagcagcggctacaacaccaagaagattggcaagaggctgaacatccagctgaagaagggcacagagggcctgggcttcagcatcaccagcagagatgtgaccatcggcggcagcgcccccatctacgtgaagaacatcctgcccaggggggccgccatccaggacggccgcctgaaggccggggacaggctcatcgaggtgaatggagtggacctggtgggcaagagccaggaggaggtggtgtccctgctgcggagcaccaagatggagggcaccgtgtccctgctggtgttccggcaggaggatgccttccacccccgggagctgaaggcagaagatgaagatattgtgctgaccccagatggcacccgggagttcctgacctttgaggtgcccctgaatgattctggcagcgctggcctgggcgtgtctgtgaagggcaacagaagcaaagaaaatcatgctgacctgggcatctttgtgaagagcatcatcaatggaggagctgccagcaaggatggccgcctgcgggtgaatgaccagctgattgctgtgaatggagagagcctgctgggcaagaccaaccaggatgccatggagaccctgcggcgctccatgagcacagagggcaacaagaggggcatgatccagctgattgtggcccggcgcatcagcaaatgtaatgagctgaagagccctggcagccccccaggccctgagctgcccatcgagacagccctggatgaccgggagcggcgcatcagccacagcctgtacagcggcatcgagggcctggatgagagccccagcagaaatgctgccctgagccgcatcatgggcaagtaccagctgagccccaccgtgaacatgccccaggatgacaccgtcatcattgaagatgaccggctgcctgtgctgcccccccacctgagtgaccagagcagcagcagcagccatgatgatgtgggctttgtgacagcagatgctggcacctgggccaaggccgccatcagtgacagcgctgactgcagcctgagcccagatgtggaccctgtgctggccttccagcgggagggcttcggccggcagattgctgatgagaccaagctgaacacagtggatgaccagaaggccggcagccccagcagagatgtgggccccagcctgggcctgaagaagagcagcagcctggagagcctgcagacagctgtggccgaggtgaccctgaatggagacatccccttccaccggccccggccccgcatcatccggggccggggctgcaatgaaagcttccgggccgccatcgacaagagctatgacaagccagctgtggatgatgatgatgagggcatggagaccctggaggaggacacagaggagagcagccgcagcggccgggagagcgtgtccacagccagtgaccagcccagccacagcctggagcggcagatgaatggaaaccaggagaagggggacaagacagacaggaagaaggacaagacaggcaaggagaagaagaaggaccgggacaaggagaaggacaagatgaaggccaagaagggcatgctgaagggcctgggggacatgttcagcctggccaagctgaagccagagaagaggtag

SEQ ID NO: 163262 - DNA, 4062 bp, synthetic construct
  misc_feature 1..4062: note = Description of Artificial Sequence: Synthetic coding sequence
  source 1..4062: mol_type = other DNA
atgaaggtgacagtgtgctttggaagaaccagggtggtggtgccctgtggagatggccacatgaaggtgttcagcctcatccagcaggccgtgacccgctacaggaaggccatcgccaaggaccccaactactggatccaggtgcaccggctggagcacggagatggcggcatcctggacctggatgacatcctgtgtgatgtggctgatgacaaggaccggctggtggccgtgtttgatgagcaggacccccaccacggcggagatggcaccagcgccagcagcacaggcacccagagccctgagatcttcggcagcgagctgggcaccaacaacgtgtctgccttccagccctaccaggccaccagcgagattgaggtgacccccagcgtgctgcgggccaacatgcccctgcacgtgagaagaagcagtgaccctgccctgattggcctgagcacctctgtgtctgacagcaacttcagcagcgaggagcccagcaggaagaaccccacccgctggagcaccacagctggcttcctgaagcagaacacagctggcagccccaagacctgtgacaggaagaaggatgagaactaccgcagcctgccccgggacaccagcaactggagcaaccagttccagagggacaatgcccggagcagcctgagcgccagccaccccatggtgggcaagtggctggagaagcaggagcaggatgaagatggaacagaggaggacaacagccgggtggagcctgtgggccacgccgacaccggcctggagcacatccccaacttcagcctggatgacatggtgaagctggtggaggtgcccaatgatggcggccccctgggcatccacgtggtgcccttcagcgcccggggcggccgcaccctgggcctgctggtgaagaggctggagaagggcggcaaggccgagcatgaaaatctcttccgggagaatgactgcatcgtgcgcatcaatgatggagacctgaggaacagaagatttgagcaggcccagcacatgttccggcaggccatgaggacccccatcatctggttccacgtggtgcctgctgccaacaaggagcagtatgagcagctgagccagagcgagaagaacaactactacagcagccgcttctccccagacagccagtacatcgacaacagatctgtgaacagcgctggcctgcacacagtgcagagggccccccggctgaaccaccccccagagcagattgacagccacagccggctgccccacagcgcccaccccagcggcaagcccccatctgccccagccagcgccccccagaatgtgttcagcaccaccgtgagcagcggctacaacaccaagaagattggcaagaggctgaacatccagctgaagaagggcacagagggcctgggcttcagcatcaccagcagagatgtgaccatcggcggcagcgcccccatctacgtgaagaacatcctgcccaggggggccgccatccaggacggccgcctgaaggccggggacaggctcatcgaggtgaatggagtggacctggtgggcaagagccaggaggaggtggtgtccctgctgcggagcaccaagatggagggcaccgtgtccctgctggtgttccggcaggaggatgccttccacccccgggagctgaatgctgagcccagccagatgcagatccccaaggagaccaaggccgaggatgaggacatcgtgctgaccccagatggcacccgggagttcctgacctttgaggtgcccctgaatgacagcggcagcgctggcctgggcgtgtctgtgaagggcaacagaagcaaggagaaccacgccgacctgggcatctttgtgaagagcatcatcaatggaggagctgccagcaaggatggccgcctgcgggtgaatgaccagctgattgctgtgaatggagagagcctgctgggcaagaccaaccaggatgccatggagaccctgcggcgctccatgagcacagagggcaacaagaggggcatgatccagctgattgtggcccggcgcatcagcaagtgcaatgagctgaagagccctggcagccccccaggccctgagctgcccattgaaacagccctggatgaccgggagcggcgcatcagccacagcctgtacagcggcatcgagggcctggatgagagccccagcagaaatgctgccctgagccgcatcatgggcaagtaccagctgagccccaccgtgaacatgccccaggatgacaccgtcatcattgaagatgaccggctgcctgtgctgcccccccacctgagtgaccagagcagcagcagcagccatgatgatgtgggctttgtgacagcagatgctggcacctgggccaaggccgccatcagtgacagcgctgactgcagcctgagcccagatgtggaccctgtgctggccttccagcgggagggcttcggccggcagagcatgtctgagaagaggaccaagcagttcagtgatgccagccagctggactttgtgaagaccaggaagagcaagtccatggacctgggcattgctgatgagaccaagctgaacacagtggatgaccagaaggccggcagccccagcagagatgtgggccccagcctgggcctgaagaagagcagcagcctggagagcctgcagacagctgtggccgaggtgaccctgaatggagacatccccttccaccggccccggccccgcatcatccggggccggggctgcaatgaaagcttccgggccgccatcgacaagagctatgacaagccagctgtggatgatgatgatgagggcatggagaccctggaggaggacacagaggagagcagccgcagcggccgggagagcgtgtccacagccagtgaccagcccagccacagcctggagcggcagatgaatggaaaccaggagaagggggacaagacagacaggaagaaggacaagacaggcaaggagaagaagaaggaccgggacaaggagaaggacaagatgaaggccaagaagggcatgctgaagggcctgggggacatgttccgctttgggaagcacaggaaggatgacaagattgagaagacaggcaagatcaagatccaggagagcttcaccagcgaggaggagcgcatccgcatgaagcaggagcaggagcgcatccaggccaagacccgggagttccgggagcggcaggcccgggagcgggactatgcagagatccaggacttccacaggaccttcggctgtgatgatgagctgatgtatggaggagtgagcagctatgagggctccatggccctgaatgcccggccccagagcccccgggagggccacatgatggatgccctgtatgcccaggtgaagaagcccaggaacagcaagcccagccctgtggacagcaacagaagcacccccagcaaccacgaccgcatccagaggctgcggcaggagttccagcaggccaagcaggatgaagatgtggaggacagaagaaggacctacagctttgagcagccctggcccaatgcccggcctgccacccagagcggccgccacagcgtgtctgtggaggtgcagatgcagaggcagaggcaggaggagcgggagagcagccagcaggcccagaggcagtacagcagcctgccccggcagagcaggaagaatgccagctctgtgtcccaggacagctgggagcagaactacagccctggagagggcttccagagcgccaaggagaacccccgctacagcagctaccagggcagcagaaatggctacctgggcggccacggcttcaatgcccgggtgatgctggagacccaggagctgctgcggcaggagcagaggaggaaggagcagcagatgaagaagcagcccccatctgagggccccagcaactatgacagctacaagaaggtgcaggaccccagctatgccccacccaagggccccttccggcaggatgtgccccccagccccagccaggtggcccggctgaaccggctgcagaccccagagaagggccggcccttctacagctag

SEQ ID NO: 163263 - DNA, 4071 bp, synthetic construct
  misc_feature 1..4071: note = Description of Artificial Sequence: Synthetic coding sequence
  source 1..4071: mol_type = other DNA
atgaaggtgacagtgtgctttggaagaaccagggtggtggtgccctgtggagatggccacatgaaggtgttcagcctcatccagcaggccgtgacccgctacaggaaggccatcgccaaggaccccaactactggatccaggtgcaccggctggagcacggagatggcggcatcctggacctggatgacatcctgtgtgatgtggctgatgacaaggaccggctggtggccgtgtttgatgagcaggacccccaccacggcggagatggcaccagcgccagcagcacaggcacccagagccctgagatcttcggcagcgagctgggcaccaacaacgtgtctgccttccagccctaccaggccaccagcgagattgaggtgacccccagcgtgctgcgggccaacatgcccctgcacgtgagaagaagcagtgaccctgccctgattggcctgagcacctctgtgtctgacagcaacttcagcagcgaggagcccagcaggaagaaccccacccgctggagcaccacagctggcttcctgaagcagaacacagctggcagccccaagacctgtgacaggaagaaggatgagaactaccgcagcctgccccgggacaccagcaactggagcaaccagttccagagggacaatgcccggagcagcctgagcgccagccaccccatggtgggcaagtggctggagaagcaggagcaggatgaagatggaacagaggaggacaacagccgggtggagcctgtgggccacgccgacaccggcctggagcacatccccaacttcagcctggatgacatggtgaagctggtggaggtgcccaatgatggcggccccctgggcatccacgtggtgcccttcagcgcccggggcggccgcaccctgggcctgctggtgaagaggctggagaagggcggcaaggccgagcatgaaaatctcttccgggagaatgactgcatcgtgcgcatcaatgatggagacctgaggaacagaagatttgagcaggcccagcacatgttccggcaggccatgaggacccccatcatctggttccacgtggtgcctgctgccaacaaggagcagtatgagcagctgagccagagcgagaagaacaactactacagcagccgcttctccccagacagccagtacatcgacaacagatctgtgaacagcgctggcctgcacacagtgcagagggccccccggctgaaccaccccccagagcagattgacagccacagccggctgccccacagcgcccaccccagcggcaagcccccatctgccccagccagcgccccccagaatgtgttcagcaccaccgtgagcagcggctacaacaccaagaagattggcaagaggctgaacatccagctgaagaagggcacagagggcctgggcttcagcatcaccagcagagatgtgaccatcggcggcagcgcccccatctacgtgaagaacatcctgcccaggggggccgccatccaggacggccgcctgaaggccggggacaggctcatcgaggtgaatggagtggacctggtgggcaagagccaggaggaggtggtgtccctgctgcggagcaccaagatggagggcaccgtgtccctgctggtgttccggcaggaggatgccttccacccccgggagctgaatgctgagcccagccagatgcagatccccaaggagaccaaggccgaggatgaggacatcgtgctgaccccagatggcacccgggagttcctgacctttgaggtgcccctgaatgacagcggcagcgctggcctgggcgtgtctgtgaagggcaacagaagcaaggagaaccacgccgacctgggcatctttgtgaagagcatcatcaatggaggagctgccagcaaggatggccgcctgcgggtgaatgaccagctgattgctgtgaatggagagagcctgctgggcaagaccaaccaggatgccatggagaccctgcggcgctccatgagcacagagggcaacaagaggggcatgatccagctgattgtggcccggcgcatcagcaagtgcaatgagctgaagagccctggcagccccccaggccctgagctgcccattgaaacagccctggatgaccgggagcggcgcatcagccacagcctgtacagcggcatcgagggcctggatgagagccccagcagaaatgctgccctgagccgcatcatgggagagagcggcaagtaccagctgagccccaccgtgaacatgccccaggatgacaccgtcatcattgaagatgaccggctgcctgtgctgcccccccacctgagtgaccagagcagcagcagcagccatgatgatgtgggctttgtgacagcagatgctggcacctgggccaaggccgccatcagtgacagcgctgactgcagcctgagcccagatgtggaccctgtgctggccttccagcgggagggcttcggccggcagagcatgtctgagaagaggaccaagcagttcagtgatgccagccagctggactttgtgaagaccaggaagagcaagtccatggacctgggcattgctgatgagaccaagctgaacacagtggatgaccagaaggccggcagccccagcagagatgtgggccccagcctgggcctgaagaagagcagcagcctggagagcctgcagacagctgtggccgaggtgaccctgaatggagacatccccttccaccggccccggccccgcatcatccggggccggggctgcaatgaaagcttccgggccgccatcgacaagagctatgacaagccagctgtggatgatgatgatgagggcatggagaccctggaggaggacacagaggagagcagccgcagcggccgggagagcgtgtccacagccagtgaccagcccagccacagcctggagcggcagatgaatggaaaccaggagaagggggacaagacagacaggaagaaggacaagacaggcaaggagaagaagaaggaccgggacaaggagaaggacaagatgaaggccaagaagggcatgctgaagggcctgggggacatgttccgctttgggaagcacaggaaggatgacaagattgagaagacaggcaagatcaagatccaggagagcttcaccagcgaggaggagcgcatccgcatgaagcaggagcaggagcgcatccaggccaagacccgggagttccgggagcggcaggcccgggagcgggactatgcagagatccaggacttccacaggaccttcggctgtgatgatgagctgatgtatggaggagtgtcctcctatgagggctccatggccctgaatgcccggccccagagcccccgggagggccacatgatggatgccctgtatgcccaggtgaagaagcccaggaacagcaagcccagccctgtggacagcaacagaagcacccccagcaaccacgaccgcatccagaggctgcggcaggagttccagcaggccaagcaggatgaagatgtggaggacagaagaaggacctacagctttgagcagccctggcccaatgcccggcctgccacccagagcggccgccacagcgtgtctgtggaggtgcagatgcagaggcagaggcaggaggagcgggagagcagccagcaggcccagaggcagtacagcagcctgccccggcagagcaggaagaatgccagctctgtgtcccaggacagctgggagcagaactacagccctggagagggcttccagagcgccaaggagaacccccgctacagcagctaccagggcagcagaaatggctacctgggcggccacggcttcaatgcccgggtgatgctggagacccaggagctgctgcggcaggagcagaggaggaaggagcagcagatgaagaagcagccccccagcgagggccccagcaactatgacagctacaagaaggtgcaggaccccagctatgccccacccaagggccccttccggcaggatgtgccccccagccccagccaggtggcccggctgaaccggctgcagaccccagagaagggccggcccttctacagctag

SEQ ID NO: 163264 - DNA, 3891 bp, synthetic construct
  misc_feature 1..3891: note = Description of Artificial Sequence: Synthetic coding sequence
  source 1..3891: mol_type = other DNA
atgaaggtgacagtgtgctttggaagaaccagggtggtggtgccctgtggagatggccacatgaaggtgttcagcctcatccagcaggccgtgacccgctacaggaaggccatcgccaaggaccccaactactggatccaggtgcaccggctggagcacggagatggcggcatcctggacctggatgacatcctgtgtgatgtggctgatgacaaggaccggctggtggccgtgtttgatgagcaggacccccaccacggcggagatggcaccagcgccagcagcacaggcacccagagccctgagatcttcggcagcgagctgggcaccaacaacgtgtctgccttccagccctaccaggccaccagcgagattgaggtgacccccagcgtgctgcgggccaacatgcccctgcacgtgagaagaagcagtgaccctgccctgattggcctgagcacctctgtgtctgacagcaacttcagcagcgaggagcccagcaggaagaaccccacccgctggagcaccacagctggcttcctgaagcagaacacagctggcagccccaagacctgtgacaggaaggatgaagatggaacagaggaggacaacagccgggtggagcctgtgggccacgccgacaccggcctggagcacatccccaacttcagcctggatgacatggtgaagctggtggaggtgcccaatgatggcggccccctgggcatccacgtggtgcccttcagcgcccggggcggccgcaccctgggcctgctggtgaagaggctggagaagggcggcaaggccgagcatgaaaatctcttccgggagaatgactgcatcgtgcgcatcaatgatggagacctgaggaacagaagatttgagcaggcccagcacatgttccggcaggccatgaggacccccatcatctggttccacgtggtgcctgctgccaacaaggagcagtatgagcagctgagccagagcgagaagaacaactactacagcagccgcttctccccagacagccagtacatcgacaacagatctgtgaacagcgctggcctgcacacagtgcagagggccccccggctgaaccaccccccagagcagattgacagccacagccggctgccccacagcgcccaccccagcggcaagcccccatctgccccagccagcgccccccagaatgtgttcagcaccaccgtgagcagcggctacaacaccaagaagattggcaagaggctgaacatccagctgaagaagggcacagagggcctgggcttcagcatcaccagcagagatgtgaccatcggcggcagcgcccccatctacgtgaagaacatcctgcccaggggggccgccatccaggacggccgcctgaaggccggggacaggctcatcgaggtgaatggagtggacctggtgggcaagagccaggaggaggtggtgtccctgctgcggagcaccaagatggagggcaccgtgtccctgctggtgttccggcaggaggatgccttccacccccgggagctgaaggcagaagatgaagatattgtgctgaccccagatggcacccgggagttcctgacctttgaggtgcccctgaatgattctggcagcgctggcctgggcgtgtctgtgaagggcaacagaagcaaagaaaatcatgctgacctgggcatctttgtgaagagcatcatcaatggaggagctgccagcaaggatggccgcctgcgggtgaatgaccagctgattgctgtgaatggagagagcctgctgggcaagaccaaccaggatgccatggagaccctgcggcgctccatgagcacagagggcaacaagaggggcatgatccagctgattgtggcccggcgcatcagcaaatgtaatgagctgaagagccctggcagccccccaggccctgagctgcccatcgagacagccctggatgaccgggagcggcgcatcagccacagcctgtacagcggcatcgagggcctggatgagagccccagcagaaatgctgccctgagccgcatcatgggcaagtaccagctgagccccaccgtgaacatgccccaggatgacaccgtcatcattgaagatgaccggctgcctgtgctgcccccccacctgagtgaccagagcagcagcagcagccatgatgatgtgggctttgtgacagcagatgctggcacctgggccaaggccgccatcagtgacagcgctgactgcagcctgagcccagatgtggaccctgtgctggccttccagcgggagggcttcggccggcagagcatgtctgagaagaggaccaagcagttcagtgatgccagccagctggactttgtgaagaccaggaagagcaagtccatggacctgggcattgctgatgagaccaagctgaacacagtggatgaccagaaggccggcagccccagcagagatgtgggccccagcctgggcctgaagaagagcagcagcctggagagcctgcagacagctgtggccgaggtgaccctgaatggagacatccccttccaccggccccggccccgcatcatccggggccggggctgcaatgaaagcttccgggccgccatcgacaagagctatgacaagccagctgtggatgatgatgatgagggcatggagaccctggaggaggacacagaggagagcagccgcagcggccgggagagcgtgtccacagccagtgaccagcccagccacagcctggagcggcagatgaatggaaaccaggagaagggggacaagacagacaggaagaaggacaagacaggcaaggagaagaagaaggaccgggacaaggagaaggacaagatgaaggccaagaagggcatgctgaagggcctgggggacatgttccgctttgggaagcacaggaaggatgacaagattgagaagacaggcaagatcaagatccaggagagcttcaccagcgaggaggagcgcatccgcatgaagcaggagcaggagcgcatccaggccaagacccgggagttccgggagcggcaggcccgggagcgggactatgcagagatccaggacttccacaggaccttcggctgtgatgatgagctgatgtatggaggagtgtcctcctatgagggctccatggccctgaatgcccggccccagagcccccgggagggccacatgatggatgccctgtatgcccaggtgaagaagcccaggaacagcaagcccagccctgtggacagcaacagaagcacccccagcaaccacgaccgcatccagaggctgcggcaggagttccagcaggccaagcaggatgaagatgtggaggacagaagaaggacctacagctttgagcagccctggcccaatgcccggcctgccacccagagcggccgccacagcgtgtctgtggaggtgcagatgcagaggcagaggcaggaggagcgggagagcagccagcaggcccagaggcagtacagcagcctgccccggcagagcaggaagaatgccagctctgtgtcccaggacagctgggagcagaactacagccctggagagggcttccagagcgccaaggagaacccccgctacagcagctaccagggcagcagaaatggctacctgggcggccacggcttcaatgcccgggtgatgctggagacccaggagctgctgcggcaggagcagaggaggaaggagcagcagatgaagaagcagccccccagcgagggccccagcaactatgacagctacaagaaggtgcaggaccccagctatgccccacccaagggccccttccggcaggatgtgccccccagccccagccaggtggcccggctgaaccggctgcagaccccagagaagggccggcccttctacagctag

SEQ ID NO: 163265 - DNA, 3735 bp, synthetic construct
  misc_feature 1..3735: note = Description of Artificial Sequence: Synthetic coding sequence
  source 1..3735: mol_type = other DNA
atgaaggtgacagtgtgctttggaagaaccagggtggtggtgccctgtggagatggccacatgaaggtgttcagcctcatccagcaggccgtgacccgctacaggaaggccatcgccaaggaccccaactactggatccaggtgcaccggctggagcacggagatggcggcatcctggacctggatgacatcctgtgtgatgtggctgatgacaaggaccggctggtggccgtgtttgatgagcaggacccccaccacggcggagatggcaccagcgccagcagcacaggcacccagagccctgagatcttcggcagcgagctgggcaccaacaacgtgtctgccttccagccctaccaggccaccagcgagattgaggtgacccccagcgtgctgcgggccaacatgcccctgcacgtgagaagaagcagtgaccctgccctgattggcctgagcacctctgtgtctgacagcaacttcagcagcgaggagcccagcaggaagaaccccacccgctggagcaccacagctggcttcctgaagcagaacacagctggcagccccaagacctgtgacaggaaggatgaagatggaacagaggaggacaacagccgggtggagcctgtgggccacgccgacaccggcctggagcacatccccaacttcagcctggatgacatggtgaagctggtggaggtgcccaatgatggcggccccctgggcatccacgtggtgcccttcagcgcccggggcggccgcaccctgggcctgctggtgaagaggctggagaagggcggcaaggccgagcatgaaaatctcttccgggagaatgactgcatcgtgcgcatcaatgatggagacctgaggaacagaagatttgagcaggcccagcacatgttccggcaggccatgaggacccccatcatctggttccacgtggtgcctgctgccaacaaggagcagtatgagcagctgagccagagcgagaagaacaactactacagcagccgcttctccccagacagccagtacatcgacaacagatctgtgaacagcgctggcctgcacacagtgcagagggccccccggctgaaccaccccccagagcagattgacagccacagccggctgccccacagcgcccaccccagcggcaagcccccatctgccccagccagcgccccccagaatgtgttcagcaccaccgtgagcagcggctacaacaccaagaagattggcaagaggctgaacatccagctgaagaagggcacagagggcctgggcttcagcatcaccagcagagatgtgaccatcggcggcagcgcccccatctacgtgaagaacatcctgcccaggggggccgccatccaggacggccgcctgaaggccggggacaggctcatcgaggtgaatggagtggacctggtgggcaagagccaggaggaggtggtgtccctgctgcggagcaccaagatggagggcaccgtgtccctgctggtgttccggcaggaggatgccttccacccccgggagctgaaggcagaagatgaagatattgtgctgaccccagatggcacccgggagttcctgacctttgaggtgcccctgaatgattctggcagcgctggcctgggcgtgtctgtgaagggcaacagaagcaaagaaaatcatgctgacctgggcatctttgtgaagagcatcatcaatggaggagctgccagcaaggatggccgcctgcgggtgaatgaccagctgattgctgtgaatggagagagcctgctgggcaagaccaaccaggatgccatggagaccctgcggcgctccatgagcacagagggcaacaagaggggcatgatccagctgattgtggcccggcgcatcagcaaatgtaatgagctgaagagccctggcagccccccaggccctgagctgcccatcgagacagccctggatgaccgggagcggcgcatcagccacagcctgtacagcggcatcgagggcctggatgagagccccagcagaaatgctgccctgagccgcatcatgggcaagtaccagctgagccccaccgtgaacatgccccaggatgacaccgtcatcattgaagatgaccggctgcctgtgctgcccccccacctgagtgaccagagcagcagcagcagccatgatgatgtgggctttgtgacagcagatgctggcacctgggccaaggccgccatcagtgacagcgctgactgcagcctgagcccagatgtggaccctgtgctggccttccagcgggagggcttcggccggcagagcatgtctgagaagaggaccaagcagttcagtgatgccagccagctggactttgtgaagaccaggaagagcaagtccatggacctgggcagcagccccagcagagatgtgggccccagcctgggcctgaagaagagcagcagcctggagagcctgcagacagctgtggccgaggtgaccctgaatggagacatccccttccaccggccccggccccgcatcatccggggccggggctgcaatgaaagcttccgggccgccatcgacaagagctatgacaagccagctgtggatgatgatgatgagggcatggagaccctggaggaggacacagaggagagcagccgcagcggccgggagagcgtgtccacagccagtgaccagcccagccacagcctggagcggcagatgaatggaaaccaggagaagggggacaagacagacaggaagaaggacaagacaggcaaggagaagaagaaggaccgggacaaggagaaggacaagatgaaggccaagaagggcatgctgaagggcctgggggacatgttccgcatccaggccaagacccgggagttccgggagcggcaggcccgggagcgggactatgcagagatccaggacttccacaggaccttcggctgtgatgatgagctgatgtatggaggagtgtcctcctatgagggctccatggccctgaatgcccggccccagagcccccgggagggccacatgatggatgccctgtatgcccaggtgaagaagcccaggaacagcaagcccagccctgtggacagcaacagaagcacccccagcaaccacgaccgcatccagaggctgcggcaggagttccagcaggccaagcaggatgaagatgtggaggacagaagaaggacctacagctttgagcagccctggcccaatgcccggcctgccacccagagcggccgccacagcgtgtctgtggaggtgcagatgcagaggcagaggcaggaggagcgggagagcagccagcaggcccagaggcagtacagcagcctgccccggcagagcaggaagaatgccagctctgtgtcccaggacagctgggagcagaactacagccctggagagggcttccagagcgccaaggagaacccccgctacagcagctaccagggcagcagaaatggctacctgggcggccacggcttcaatgcccgggtgatgctggagacccaggagctgctgcggcaggagcagaggaggaaggagcagcagatgaagaagcagccccccagcgagggccccagcaactatgacagctacaagaaggtgcaggaccccagctatgccccacccaagggccccttccggcaggatgtgccccccagccccagccaggtggcccggctgaaccggctgcagaccccagagaagggccggcccttctacagctag

SEQ ID NO: 163266 - DNA, 2244 bp, synthetic construct
  misc_feature 1..2244: note = Description of Artificial Sequence: Synthetic coding sequence
  source 1..2244: mol_type = other DNA
atggtgaagctggtggaggtgcccaatgatggcggccccctgggcatccacgtggtgcccttcagcgcccggggcggccgcaccctgggcctgctggtgaagaggctggagaagggcggcaaggccgagcatgaaaatctcttccgggagaatgactgcatcgtgcgcatcaatgatggagacctgaggaacagaagatttgagcaggcccagcacatgttccggcaggccatgaggacccccatcatctggttccacgtggtgcctgctgccaacaaggagcagtatgagcagctgagccagagcgagaagaacaactactacagcagccgcttctccccagacagccagtacatcgacaacagatctgtgaacagcgctggcctgcacacagtgcagagggccccccggctgaaccaccccccagagcagattgacagccacagccggctgccccacagcgcccaccccagcggcaagcccccatctgccccagccagcgccccccagaatgtgttcagcaccaccgtgagcagcggctacaacaccaagaagattggcaagaggctgaacatccagctgaagaagggcacagagggcctgggcttcagcatcaccagcagagatgtgaccatcggcggcagcgcccccatctacgtgaagaacatcctgcccaggggggccgccatccaggacggccgcctgaaggccggggacaggctcatcgaggtgaatggagtggacctggtgggcaagagccaggaggaggtggtgtccctgctgcggagcaccaagatggagggcaccgtgtccctgctggtgttccggcaggaggatgccttccacccccgggagctgaaggcagaagatgaagatattgtgctgaccccagatggcacccgggagttcctgacctttgaggtgcccctgaatgattctggcagcgctggcctgggcgtgtctgtgaagggcaacagaagcaaagaaaatcatgctgacctgggcatctttgtgaagagcatcatcaatggaggagctgccagcaaggatggccgcctgcgggtgaatgaccagctgattgctgtgaatggagagagcctgctgggcaagaccaaccaggatgccatggagaccctgcggcgctccatgagcacagagggcaacaagaggggcatgatccagctgattgtggcccggcgcatcagcaaatgtaatgagctgaagagccctggcagccccccaggccctgagctgcccatcgagacagccctggatgaccgggagcggcgcatcagccacagcctgtacagcggcatcgagggcctggatgagagccccagcagaaatgctgccctgagccgcatcatgggcaagtaccagctgagccccaccgtgaacatgccccaggatgacaccgtcatcattgaagatgaccggctgcctgtgctgcccccccacctgagtgaccagagcagcagcagcagccatgatgatgtgggctttgtgacagcagatgctggcacctgggccaaggccgccatcagtgacagcgctgactgcagcctgagcccagatgtggaccctgtgctggccttccagcgggagggcttcggccggcagagcatgtctgagaagaggaccaagcagttcagtgatgccagccagctggactttgtgaagaccaggaagagcaagtccatggacctggtggctgatgagaccaagctgaacacagtggatgaccagaaggccggcagccccagcagagatgtgggccccagcctgggcctgaagaagagcagcagcctggagagcctgcagacagctgtggccgaggtgaccctgaatggagacatccccttccaccggccccggccccgcatcatccggggccggggctgcaatgaaagcttccgggccgccatcgacaagagctatgacaagccagctgtggatgatgatgatgagggcatggagaccctggaggaggacacagaggagagcagccgcagcggccgggagagcgtgtccacagccagtgaccagcccagccacagcctggagcggcagatgaatggaaaccaggagaagggggacaagacagacaggaagaaggacaagacaggcaaggagaagaagaaggaccgggacaaggagaaggacaagatgaaggccaagaagggcatgctgaagggcctgggggacatgttcagcctggccaagctgaagccagagaagaggtag

SEQ ID NO: 163267 - DNA, 3801 bp, synthetic construct
  misc_feature 1..3801: note = Description of Artificial Sequence: Synthetic coding sequence
  source 1..3801: mol_type = other DNA
atgaaggtgacagtgtgctttggaagaaccagggtggtggtgccctgtggagatggccacatgaaggtgttcagcctcatccagcaggccgtgacccgctacaggaaggccatcgccaaggaccccaactactggatccaggtgcaccggctggagcacggagatggcggcatcctggacctggatgacatcctgtgtgatgtggctgatgacaaggaccggctggtggccgtgtttgatgagcaggacccccaccacggcggagatggcaccagcgccagcagcacaggcacccagagccctgagatcttcggcagcgagctgggcaccaacaacgtgtctgccttccagccctaccaggccaccagcgagattgaggtgacccccagcgtgctgcgggccaacatgcccctgcacgtgagaagaagcagtgaccctgccctgattggcctgagcacctctgtgtctgacagcaacttcagcagcgaggagcccagcaggaagaaccccacccgctggagcaccacagctggcttcctgaagcagaacacagctggcagccccaagacctgtgacaggaaggatgaagatggaacagaggaggacaacagccgggtggagcctgtgggccacgccgacaccggcctggagcacatccccaacttcagcctggatgacatggtgaagctggtggaggtgcccaatgatggcggccccctgggcatccacgtggtgcccttcagcgcccggggcggccgcaccctgggcctgctggtgaagaggctggagaagggcggcaaggccgagcatgaaaatctcttccgggagaatgactgcatcgtgcgcatcaatgatggagacctgaggaacagaagatttgagcaggcccagcacatgttccggcaggccatgaggacccccatcatctggttccacgtggtgcctgctgccaacaaggagcagtatgagcagctgagccagagcgagaagaacaactactacagcagccgcttctccccagacagccagtacatcgacaacagatctgtgaacagcgctggcctgcacacagtgcagagggccccccggctgaaccaccccccagagcagattgacagccacagccggctgccccacagcgcccaccccagcggcaagcccccatctgccccagccagcgccccccagaatgtgttcagcaccaccgtgagcagcggctacaacaccaagaagattggcaagaggctgaacatccagctgaagaagggcacagagggcctgggcttcagcatcaccagcagagatgtgaccatcggcggcagcgcccccatctacgtgaagaacatcctgcccaggggggccgccatccaggacggccgcctgaaggccggggacaggctcatcgaggtgaatggagtggacctggtgggcaagagccaggaggaggtggtgtccctgctgcggagcaccaagatggagggcaccgtgtccctgctggtgttccggcaggaggatgccttccacccccgggagctgaaggcagaagatgaagatattgtgctgaccccagatggcacccgggagttcctgacctttgaggtgcccctgaatgattctggcagcgctggcctgggcgtgtctgtgaagggcaacagaagcaaagaaaatcatgctgacctgggcatctttgtgaagagcatcatcaatggaggagctgccagcaaggatggccgcctgcgggtgaatgaccagctgattgctgtgaatggagagagcctgctgggcaagaccaaccaggatgccatggagaccctgcggcgctccatgagcacagagggcaacaagaggggcatgatccagctgattgtggcccggcgcatcagcaaatgtaatgagctgaagagccctggcagccccccaggccctgagctgcccatcgagacagccctggatgaccgggagcggcgcatcagccacagcctgtacagcggcatcgagggcctggatgagagccccagcagaaatgctgccctgagccgcatcatgggcaagtaccagctgagccccaccgtgaacatgccccaggatgacaccgtcatcattgaagatgaccggctgcctgtgctgcccccccacctgagtgaccagagcagcagcagcagccatgatgatgtgggctttgtgacagcagatgctggcacctgggccaaggccgccatcagtgacagcgctgactgcagcctgagcccagatgtggaccctgtgctggccttccagcgggagggcttcggccggcagattgctgatgagaccaagctgaacacagtggatgaccagaaggccggcagccccagcagagatgtgggccccagcctgggcctgaagaagagcagcagcctggagagcctgcagacagctgtggccgaggtgaccctgaatggagacatccccttccaccggccccggccccgcatcatccggggccggggctgcaatgaaagcttccgggccgccatcgacaagagctatgacaagccagctgtggatgatgatgatgagggcatggagaccctggaggaggacacagaggagagcagccgcagcggccgggagagcgtgtccacagccagtgaccagcccagccacagcctggagcggcagatgaatggaaaccaggagaagggggacaagacagacaggaagaaggacaagacaggcaaggagaagaagaaggaccgggacaaggagaaggacaagatgaaggccaagaagggcatgctgaagggcctgggggacatgttccgctttgggaagcacaggaaggatgacaagattgagaagacaggcaagatcaagatccaggagagcttcaccagcgaggaggagcgcatccgcatgaagcaggagcaggagcgcatccaggccaagacccgggagttccgggagcggcaggcccgggagcgggactatgcagagatccaggacttccacaggaccttcggctgtgatgatgagctgatgtatggaggagtgtcctcctatgagggctccatggccctgaatgcccggccccagagcccccgggagggccacatgatggatgccctgtatgcccaggtgaagaagcccaggaacagcaagcccagccctgtggacagcaacagaagcacccccagcaaccacgaccgcatccagaggctgcggcaggagttccagcaggccaagcaggatgaagatgtggaggacagaagaaggacctacagctttgagcagccctggcccaatgcccggcctgccacccagagcggccgccacagcgtgtctgtggaggtgcagatgcagaggcagaggcaggaggagcgggagagcagccagcaggcccagaggcagtacagcagcctgccccggcagagcaggaagaatgccagctctgtgtcccaggacagctgggagcagaactacagccctggagagggcttccagagcgccaaggagaacccccgctacagcagctaccagggcagcagaaatggctacctgggcggccacggcttcaatgcccgggtgatgctggagacccaggagctgctgcggcaggagcagaggaggaaggagcagcagatgaagaagcagccccccagcgagggccccagcaactatgacagctacaagaaggtgcaggaccccagctatgccccacccaagggccccttccggcaggatgtgccccccagccccagccaggtggcccggctgaaccggctgcagaccccagagaagggccggcccttctacagctag

SEQ ID NO: 163268 - DNA, 4023 bp, synthetic construct
  misc_feature 1..4023: note = Description of Artificial Sequence: Synthetic coding sequence
  source 1..4023: mol_type = other DNA
atgaaggtgacagtgtgctttggaagaaccagggtggtggtgccctgtggagatggccacatgaaggtgttcagcctcatccagcaggccgtgacccgctacaggaaggccatcgccaaggaccccaactactggatccaggtgcaccggctggagcacggagatggcggcatcctggacctggatgacatcctgtgtgatgtggctgatgacaaggaccggctggtggccgtgtttgatgagcaggacccccaccacggcggagatggcaccagcgccagcagcacaggcacccagagccctgagatcttcggcagcgagctgggcaccaacaacgtgtctgccttccagccctaccaggccaccagcgagattgaggtgacccccagcgtgctgcgggccaacatgcccctgcacgtgagaagaagcagtgaccctgccctgattggcctgagcacctctgtgtctgacagcaacttcagcagcgaggagcccagcaggaagaaccccacccgctggagcaccacagctggcttcctgaagcagaacacagctggcagccccaagacctgtgacaggaagaaggatgagaactaccgcagcctgccccgggacaccagcaactggagcaaccagttccagagggacaatgcccggagcagcctgagcgccagccaccccatggtgggcaagtggctggagaagcaggagcaggatgaagatggaacagaggaggacaacagccgggtggagcctgtgggccacgccgacaccggcctggagcacatccccaacttcagcctggatgacatggtgaagctggtggaggtgcccaatgatggcggccccctgggcatccacgtggtgcccttcagcgcccggggcggccgcaccctgggcctgctggtgaagaggctggagaagggcggcaaggccgagcatgaaaatctcttccgggagaatgactgcatcgtgcgcatcaatgatggagacctgaggaacagaagatttgagcaggcccagcacatgttccggcaggccatgaggacccccatcatctggttccacgtggtgcctgctgccaacaaggagcagtatgagcagctgagccagagcgagaagaacaactactacagcagccgcttctccccagacagccagtacatcgacaacagatctgtgaacagcgctggcctgcacacagtgcagagggccccccggctgaaccaccccccagagcagattgacagccacagccggctgccccacagcgcccaccccagcggcaagcccccatctgccccagccagcgccccccagaatgtgttcagcaccaccgtgagcagcggctacaacaccaagaagattggcaagaggctgaacatccagctgaagaagggcacagagggcctgggcttcagcatcaccagcagagatgtgaccatcggcggcagcgcccccatctacgtgaagaacatcctgcccaggggggccgccatccaggacggccgcctgaaggccggggacaggctcatcgaggtgaatggagtggacctggtgggcaagagccaggaggaggtggtgtccctgctgcggagcaccaagatggagggcaccgtgtccctgctggtgttccggcaggaggatgccttccacccccgggagctgaaggcagaagatgaagatattgtgctgaccccagatggcacccgggagttcctgacctttgaggtgcccctgaatgattctggcagcgctggcctgggcgtgtctgtgaagggcaacagaagcaaagaaaatcatgctgacctgggcatctttgtgaagagcatcatcaatggaggagctgccagcaaggatggccgcctgcgggtgaatgaccagctgattgctgtgaatggagagagcctgctgggcaagaccaaccaggatgccatggagaccctgcggcgctccatgagcacagagggcaacaagaggggcatgatccagctgattgtggcccggcgcatcagcaaatgtaatgagctgaagagccctggcagccccccaggccctgagctgcccatcgagacagccctggatgaccgggagcggcgcatcagccacagcctgtacagcggcatcgagggcctggatgagagccccagcagaaatgctgccctgagccgcatcatgggcaagtaccagctgagccccaccgtgaacatgccccaggatgacaccgtcatcattgaagatgaccggctgcctgtgctgcccccccacctgagtgaccagagcagcagcagcagccatgatgatgtgggctttgtgacagcagatgctggcacctgggccaaggccgccatcagtgacagcgctgactgcagcctgagcccagatgtggaccctgtgctggccttccagcgggagggcttcggccggcagagcatgtctgagaagaggaccaagcagttcagtgatgccagccagctggactttgtgaagaccaggaagagcaagtccatggacctgggcattgctgatgagaccaagctgaacacagtggatgaccagaaggccggcagccccagcagagatgtgggccccagcctgggcctgaagaagagcagcagcctggagagcctgcagacagctgtggccgaggtgaccctgaatggagacatccccttccaccggccccggccccgcatcatccggggccggggctgcaatgaaagcttccgggccgccatcgacaagagctatgacaagccagctgtggatgatgatgatgagggcatggagaccctggaggaggacacagaggagagcagccgcagcggccgggagagcgtgtccacagccagtgaccagcccagccacagcctggagcggcagatgaatggaaaccaggagaagggggacaagacagacaggaagaaggacaagacaggcaaggagaagaagaaggaccgggacaaggagaaggacaagatgaaggccaagaagggcatgctgaagggcctgggggacatgttccgctttgggaagcacaggaaggatgacaagattgagaagacaggcaagatcaagatccaggagagcttcaccagcgaggaggagcgcatccgcatgaagcaggagcaggagcgcatccaggccaagacccgggagttccgggagcggcaggcccgggagcgggactatgcagagatccaggacttccacaggaccttcggctgtgatgatgagctgatgtatggaggagtgtcctcctatgagggctccatggccctgaatgcccggccccagagcccccgggagggccacatgatggatgccctgtatgcccaggtgaagaagcccaggaacagcaagcccagccctgtggacagcaacagaagcacccccagcaaccacgaccgcatccagaggctgcggcaggagttccagcaggccaagcaggatgaagatgtggaggacagaagaaggacctacagctttgagcagccctggcccaatgcccggcctgccacccagagcggccgccacagcgtgtctgtggaggtgcagatgcagaggcagaggcaggaggagcgggagagcagccagcaggcccagaggcagtacagcagcctgccccggcagagcaggaagaatgccagctctgtgtcccaggacagctgggagcagaactacagccctggagagggcttccagagcgccaaggagaacccccgctacagcagctaccagggcagcagaaatggctacctgggcggccacggcttcaatgcccgggtgatgctggagacccaggagctgctgcggcaggagcagaggaggaaggagcagcagatgaagaagcagccccccagcgagggccccagcaactatgacagctacaagaaggtgcaggaccccagctatgccccacccaagggccccttccggcaggatgtgccccccagccccagccaggtggcccggctgaaccggctgcagaccccagagaagggccggcccttctacagctag

SEQ ID NO: 163269 - DNA, 1119 bp, synthetic construct
  misc_feature 1..1119: note = Description of Artificial Sequence: Synthetic coding sequence
  source 1..1119: mol_type = other DNA
atgaacagaagccacagacatggagctggcagcggctgcctgggcaccatggaggtgaagagcaagtttggagctgagttccgccgcttcagcctggagaggagcaagccaggcaagtttgaggagttctacggcctgctgcagcacgtgcacaagatccccaacgtggatgtgctggtgggctatgctgacatccacggggacctgctgcccatcaacaatgatgacaactaccacaaggctgtgtccacagccaaccccctgctgcgcatcttcatccagaagaaggaggaggccgactacagcgccttcggcacagacaccctcatcaagaagaagaatgtgctgaccaacgtgctgcggccagacaaccacaggaagaagccccacatcgtcatctccatgccccaggacttccggcctgtgagcagcatcattgatgtggacatcctgcctgagacccaccggcgggtgcggctgtacaagtatggaacagagaagcccctgggcttctacatcagagatggcagctctgtgcgggtgaccccccacggcctggagaaggtgcccggcatcttcatcagccggctggtgcctgggggcctggcccagagcacaggcctgctggccgtgaatgatgaggtgctggaggtgaatggaattgaggtgtctgggaagagcctggaccaggtgacagacatgatgattgccaacagcaggaacctgatcatcaccgtgcggcctgccaaccagaggaacaacgtggtgaggaacagcaggaccagcggcagcagcggccagagcacagacaacagcctgctgggctacccccagcagatcgagcccagctttgagccagaagatgaagattctgaagaagatgacatcatcattgaagataatggagtgccccagcagatccccaaggctgtgcccaacacagagagcctggagagcctgacccagatcgagctgagctttgaaagtggccagaatggcttcatccccagcaatgaggtgtccctggccgccatcgccagcagcagcaacacagaatttgagacccacgccccagaccagaagctgctggaggaggatggcaccatcatcaccctgtag

SEQ ID NO: 163270 - DNA, 1131 bp, synthetic construct
  misc_feature 1..1131: note = Description of Artificial Sequence: Synthetic coding sequence
  source 1..1131: mol_type = other DNA
atgaacagaagcttccacaagagccagaccctgcgcttctatgactgcagcgctgtggaggtgaagagcaagtttggagctgagttccgccgcttcagcctggacagacacaagccaggcaagtttgaggacttctacaagctggtggtgcacacccaccacatcagcaacagtgatgtgaccatcggctatgcagatgtgcacggggacctgctgcccatcaacaatgatgacaacttctgcaaggctgtgagcagcgccaaccccctgctgcgggtcttcatccagaagcgggaggaggccgagcggggcagcctgggcgccggcagcctgtgcagaagaagaagagccctgggcgccctgagagatgagggcccccggcggcgggcccacctggacatcggcctgccccgggacttccggcctgtgagcagcatcattgatgtggacctggtgcctgagacccacagaagagtgcggctgcaccgccacggctgtgagaagcccctgggcttctacatcagagatggagcctctgtgcgggtgacccctcatggcctggagaaggtgcccggcatcttcatcagcaggatggtgcctgggggcctggccgagagcacaggcctgctggccgtgaatgatgaggtgctggaggtgaatggcatcgaggtggccggcaagaccctggaccaggtgacagacatgatgattgccaacagccacaacctgattgtgacagtgaagccagccaaccagagaaataatgtggtgcggggcggccgggccctgggcagcagcggccccccatctgatggaacagctggctttgtgggccccccagccccccgggtgctgcagaacttccacccagatgaagctgagagtgatgaagataatgatgtggtgattgagggcaccctggagcccgcccggcccccccagacccctggggccccagctggcagcctgagccgggtgaatggagctggcctggcccagaggctgcagagggacctggccctggatggcggcctgcagaggctgctgagcagcctgcgggctgaccccaggcacagcctggccctgcccccaggcggcgtggaggagcacggccctgctgtgaccctgtag

SEQ ID NO: 163271 - DNA, 1236 bp, synthetic construct
  misc_feature 1..1236: note = Description of Artificial Sequence: Synthetic coding sequence
  source 1..1236: mol_type = other DNA
atggccgaggccgagctgcacaaggagcggctgcaggccatcgccgagaagaggaagaggcagacagaaattgagggcaagaggcagcagctggatgagcagatcctgctgctgcagcacagcaagagcaaggtgctgcgggagaagtggctgctgcagggcatcccagctggaacagctgaggaggaggaggcccggcggcggcagagcgaggaggatgagttccgggtgaagcagctggaggacaacatccagaggctggagcaggagatccagaccctggagagcgaggagagccagatcagcgccaaggagcagatcatcctggagaagctgaaggagacagagaagagcttcaaggacttccagaagggcttcagcagcacagatggagatgctgtgaactacatcagcagccagctgcctgacctgcccatcctgtgcagcaggacagctgagcccagccctggccaggacggcaccagcagagctgctgctgtgtatgccatggagatcaacgtggagaaggacaagcagacaggagagaccaagatcctgagcaccagcaccatcggccctgagggcgtgcaccagaagggcgtgaaggtgtatgatgatggcaccaaggtggtgtatgaggtgcgcagcggcggcaccgtggtggagaatggagtgcacaagctgagcaccaaggatgtggaggagctgatccagaaggccggccagagcagcctgggcggcggccacgtgtctgagaggacagtgattgctgatggcagcctgagccaccccaaggagcacatgctgtgcaaggaggccaagctggagatggtgcacaagagcaggaaggaccacagcagcggcaaccctggccagcaggcccaggcccccagcgctgctggccctgaggccaacctggaccagcctgtgaccatgatcttcatgggctaccagaacattgaagatgaggaggagaccaagaaggtgctgggctatgatgagaccatcaaggccgagctggtgctgattgatgaagatgatgagaagagcctgcgggagaagacagtgacagatgtgtccaccattgatggaaatgctgctgagctggtgtctggccggcctgtgtctgacaccacagagcccagcagccctgagggcaaggaggagagcctggccacagagcccgcccctggcacccagaagaagaagcgctgccagtgctgcgtggtgatgtag

SEQ ID NO: 163272 - DNA, 1140 bp, synthetic construct
  misc_feature 1..1140: note = Description of Artificial Sequence: Synthetic coding sequence
  source 1..1140: mol_type = other DNA
atggagatggccgaggccgagctgcacaaggagcggctgcaggccatcgccgagaagaggaagaggcagacagaaattgagggcaagaggcagcagctggatgagcagatcctgctgctgcagcacagcaagagcaaggtgctgcgggagaagtggctgctgcagggcatcccagctggaacagctgaggaggaggaggcccggcggcggcagagcgaggaggatgagttccgggtgaagcagctggaggacaacatccagaggctggagcaggagatccagaccctggagagcgaggagagccagatcagcgccaaggagcagatcatcctggagaagctgaaggagacagagaagagcttcaaggacttccagaagggcttcagcagcacagatggagctgtgtatgccatggagatcaacgtggagaaggacaagcagacaggagagaccaagatcctgagcaccagcaccatcggccctgagggcgtgcaccagaagggcgtgaaggtgtatgatgatggcaccaaggtggtgtatgaggtgcgcagcggcggcaccgtggtggagaatggagtgcacaagctgagcaccaaggatgtggaggagctgatccagaaggccggccagagcagcctgggcggcggccacgtgtctgagaggacagtgattgctgatggcagcctgagccaccccaaggagcacatgctgtgcaaggaggccaagctggagatggtgcacaagagcaggaaggaccacagcagcggcaaccctggccagcaggcccaggcccccagcgctgctggccctgaggccaacctggaccagcctgtgaccatgatcttcatgggctaccagaacattgaagatgaggaggagaccaagaaggtgctgggctatgatgagaccatcaaggccgagctggtgctgattgatgaagatgatgagaagagcctgcgggagaagacagtgacagatgtgtccaccattgatggaaatgctgctgagctggtgtctggccggcctgtgtctgacaccacagagcccagcagccctgagggcaaggaggagagcctggccacagagcccgcccctggcacccagaagaagaagcgctgccagtgctgcgtggtgatgtag

SEQ ID NO: 163273 - DNA, 1242 bp, synthetic construct
  misc_feature 1..1242: note = Description of Artificial Sequence: Synthetic coding sequence
  source 1..1242: mol_type = other DNA
atggagatggccgaggccgagctgcacaaggagcggctgcaggccatcgccgagaagaggaagaggcagacagaaattgagggcaagaggcagcagctggatgagcagatcctgctgctgcagcacagcaagagcaaggtgctgcgggagaagtggctgctgcagggcatcccagctggaacagctgaggaggaggaggcccggcggcggcagagcgaggaggatgagttccgggtgaagcagctggaggacaacatccagaggctggagcaggagatccagaccctggagagcgaggagagccagatcagcgccaaggagcagatcatcctggagaagctgaaggagacagagaagagcttcaaggacttccagaagggcttcagcagcacagatggagatgctgtgaactacatcagcagccagctgcctgacctgcccatcctgtgcagcaggacagctgagcccagccctggccaggacggcaccagcagagctgctgctgtgtatgccatggagatcaacgtggagaaggacaagcagacaggagagaccaagatcctgagcaccagcaccatcggccctgagggcgtgcaccagaagggcgtgaaggtgtatgatgatggcaccaaggtggtgtatgaggtgcgcagcggcggcaccgtggtggagaatggagtgcacaagctgagcaccaaggatgtggaggagctgatccagaaggccggccagagcagcctgggcggcggccacgtgtctgagaggacagtgattgctgatggcagcctgagccaccccaaggagcacatgctgtgcaaggaggccaagctggagatggtgcacaagagcaggaaggaccacagcagcggcaaccctggccagcaggcccaggcccccagcgctgctggccctgaggccaacctggaccagcctgtgaccatgatcttcatgggctaccagaacattgaagatgaggaggagaccaagaaggtgctgggctatgatgagaccatcaaggccgagctggtgctgattgatgaagatgatgagaagagcctgcgggagaagacagtgacagatgtgtccaccattgatggaaatgctgctgagctggtgtctggccggcctgtgtctgacaccacagagcccagcagccctgagggcaaggaggagagcctggccacagagcccgcccctggcacccagaagaagaagcgctgccagtgctgcgtggtgatgtag

SEQ ID NO: 163274 - DNA, 1167 bp, synthetic construct
  misc_feature 1..1167: note = Description of Artificial Sequence: Synthetic coding sequence
  source 1..1167: mol_type = other DNA
atgggccgggcccggcgcttccagtggcccctgctgctgctgtgggccgctgctgctggccctggagctggccaggaggtgcagacagaaaatgtgacagtggccgagggcggcgtggccgagatcacctgccgcctgcaccagtatgatggcagcatcgtggtgatccagaacccagcccggcagaccctcttcttcaacggcacccgggccctgaaggatgagcgcttccagctggaggagttcagccccaggagagtgcgcatccggctgagtgatgcccggctggaggatgagggcggctacttctgccagctgtacacagaggacacccaccaccagatcgccaccctgactgtgctggtggccccagaaaatcctgtggtggaggtgcgggagcaggccgtggagggcggggaggtggagctgagctgcctggtgcccaggagcaggcctgctgccaccctgcgctggtacagagacaggaaggagctgaagggcgtgagcagcagccaggagaatggcaaggtgtggagcgtggccagcacagtgcgcttccgggtggacaggaaggatgatggcggcatcatcatctgtgaggcccagaaccaggccctgcccagcggccacagcaagcagacccagtatgtgctggatgtgcagtacagccccacagcccgcatccacgccagccaggccgtggtgcgggagggggacaccctggtgctgacctgtgctgtgacaggcaacccccggcccaaccagatccgctggaacagaggaaatgaaagcctgcctgagagagctgaggccgtgggggagaccctgaccctgcccggcctggtgtctgctgacaatggcacctacacctgtgaggccagcaacaagcacggccacgcccgggccctgtatgtgctggtggtgtatgaccctggagctgtggtggaggcccagacctctgtgccctatgccatcgtgggcggcatcctggccctgctggtgttcctgatcatctgtgtgctggtgggcatggtgtggtgcagcgtgcggcagaagggcagctacctgacccatgaggccagcggcctggatgagcagggcgaggcccgggaggccttcctgaatggaagtgatggccacaagaggaaggaggagttcttcatctag

SEQ ID NO: 163275 - DNA, 1068 bp, synthetic construct
  misc_feature 1..1068: note = Description of Artificial Sequence: Synthetic coding sequence
  source 1..1068: mol_type = other DNA
atgggcaagctggtggccctggtgctgctgggcgtgggcctgagcctggtgggggagatgttcctggccttccgggagcgggtgaatgccagccgggaggtggagcctgtggagcctgagaactgccacctgattgaggagctggagaccggcagcgaggacctggagatcctgcccaacggcctggccttcatcagcagcggcctgaagtacccaggcatcaagagcttcaaccccaacagccctgggaagatcctgctgatggacctgaatgaggaggaccccaccgtgctggagctgggcatcaccggcagcaagtttgatgtgtcctccttcaacccccacggcatcagcaccttcacagatgaagataatgccatgtacctgctggtggtgaaccacccagatgccaagagcacagtggagctgttcaagttccaggaggaggagaagagcctgctgcacctgaagaccatccgccacaagctgctgcccaacctgaatgacatcgtggccgtgggccctgagcacttctacggcaccaatgaccactacttcctggacccctacctgcagagctgggagatgtacctgggcctggcctggagctatgtggtgtactacagccccagcgaggtgcgggtggtggccgagggctttgattttgccaacggcatcaacatcagcccagatggcaagtatgtgtacatcgccgagctgctggcccacaagatccacgtgtatgagaagcacgccaactggaccctgacccccctgaagagcctggacttcaacaccctggtggacaacatctctgtggaccctgagactggagacctgtgggtgggctgccaccccaacggcatgaagatcttcttctatgacagtgaaaatcctccagccagcgaggtgctgcgcatccagaacatcctgacagaggagcccaaggtgacccaggtgtatgcagaaaatggcaccgtgctgcagggcagcacagtggcctctgtgtacaagggcaagctgctgattggaacagtgttccacaaggccctgtactgtgagctgtag

SEQ ID NO: 163276 - DNA, 1017 bp, synthetic construct
  misc_feature 1..1017: note = Description of Artificial Sequence: Synthetic coding sequence
  source 1..1017: mol_type = other DNA
atggctgctggctgcagcgaggcccccaggcctgctgctgccagtgatggcagcctggtgggccaggccggcgtgctgccctgcctggagctgcccacctatgctgctgcctgtgccctggtgaacagccgctacagctgcctggtggccggcccccaccagaggcacatcgccctgagcccccgctacctgaacaggaagaggacaggcatccgggagcagctggatgctgagctgctgcgctacagcgagagcctgctgggcgtgcccatcgcctatgacaacatcaaggtggtgggggagctgggggacatctatgatgaccagggccacatccacctgaacatcgaggccgactttgtgatcttctgcccagagcccggccagaagctgatgggcatcgtgaacaaggtgagcagcagccacatcggctgcctggtgcacggctgcttcaatgccagcatccccaagccagagcagctgtctgctgagcagtggcagaccatggagatcaacatgggagatgagctggagtttgaggtgttccggctggacagtgatgctgctggggtcttctgcatccggggcaagctgaacatcaccagcctgcagttcaagaggtctgaggtgtctgaggaggtgacagaaaatggaacagaggaggccgccaagaagcccaagaagaagaagaagaagaaggaccctgagacctatgaggtggacagcggcaccaccaagctggctgatgatgctgatgacacccccatggaggagagcgccctgcagaacaccaacaatgccaacggcatctgggaggaggagcccaagaagaagaagaagaagaagaagcaccaggaggtgcaggaccaggaccccgtcttccagggcagtgacagcagcggctaccagagcgaccacaagaagaagaagaagaagaggaagcacagcgaggaggccgagttcaccccacccctgaagtgcagccccaagaggaagggcaagagcaacttcctgtag

SEQ ID NO: 163277 - DNA, 1059 bp, synthetic construct
  misc_feature 1..1059: note = Description of Artificial Sequence: Synthetic coding sequence
  source 1..1059: mol_type = other DNA
ggggctgctgggggctgcggcctggccggggacagagctggcctgggggagcggctgctggccctgaggaaccggctgaaggccagccgggaggtggagagcgtggacctgccccactgccacctgatcaagggcatcgaggccggctctgaagatattgacatcctgcccaacggcctggccttcttctctgtgggcctgaagtttcctggcctgcacagctttgccccagacaagccaggcggcatcctgatgatggacctgaaggaggagaagccccgggcccgggagctgcgcatcagccggggctttgacctggccagcttcaacccccacggcatcagcaccttcatcgacaatgatgacacagtgtacctgtttgtggtgaaccaccctgagttcaagaacacagtggagatcttcaagtttgaggaggccgagaacagcctgctgcacctgaagacagtgaagcatgagctgctgcccagcgtgaatgacatcacagctgtgggccctgcccacttctacgccaccaatgaccactacttcagtgaccccttcctgaagtacctggagacctacctgaacctgcactgggccaacgtggtgtactacagccccaatgaggtgaaggtggtggccgagggctttgattctgccaacggcatcaacatcagcccagatgacaagtacatctacgtggccgacatcctggcccacgagatccacgtgctggagaagcacaccaacatgaacctgacccagctgaaggtgctggagctggacaccctggtggacaacctgagcattgaccccagcagcggggacatctgggtgggctgccaccccaacggccagaagctgtttgtgtatgaccccaacaacccccccagcagcgaggtgctgcgcatccagaacatcctgtctgagaagcccaccgtgaccaccgtgtatgccaacaatggatctgtgctgcagggcagctctgtggcctctgtgtatgatggcaagctgctgattggcaccctgtaccaccgggccctgtactgtgagctgtag

SEQ ID NO: 163278 - DNA, 1128 bp, synthetic construct
  misc_feature 1..1128: note = Description of Artificial Sequence: Synthetic coding sequence
  source 1..1128: mol_type = other DNA
atggccccacccacagagctgctggcccggcctgagcggggcagcgcccctggcagccgggccatgggccgcctggtggccgtgggcctgctgggcatcgccctggccctgctgggggagcggctgctggccctgaggaaccggctgaaggccagccgggaggtggagagcgtggacctgccccactgccacctgatcaagggcattgaagctggcagcgaggacatcgacatcctgcccaacggcctggccttcttctctgtgggcctgaagtttcctggcctgcacagctttgccccagacaagccaggcggcatcctgatgatggacctgaaggaggagaagccccgggcccgggagctgcgcatcagccggggctttgacctggccagcttcaacccccacggcatcagcaccttcatcgacaatgatgacacagtgtacctgtttgtggtgaaccaccctgagttcaagaacacagtggagatcttcaagtttgaggaggccgagaacagcctgctgcacctgaagacagtgaagcatgagctgctgcccagcgtgaatgacatcacagctgtgggccctgcccacttctacgccaccaatgaccactacttcagtgaccccttcctgaagtacctggagacctacctgaacctgcactgggccaacgtggtgtactacagccccaatgaggtgaaggtggtggccgagggctttgacagcgccaacggcatcaacatcagcccagatgacaagtacatctacgtggccgacatcctggcccacgagatccacgtgctggagaagcacaccaacatgaacctgacccagctgaaggtgctggagctggacaccctggtggacaacctgagcattgaccccagcagcggggacatctgggtgggctgccaccccaacggccagaagctgtttgtgtatgaccccaacaacccccccagcagcgaggtgctgcgcatccagaacatcctgtctgagaagcccaccgtgaccaccgtgtatgccaacaacggctctgtgctgcagggcagctctgtggcctctgtgtatgatggcaagctgctgattggcaccctgtaccaccgggccctgtactgtgagctgtag

SEQ ID NO: 163279 - DNA, 1029 bp, synthetic construct
  misc_feature 1..1029: note = Description of Artificial Sequence: Synthetic coding sequence
  source 1..1029: mol_type = other DNA
atgggccgcctggtggccgtgggcctgctgggcatcgccctggccctgctgggggagcggctgctggccctgaggaaccggctgaaggccagccgggaggtggagagcgtggacctgccccactgccacctgatcaagggcatcgaggccggctctgaagatattgacatcctgcccaacggcctggccttcttctctgtgggcctgaagtttcctggcctgcacagctttgccccagacaagccaggcggcatcctgatgatggacctgaaggaggagaagccccgggcccgggagctgcgcatcagccggggctttgacctggccagcttcaacccccacggcatcagcaccttcatcgacaatgagttcaagaacacagtggagatcttcaagtttgaggaggccgagaacagcctgctgcacctgaagacagtgaagcatgagctgctgcccagcgtgaatgacatcacagctgtgggccctgcccacttctacgccaccaatgaccactacttcagtgaccccttcctgaagtacctggagacctacctgaacctgcactgggccaacgtggtgtactacagccccaatgaggtgaaggtggtggccgagggctttgattctgccaacggcatcaacatcagcccagatgacaagtacatctacgtggccgacatcctggcccacgagatccacgtgctggagaagcacaccaacatgaacctgacccagctgaaggtgctggagctggacaccctggtggacaacctgagcattgaccccagcagcggggacatctgggtgggctgccaccccaacggccagaagctgtttgtgtatgaccccaacaacccccccagcagcgaggtgctgcgcatccagaacatcctgtctgagaagcccaccgtgaccaccgtgtatgccaacaatggatctgtgctgcagggcagctctgtggcctctgtgtatgatggcaagctgctgattggcaccctgtaccaccgggccctgtactgtgagctgtag

SEQ ID NO: 163280 - DNA, 1065 bp, synthetic construct
  misc_feature 1..1065: note = Description of Artificial Sequence: Synthetic coding sequence
  source 1..1065: mol_type = other DNA
atgggcaagctggtggccctggtgctgctgggcgtgggcctgagcctggtgggggagatgttcctggccttccgggagcgggtgaatgccagccgggaggtggagcctgtggagcctgagaactgccacctgattgaggagctggagagcggctctgaagatattgacatcctgcccagcggcctggccttcatcagcagcggcctgaagtacccaggcatgcccaactttgccccagatgagcccgggaagatcttcctgatggacctgaatgagcagaacccccgggcccaggccctggagatcagcggcggctttgacaaggagctgttcaacccccacggcatcagcatcttcatcgacaaggacaacacagtgtacctgtatgtggtgaaccacccccacatgaagagcacagtggagatcttcaagtttgaggagcagcagaggagcctggtgtacctgaagaccatcaagcatgagctgctgaagtctgtgaatgacatcgtggtgctgggccctgagcagttctacgccacccgggaccactacttcaccaacagcctgctgtccttctttgagatgatcctggacctgcgctggacctacgtgctcttctacagcccccgggaggtgaaggtggtggccaagggcttctgcagcgccaacggcatcaccgtgtctgctgaccagaagtatgtgtatgtggctgatgtggccgccaagaacatccacatcatggagaagcatgacaactgggacctgacccagctgaaggtgatccagctgggcaccctggtggacaacctgactgtggaccctgccaccggggacatcctggccggctgccaccccaaccccatgaagctgctgaactacaaccctgaggaccccccaggcagcgaggtgctgcgcatccagaatgtgctgtctgagaagccccgggtgtccacagtgtatgccaacaatggatctgtgctgcagggcacctctgtggcctctgtgtaccacggcaagatcctgattggcaccgtcttccacaagaccctgtactgtgagctgtag

SEQ ID NO: 163281 - DNA, 1572 bp, synthetic construct
  misc_feature 1..1572: note = Description of Artificial Sequence: Synthetic coding sequence
  source 1..1572: mol_type = other DNA
atgatgctgcggggcaacctgaagcaggtgcgcatcgagaagaacccagcccggctgcgggccctggagagcgctgtgggggagagcgagcctgctgctgctgctgccatggccctggccctggccggggagcccgcccccccagccccagcccctcctgaggaccacccagatgaggagatgggcttcaccatcgacatcaagagcttcctgaagccaggagagaagacctacacccagcgctgccgcctgtttgtgggcaacctgcccacagacatcacagaggaggacttcaagaggctgtttgaaagatatggagagcccagcgaggtgttcatcaacagagaccggggcttcggcttcatccggctggagagcaggaccctggccgagatcgccaaggccgagctggatggcaccatcctgaagagccggcccctgcgcatccgctttgccacccacggggccgccctgactgtgaagaacctgagccctgtggtgtccaatgagctgctggagcaggccttcagccagtttggacctgtggagaaggctgtggtggtggtggatgaccggggccgggccaccgggaagggctttgtggagtttgctgccaagcccccagccaggaaggccctggagcgctgtggagatggagccttcctgctgaccaccacccccaggcctgtgattgtggagcccatggagcagtttgatgatgaagatggcctgcctgagaagctgatgcagaagacccagcagtaccacaaggagcgggagcagccccccaggtttgcccagcccggcacctttgaatttgaatatgccagccgctggaaggccctggatgagatggagaagcagcagcgggagcaggtggacaggaacatccgggaggccaaggagaagctggaggccgagatggaggccgcccggcatgagcaccagctgatgctgatgaggcaggacctgatgaggcggcaggaggagctgcggcggctggaggagctgaggaaccaggagctgcagaagaggaagcagatccagctgcggcatgaggaggagcacagaagaagagaggaggagatgatccgccaccgggagcaggaggagctgcggcggcagcaggagggcttcaagcccaactacatggagaaccgggagcaggagatgaggatgggagacatgggccccaggggggccatcaacatgggagatgccttcagccctgccccagctggcaaccagggccccccacccatgatgggcatgaacatgaacaacagagccaccatccctggcccccccatgggccctggccctgccatgggccctgagggcgccgccaacatgggcacccccatgatgccagacaatggagctgtgcacaatgaccgcttcccccagggcccccccagccagatgggcagccccatgggcagcaggactggaagtgagaccccccaggcccccatgtctggagtgggccctgtgtctgggggccctgggggcttcggccggggcagccagggcggcaactttgagggccccaacaagagaagacgctactag

SEQ ID NO: 163282 - DNA, 1392 bp, synthetic construct
  misc_feature 1..1392: note = Description of Artificial Sequence: Synthetic coding sequence
  source 1..1392: mol_type = other DNA
atgggcttcaccatcgacatcaagagcttcctgaagccaggagagaagacctacacccagcgctgccgcctgtttgtgggcaacctgcccacagacatcacagaggaggacttcaagaggctgtttgaaagatatggagagcccagcgaggtgttcatcaacagagaccggggcttcggcttcatccggctggagagcaggaccctggccgagatcgccaaggccgagctggatggcaccatcctgaagagccggcccctgcgcatccgctttgccacccacggggccgccctgactgtgaagaacctgagccctgtggtgtccaatgagctgctggagcaggccttcagccagtttggacctgtggagaaggctgtggtggtggtggatgaccggggccgggccaccgggaagggctttgtggagtttgctgccaagcccccagccaggaaggccctggagcgctgtggagatggagccttcctgctgaccaccacccccaggcctgtgattgtggagcccatggagcagtttgatgatgaagatggcctgcctgagaagctgatgcagaagacccagcagtaccacaaggagcgggagcagccccccaggtttgcccagcccggcacctttgaatttgaatatgccagccgctggaaggccctggatgagatggagaagcagcagcgggagcaggtggacaggaacatccgggaggccaaggagaagctggaggccgagatggaggccgcccggcatgagcaccagctgatgctgatgaggcaggacctgatgaggcggcaggaggagctgcggcggctggaggagctgaggaaccaggagctgcagaagaggaagcagatccagctgcggcatgaggaggagcacagaagaagagaggaggagatgatccgccaccgggagcaggaggagctgcggcggcagcaggagggcttcaagcccaactacatggagaaccgggagcaggagatgaggatgggagacatgggccccaggggggccatcaacatgggagatgccttcagccctgccccagctggcaaccagggccccccacccatgatgggcatgaacatgaacaacagagccaccatccctggcccccccatgggccctggccctgccatgggccctgagggcgccgccaacatgggcacccccatgatgccagacaatggagctgtgcacaatgaccgcttcccccagggcccccccagccagatgggcagccccatgggcagcaggactggaagtgagaccccccaggcccccatgtctggagtgggccctgtgtctgggggccctgggggcttcggccggggcagccagggcggcaactttgagggccccaacaagagaagacgctactag

SEQ ID NO: 163283 - DNA, 747 bp, synthetic construct
  misc_feature 1..747: note = Description of Artificial Sequence: Synthetic coding sequence
  source 1..747: mol_type = other DNA
atgatgctgcggggcaacctgaagcaggtgcgcatcgagaagaacccagcccggctgcgggccctggagagcgctgtgggggagagcgagcctgctgctgctgctgccatggccctggccctggccggggagcccgcccccccagccccagcccctcctgaggaccacccagatgaggagatgggcttcaccatcgacatcaagagcttcctgaagccaggagagaagacctacacccagcgctgccgcctgtttgtgggcaacctgcccacagacatcacagaggaggacttcaagaggctgtttgaaagatatggagagcccagcgaggtgttcatcaacagagaccggggcttcggcttcatccggctggagagcaggaccctggccgagatcgccaaggccgagctggatggcaccatcctgaagagccggcccctgcgcatccgctttgccacccacggggccgccctgactgtgaagaacctgagccctgtggtgtccaatgagctgctggagcaggccttcagccagtttggacctgtggagaaggctgtggtggtggtggatgaccggggccgggccaccgggaagggctttgtggagtttgctgccaagcccccagccaggaaggccctggagcgctgtggagatggagccttcctgctgaccaccacccccaggcctgtgattgtggagcccatggagcagtttgatgatgaagatggcctgcctgagaagctgtag

SEQ ID NO: 163284 - DNA, 309 bp, synthetic construct
  misc_feature 1..309: note = Description of Artificial Sequence: Synthetic coding sequence
  source 1..309: mol_type = other DNA
atgtctgagaagtctgtggaggccgctgctgagctgagcgccaaggacctgaaggagaagaaggagaaggtggaggagaaggccagcaggaaggagaggaagaaggaggtggtggaggaggaggagaatggagctgaggaggaggaggaggagacagcagaagatggagaggaggaggatgaaggagaggaggaggatgaggaggaggaggaggaggatgatgagggccctgccctgaagagagctgctgaggaggaggatgaagctgaccccaagaggcagaagacagaaaatggagccagcgcctag

SEQ ID NO: 163285 - DNA, 315 bp, synthetic construct
  misc_feature 1..315: note = Description of Artificial Sequence: Synthetic coding sequence
  source 1..315: mol_type = other DNA
atgtctgagaagtctgtggaggccgctgctgagctgagcgccaaggacctgaaggagaagaaggagaaggtggaggagaaggccagcaggaaggagaggaagaaggaggtggtggaggcccctgtgcccctggtggtgatggtgggcaaggcctgcagccagcctgaggccacccccagccctggcccccacagaagaagaagaacaggcctgcggaggaagaagaagaagctgcccaggatggagaggaggaagatgaagggcaagaagaagatgaggaagaagaagaagaggatgatgaagggccccaggtag

SEQ ID NO: 163286 - DNA, 306 bp, synthetic construct
  misc_feature 1..306: note = Description of Artificial Sequence: Synthetic coding sequence
  source 1..306: mol_type = other DNA
agccgggaccctgcctgcagagctgctgagctgagcgccaaggacctgaaggagaagaaggagaaggtggaggagaaggccagcaggaaggagaggaagaaggaggtggtggaggaggaggagaatggagctgaggaggaggaggaggagacagcagaagatggagaggaggaggatgaaggagaggaggaggatgaggaggaggaggaggaggatgatgagggccctgccctgaagagagctgctgaggaggaggatgaggccgaccccaagaggcagaagacagaaaatggagccagcgcctag

SEQ ID NO: 163287 - DNA, 528 bp, synthetic construct
  misc_feature 1..528: note = Description of Artificial Sequence: Synthetic coding sequence
  source 1..528: mol_type = other DNA
atgcagaggcggctggtgcagcagtggagcgtggccgtgttcctgctgtcctatgctgtgcccagctgtggccgctctgtggagggcctgagccggcggctgaagagagctgtgtctgagcaccagctgctgcatgacaagggcaagagcatccaggacctgcggcggcgcttcttcctgcaccacctgattgctgagatccacacagctgagatccgggccaccagcgaggtgagccccaacagcaagcccagccccaacaccaagaaccaccctgtgcgctttggaagtgatgatgagggccgctacctgacccaggagaccaacaaggtggagacctacaaggagcagcccctgaagacccctgggaagaagaagaagggcaagccaggcaagaggaaggagcaggagaagaagaagaggaggaccaggtctgcctggctggacagcggcgtgactggaagtggcctggagggggaccacctgagtgacaccagcaccaccagcctggagctggacagcaggtag

SEQ ID NO: 163288 - DNA, 630 bp, synthetic construct
  misc_feature 1..630: note = Description of Artificial Sequence: Synthetic coding sequence
  source 1..630: mol_type = other DNA
atgcagaggcggctggtgcagcagtggagcgtggccgtgttcctgctgtcctatgctgtgcccagctgtggccgctctgtggagggcctgagccggcggctgaagagagctgtgtctgagcaccagctgctgcatgacaagggcaagagcatccaggacctgcggcggcgcttcttcctgcaccacctgattgctgagatccacacagctgagatccgggccaccagcgaggtgagccccaacagcaagcccagccccaacaccaagaaccaccctgtgcgctttggaagtgatgatgagggccgctacctgacccaggagaccaacaaggtggagacctacaaggagcagcccctgaagacccctgggaagaagaagaagggcaagccaggcaagaggaaggagcaggagaagaagaagaggaggaccaggtctgcctggctggacagcggcgtgactggaagtggcctggagggggaccacctgagtgacaccagcaccaccagcctggagctggacagcaggacagccctgctgtggggcctgaagaagaagaaggagaacaacagaaggacccaccacatgcagctgatgatcagcctcttcaagagccccctgctgctgctgtag

SEQ ID NO: 163289 - DNA, 528 bp, synthetic construct; identical to SEQ ID NO: 163287
  misc_feature 1..528: note = Description of Artificial Sequence: Synthetic coding sequence
  source 1..528: mol_type = other DNA

SEQ ID NO: 163290 - DNA, 534 bp, synthetic construct
  misc_feature 1..534: note = Description of Artificial Sequence: Synthetic coding sequence
  source 1..534: mol_type = other DNA
atgcagaggcggctggtgcagcagtggagcgtggccgtgttcctgctgtcctatgctgtgcccagctgtggccgctctgtggagggcctgagccggcggctgaagagagctgtgtctgagcaccagctgctgcatgacaagggcaagagcatccaggacctgcggcggcgcttcttcctgcaccacctgattgctgagatccacacagctgagatccgggccaccagcgaggtgagccccaacagcaagcccagccccaacaccaagaaccaccctgtgcgctttggaagtgatgatgagggccgctacctgacccaggagaccaacaaggtggagacctacaaggagcagcccctgaagacccctgggaagaagaagaagggcaagccaggcaagaggaaggagcaggagaagaagaagaggaggaccaggtctgcctggctggacagcggcgtgactggaagtggcctggagggggaccacctgagtgacaccagcaccaccagcctggagctggacagcagaagacactag

SEQ ID NO: 163291 - DNA, 528 bp, synthetic construct; identical to SEQ ID NO: 163287
  misc_feature 1..528: note = Description of Artificial Sequence: Synthetic coding sequence
  source 1..528: mol_type = other DNA

SEQ ID NO: 163292 - DNA, 81 bp, synthetic construct
  misc_feature 1..81: note = Description of Artificial Sequence: Synthetic coding sequence
  source 1..81: mol_type = other DNA
acagccctgctgtggggcctgaagaagaagggcaagcagcagaagaacaccagctatgccaccaatgacctgatcatctag

SEQ ID NO: 163293 - DNA, 630 bp, synthetic construct; identical to SEQ ID NO: 163288
  misc_feature 1..630: note = Description of Artificial Sequence: Synthetic coding sequence
  source 1..630: mol_type = other DNA

SEQ ID NO: 163294 - DNA, 534 bp, synthetic construct; identical to SEQ ID NO: 163290
  misc_feature 1..534: note = Description of Artificial Sequence: Synthetic coding sequence
  source 1..534: mol_type = other DNA

SEQ ID NO: 163295 - DNA, 519 bp, synthetic construct
  misc_feature 1..519: note = Description of Artificial Sequence: Synthetic coding sequence
  source 1..519: mol_type = other DNA
atgcagaggcggctggtgcagcagtggagcgtggccgtgttcctgctgtcctatgctgtgcccagctgtggccgctctgtggagggcctgagccggcggctgaagagagctgtgtctgagcaccagctgctgcatgacaagggcaagagcatccaggacctgcggcggcgcttcttcctgcaccacctgattgctgagatccacacagctgagatccgggccaccagcgaggtgagccccaacagcaagcccagccccaacaccaagaaccaccctgtgcgctttggaagtgatgatgagggccgctacctgacccaggagaccaacaaggtggagacctacaaggagcagcccctgaagacccctgggaagaagaagaagggcaagccaggcaagaggaaggagcaggagaagaagaagaggaggaccaggtctgcctggctggacagcggcgtgactggaagtggcctggagggggaccacctgagtgacaccagcaccaccagcctggagctgtag

SEQ ID NO: 163296 - DNA, 534 bp, synthetic construct; identical to SEQ ID NO: 163290
  misc_feature 1..534: note = Description of Artificial Sequence: Synthetic coding sequence
  source 1..534: mol_type = other DNA

SEQ ID NO: 163297 - DNA, 891 bp, synthetic construct
  misc_feature 1..891: note = Description of Artificial Sequence: Synthetic coding sequence
  source 1..891: mol_type = other DNA
atggtggccgagaaggagaccctgagcctgaacaagtgcccagacaagatgcccaagaggaccaagctgctggcccagcagcccctgcctgtgcaccagccccacagcctggtgtctgagggcttcaccgtgaaggccatgatgaagaacagcgtggtgcggggccccccagctgctggggccttcaaggagcggcccaccaagcccacagccttcaggaagttctatgaaagaggagacttccccatcgccctggagcatgacagcaagggcaacaagatcgcctggaaggtggagattgagaagctggactaccaccactacctgcccctcttctttgatggcctgtgtgagatgaccttcccctatgagttctttgcccggcagggcatccatgacatgctggagcacggcggcaacaagatcctgcctgtgctgccccagctgatcatccccatcaagaatgccctgaacctgaggaaccggcaggtgatctgtgtgaccctgaaggtgctgcagcacctggtggtgtctgctgagatggtgggcaaggccctggtgccctactaccggcagatcctgcctgtgctgaacatcttcaagaacatgaatggcagctacagcctgccccggctggagtgcagcggggccatcatggcccgctgcaacctggaccacctgggcagcagtgacccccccaccagcgccagccaggtggccgagatcatcgtgaacagcggagatggcatcgactacagccagcagaagcgggagaacatcggggacctgatccaggagaccctggaggcctttgaaagatatggaggagaaaatgccttcatcaacatcaagtatgtggtgcccacctatgagagctgcctgctgaactag

SEQ ID NO: 163298 - DNA, 774 bp, synthetic construct
  misc_feature 1..774: note = Description of Artificial Sequence: Synthetic coding sequence
  source 1..774: mol_type = other DNA
atggtggccgagaaggagaccctgagcctgaacaagtgcccagacaagatgcccaagaggaccaagctgctggcccagcagcccctgcctgtgcaccagccccacagcctggtgtctgagggcttcaccgtgaaggccatgatgaagaacagcgtggtgcggggccccccagctgctggggccttcaaggagcggcccaccaagcccacagccttcaggaagttctatgaaagaggagacttccccatcgccctggagcatgacagcaagggcaacaagatcgcctggaaggtggagattgagaagctggactaccaccactacctgcccctcttctttgatggcctgtgtgagatgaccttcccctatgagttctttgcccggcagggcatccatgacatgctggagcacggcggcaacaagatcctgcctgtgctgccccagctgatcatccccatcaagaatgccctgaacctgaggaaccggcaggtgatctgtgtgaccctgaaggtgctgcagcacctggtggtgtctgctgagatggtgggcaaggccctggtgccctactaccggcagatcctgcctgtgctgaacatcttcaagaacatgaatgtgaacagcggagatggcatcgactacagccagcagaagagagaaaatattggagacctgatccaggagaccctggaggcctttgaaagatatggaggagaaaatgccttcatcaacatcaagtatgtggtgcccacctatgagagctgcctgctgaactag

SEQ ID NO: 163299 - DNA, 774 bp, synthetic construct; identical to SEQ ID NO: 163298
  misc_feature 1..774: note = Description of Artificial Sequence: Synthetic coding sequence
  source 1..774: mol_type = other DNA

SEQ ID NO: 163300 - DNA, 825 bp, synthetic construct
  misc_feature 1..825: note = Description of Artificial Sequence: Synthetic coding sequence
  source 1..825: mol_type = other DNA
atgtctggagagtgccagagcccccactgccccggcaccagcgctgagttcttcttcaagtgtggggcccaccccaccagtgacaaggagacctctgtggccctgcacctgattgccaccaacagcaggaacatcacctgcatcacctgcacagatgtgcgcagccctgtgctggtgttccagtgcaacagccgccacgtgatctgcctggactgcttccacctgtactgtgtgacccggctgaatgaccggcagtttgtgcatgacccccagctgggctacagcctgccctgtgtggccggctgccccaacagcctcatcaaggagctgcaccacttccgcatcctgggggaggagcagtacaaccgctaccagcagtatggagcagaagaatgtgtgctgcagatgggcggcgtgctgtgcccccggcccggctgtggggccggcctgctgcctgagccagaccagaggaaggtgacctgtgagggcggcaatggcctgggctgcggctttgccttctgccgggagtgcaaggaggcctaccacgagggagaatgttctgctgtgtttgaggccagcggcaccaccacccaggcctacagagtggatgaaagagctgctgagcaggcccgctgggaggccgccagcaaggagaccatcaagaagaccaccaagccctgcccccgctgccacgtgcctgtggagaagaatggaggctgcatgcacatgaagtgcccccagccccagtgccgcctggagtggtgctggaactgtggctgtgagtggaacagagtgtgcatgggagaccactggtttgatgtgtag

SEQ ID NO: 163301 - DNA, 1107 bp, synthetic construct
  misc_feature 1..1107: note = Description of Artificial Sequence: Synthetic coding sequence
  source 1..1107: mol_type = other DNA
atgattgtgtttgtgcgcttcaacagcagccacggcttccctgtggaggtggacagcgacaccagcatcttccagctgaaggaggtggtggccaagaggcagggcgtgcctgctgaccagctgcgggtcatctttgctgggaaggagctgagaaatgactggacagtgcagaactgtgacctggaccagcagagcatcgtgcacatcgtgcagaggccctggaggaagggccaggagatgaatgccactggaggagatgaccccagaaatgctgctgggggctgtgagcgggagccccagagcctgaccagggtggacctgagcagctctgtgctgcccggggacagcgtgggcctggccgtcatcctgcacacagacagcaggaaggacagccccccagctggcagccctgctggccgcagcatctacaacagcttctacgtgtactgcaagggcccctgccagagggtgcagcccgggaagctgcgggtgcagtgcagcacctgccggcaggccaccctgaccctgacccagggccccagctgctgggatgatgtgctgatccccaacaggatgtctggagagtgccagagcccccactgccccggcaccagcgctgagttcttcttcaagtgtggggcccaccccaccagtgacaaggagacctctgtggccctgcacctgattgccaccaacagcaggaacatcacctgcatcacctgcacagatgtgcgcagccctgtgctggtgttccagtgcaacagcagacatgtgatctgcctggactgcttccacctgtactgtgtgacccggctgaatgaccggcagtttgtgcatgacccccagctgggctacagcctgccctgtgtggccggctgccccaacagcctcatcaaggagctgcaccacttccgcatcctgggggaggagcagtacaaccgctaccagcagtacggggctgaggagtgtgtgctgcagatgggcggcgtgctgtgccccaggcctggctgtggggccggcctgctgcctgagccagaccagaggaaggtgacctgtgagggcggcaatggcctgggctgcggctacggccagaggaggaccaagtag

SEQ ID NO: 163302 - DNA, 825 bp, synthetic construct; identical to SEQ ID NO: 163300
  misc_feature 1..825: note = Description of Artificial Sequence: Synthetic coding sequence
  source 1..825: mol_type = other DNA

SEQ ID NO: 163303 - DNA, 657 bp, synthetic construct
  misc_feature 1..657: note = Description of Artificial Sequence: Synthetic coding sequence
  source 1..657: mol_type = other DNA
atgaatgccactggaggagatgaccccagaaatgctgctgggggctgtgagcgggagccccagagcctgaccagggtggacctgagcagctctgtgctgcccggggacagcgtgggcctggccgtcatcctgcacacagacagcaggaaggacagccccccagctggcagccctgctggccgcagcatctacaacagcttctacgtgtactgcaagggcccctgccagagggtgcagcccgggaagctgcgggtgcagtgcagcacctgccggcaggccaccctgaccctgacccagggccccagctgctgggatgatgtgctgatccccaacaggatgtctggagagtgccagagcccccactgccccggcaccagcgctgagttcttcttcaagtgtggggcccaccccaccagtgacaaggagacctctgtggccctgcacctgattgccaccaacagcaggaacatcacctgcatcacctgcacagatgtgcgcagccctgtgctggtgttccagtgcaacagccgccacgtgatctgcctggactgcttccacctgtactgtgtgacccggctgaatgaccggcagtttgtgcatgacccccagctgggctacagcctgccctgtgtggtgtccctgctgcccagccagtag

SEQ ID NO: 163304 - DNA, 951 bp, synthetic construct
  misc_feature 1..951: note = Description of Artificial Sequence: Synthetic coding sequence
  source 1..951: mol_type = other DNA
atgattgtgtttgtgcgcttcaacagcagccacggcttccctgtggaggtggacagcgacaccagcatcttccagctgaaggaggtggtggccaagaggcagggcgtgcctgctgaccagctgcgggtcatctttgctgggaaggagctgagaaatgactggacagtgcaggagttcttcttcaagtgtggggcccaccccaccagtgacaaggagacctctgtggccctgcacctgattgccaccaacagcaggaacatcacctgcatcacctgcacagatgtgcgcagccctgtgctggtgttccagtgcaacagccgccacgtgatctgcctggactgcttccacctgtactgtgtgacccggctgaatgaccggcagtttgtgcatgacccccagctgggctacagcctgccctgtgtggccggctgccccaacagcctcatcaaggagctgcaccacttccgcatcctgggggaggagcagtacaaccgctaccagcagtatggagcagaagaatgtgtgctgcagatgggcggcgtgctgtgcccccggcccggctgtggggccggcctgctgcctgagccagaccagaggaaggtgacctgtgagggcggcaatggcctgggctgcggctttgccttctgccgggagtgcaaggaggcctaccacgagggagaatgttctgctgtgtttgaggccagcggcaccaccacccaggcctacagagtggatgaaagagctgctgagcaggcccgctgggaggccgccagcaaggagaccatcaagaagaccaccaagccctgcccccgctgccacgtgcctgtggagaagaatggaggctgcatgcacatgaagtgcccccagccccagtgccgcctggagtggtgctggaactgtggctgtgagtggaacagagtgtgcatgggagaccactggtttgatgtgtag

SEQ ID NO: 163305 - DNA, 1314 bp, synthetic construct
  misc_feature 1..1314: note = Description of Artificial Sequence: Synthetic coding sequence
  source 1..1314: mol_type = other DNA
atgattgtgtttgtgcgcttcaacagcagccacggcttccctgtggaggtggacagcgacaccagcatcttccagctgaaggaggtggtggccaagaggcagggcgtgcctgctgaccagctgcgggtcatctttgctgggaaggagctgagaaatgactggacagtgcagaactgtgacctggaccagcagagcatcgtgcacatcgtgcagaggccctggaggaagggccaggagatgaatgccactggaggagatgaccccagaaatgctgctgggggctgtgagcgggagccccagagcctgaccagggtggacctgagcagctctgtgctgcccggggacagcgtgggcctggccgtcatcctgcacacagacagcaggaaggacagccccccagctggcagccctgctggccgcagcatctacaacagcttctacgtgtactgcaagggcccctgccagagggtgcagcccgggaagctgcgggtgcagtgcagcacctgccggcaggccaccctgaccctgacccaggagttcttcttcaagtgtggggcccaccccaccagtgacaaggagacctctgtggccctgcacctgattgccaccaacagcaggaacatcacctgcatcacctgcacagatgtgcgcagccctgtgctggtgttccagtgcaacagcagacatgtgatctgcctggactgcttccacctgtactgtgtgacccggctgaatgaccggcagtttgtgcatgacccccagctgggctacagcctgccctgtgtggccggctgccccaacagcctcatcaaggagctgcaccacttccgcatcctgggggaggagcagtacaaccgctaccagcagtacggggctgaggagtgtgtgctgcagatgggcggcgtgctgtgccccaggcctggctgtggggccggcctgctgcctgagccagaccagaggaaggtgacctgtgagggcggcaatggcctgggctgcggctttgccttctgccgggagtgcaaggaggcctaccatgaaggagagtgcagcgctgtgtttgaggccagcggcaccaccacccaggcctacagagtggatgaaagagctgctgagcaggcccgctgggaggccgccagcaaggagaccatcaagaagaccaccaagccctgcccccgctgccacgtgcctgtggagaagaatggaggctgcatgcacatgaagtgcccccagccccagtgccgcctggagtggtgctggaactgtggctgtgagtggaacagagtgtgcatgggagaccactggtttgatgtgtag

SEQ ID NO: 163306 - DNA, 1398 bp, synthetic construct
  misc_feature 1..1398: note = Description of Artificial Sequence: Synthetic coding sequence
  source 1..1398: mol_type = other DNA
atgattgtgtttgtgcgcttcaacagcagccacggcttccctgtggaggtggacagcgacaccagcatcttccagctgaaggaggtggtggccaagaggcagggcgtgcctgctgaccagctgcgggtcatctttgctgggaaggagctgagaaatgactggacagtgcagaactgtgacctggaccagcagagcatcgtgcacatcgtgcagaggccctggaggaagggccaggagatgaatgccactggaggagatgaccccagaaatgctgctgggggctgtgagcgggagccccagagcctgaccagggtggacctgagcagctctgtgctgcccggggacagcgtgggcctggccgtcatcctgcacacagacagcaggaaggacagccccccagctggcagccctgctggccgcagcatctacaacagcttctacgtgtactgcaagggcccctgccagagggtgcagcccgggaagctgcgggtgcagtgcagcacctgccggcaggccaccctgaccctgacccagggccccagctgctgggatgatgtgctgatccccaacaggatgtctggagagtgccagagcccccactgccccggcaccagcgctgagttcttcttcaagtgtggggcccaccccaccagtgacaaggagacctctgtggccctgcacctgattgccaccaacagcaggaacatcacctgcatcacctgcacagatgtgcgcagccctgtgctggtgttccagtgcaacagcagacatgtgatctgcctggactgcttccacctgtactgtgtgacccggctgaatgaccggcagtttgtgcatgacccccagctgggctacagcctgccctgtgtggccggctgccccaacagcctcatcaaggagctgcaccacttccgcatcctgggggaggagcagtacaaccgctaccagcagtacggggctgaggagtgtgtgctgcagatgggcggcgtgctgtgccccaggcctggctgtggggccggcctgctgcctgagccagaccagaggaaggtgacctgtgagggcggcaatggcctgggctgcggctttgccttctgccgggagtgcaaggaggcctaccatgaaggagagtgcagcgctgtgtttgaggccagcggcaccaccacccaggcctacagagtggatgaaagagctgctgagcaggcccgctgggaggccgccagcaaggagaccatcaagaagaccaccaagccctgcccccgctgccacgtgcctgtggagaagaatggaggctgcatgcacatgaagtgcccccagccccagtgccgcctggagtggtgctggaactgtggctgtgagtggaacagagtgtgcatgggagaccactggtttgatgtgtag

SEQ ID NO: 163307 - DNA, 612 bp, synthetic construct
  misc_feature 1..612: note = Description of Artificial Sequence: Synthetic coding sequence
  source 1..612: mol_type = other DNA
atgtctggagagtgccagagcccccactgccccggcaccagcgctgagttcttcttcaagtgtggggcccaccccaccagtgacaaggagacctctgtggccctgcacctgattgccaccaacagcaggaacatcacctgcatcacctgcacagatgtgcgcagccctgtgctggtgttccagtgcaacagccgccacgtgatctgcctggactgcttccacctgtactgtgtgacccggctgaatgaccggcagtttgtgcatgacccccagctgggctacagcctgccctgtgtggccggctgccccaacagcctcatcaaggagctgcaccacttccgcatcctgggggaggagcagtacaaccgctaccagcagtatggagcagaagaatgtgtgctgcagatgggcggcgtgctgtgcccccggcccggctgtggggccggcctgctgcctgagccagaccagaggaaggtgacctgtgagggcggcaatggcctgggctgcggctttgccttctgccgggagtgcaaggaggcctaccacgagggagaatgttctgctgtgtttgaggccagcggcaccaccacccagcacagcggctgcacctag

SEQ ID NO: 163308 - DNA, 429 bp, synthetic construct
  misc_feature 1..429: note = Description of Artificial Sequence: Synthetic coding sequence
  source 1..429: mol_type = other DNA
tctgtgtttgtgcgcttcaacagcagccacggcttccctgtggaggtggacagcgacaccagcatcttccagctgaaggaggtggtggccaagaggcagggcgtgcctgctgaccagctgcgggtcatctttgctgggaaggagctgagaaatgactggacagtgcagaactgtgacctggaccagcagagcatcgtgcacatcgtgcagaggccctggaggaagggccaggagatgaatgccactggaggagatgaccccagaaatgctgctgggggctgtgagcgggagccccagagcctgaccagggtggacctgagcagctctgtgctgcccggggacagcgtgggcctggccgtcatcctgcacacagacagcaggaaggacagccccccagctggcagccctggcaactgcctgcatggatag

SEQ ID NO: 163309 - DNA, 429 bp, synthetic construct
  misc_feature 1..429: note = Description of Artificial Sequence: Synthetic coding sequence
  source 1..429: mol_type = other DNA
atggctgctgtggtggccgccacagccctgaagggccgcggggccagaaatgcccgggtgctgcggggcatcctggccggggccacagccaacaaggccagccacaacagaacccgggccctgcagagccacagcagccctgagggcaaggaggagcctgagcccctgagccctgagctggagtacatccccaggaagaggggcaagaaccccatgaaggctgtgggcctggcctgggccatcggcttcccctgtggcatcctgctcttcatcctgaccaagcgggaggtggacaaggacagagtgaagcagatgaaggcccggcagaacatgaggctgagcaacacaggagaatatgagagccagcgcttccgggccagcagccagagcgcccccagcccagatgtgggcagcggcgtgcagacctag

SEQ ID NO: 163310 - DNA, 1086 bp, synthetic construct
  misc_feature 1..1086: note = Description of Artificial Sequence: Synthetic coding sequence
  source 1..1086: mol_type = other DNA
atggcctggcagggctggccagctgcctggcagtgggtggccggctgctggctgctgctggtgctggtgctggtgctgctggtgagcccccggggctgccgggcccggcggggcctgcggggcctgctgatggcccacagccagaggctgctcttccgcatcggctacagcctgtacaccaggacctggctgggctacctgttctaccggcagcagctgcggcgggccaggaaccgctaccccaagggccacagcaagacccagcccaggctcttcaatggagtgaaggtgctgcccatccctgtgctgagtgacaactacagctacctgatcatcgacacccaggcccagctggccgtggccgtggaccccagcgaccccagggctgtgcaggccagcattgagaaggagggcgtgaccctggtggccatcctgtgcacccacaagcactgggaccacagcggcggcaacagagacctgagccgccgccaccgggactgccgggtgtatggcagcccccaggacggcatcccctacctgacccaccccctgtgccaccaggatgtggtgtctgtgggccgcctgcagatccgggccctggccaccccaggccacacccagggccacctggtgtacctgctggatggagagccctacaagggccccagctgcctcttcagcggggacctgctcttcctgagcggctgcggccgcacctttgagggcaatgctgagaccatgctgagcagcctggacacagtgctgggcctgggagatgacaccctgctgtggccaggccatgaatatgcagaggagaacctgggctttgctggggtggtggagcctgagaacctggcccgggagaggaagatgcagtgggtgcagaggcagaggctggagaggaagggcacctgccccagcaccctgggggaggagaggagctacaaccccttcctgcggacccactgcctggccctgcaggaggccctgggccctggccctggccccactggagatgatgactacagccgggcccagctgctggaggagctgcggcggctgaaggacatgcacaagagcaagtag

SEQ ID NO: 163311 - DNA, 1158 bp, synthetic construct
  misc_feature 1..1158: note = Description of Artificial Sequence: Synthetic coding sequence
  source 1..1158: mol_type = other DNA
atggctgctgtggtggccgccacagccctgaagggccgcggggccagaaatgcccgggtgctgcggggcatcctggccggggccacagccaacaaggccagccacaacagaacccgggccctgcagagccacagcagccctgagggcaaggaggagcctgagcccctgagccctgagctggagtacatccccaggaagaggggcaagaaccccatgaaggctgtgggcctggcctggtacagcctgtacaccaggacctggctgggctacctgttctaccggcagcagctgcggcgggccaggaaccgctaccccaagggccacagcaagacccagcccaggctcttcaatggagtgaaggtgctgcccatccctgtgctgagtgacaactacagctacctgatcatcgacacccaggcccagctggccgtggccgtggaccccagcgaccccagggctgtgcaggccagcattgagaaggagggcgtgaccctggtggccatcctgtgcacccacaagcactgggaccacagcggcggcaacagagacctgagccgccgccaccgggactgccgggtgtatggcagcccccaggacggcatcccctacctgacccaccccctgtgccaccaggatgtggtgtctgtgggccgcctgcagatccgggccctggccaccccaggccacacccagggccacctggtgtacctgctggatggagagccctacaagggccccagctgcctcttcagcggggacctgctcttcctgagcggctgcggccgcacctttgagggcaatgctgagaccatgctgagcagcctggacacagtgctgggcctgggagatgacaccctgctgtggccaggccatgaatatgcagaggagaacctgggctttgctggggtggtggagcctgagaacctggcccgggagaggaagatgcagtgggtgcagaggcagaggctggagaggaagggcacctgccccagcaccctgggggaggagaggagctacaaccccttcctgcggacccactgcctggccctgcaggaggccctgggccctggccctggccccactggagatgatgactacagccgggcccagctgctggaggagctgcggcggctgaaggacatgcacaagagcaagtag

SEQ ID NO: 163312 - DNA, 1455 bp, synthetic construct
  misc_feature 1..1455: note = Description of Artificial Sequence: Synthetic coding sequence
  source 1..1455: mol_type = other DNA
atggctgctggaggagaccacggcagcccagacagctaccgcagccccctggccagccgctatgccagccctgagatgtgctttgtgttcagtgaccgctacaagttccgcacctggaggcagctgtggctgtggctggccgaggccgagcagaccctgggcctgcccatcacagatgagcagatccaggagatgaagagcaacctggagaacatcgacttcaagatggctgctgaggaggagaagaggctgcggcatgatgtgatggcccacgtgcacaccttcggccactgctgccccaaggctgctggcatcatccacctgggcgccaccagctgctacgtgggggacaacacagacctgatcatcctgagaaatgccctggacctgctgctgcccaagctggcccgggtcatcagccggctggccgactttgccaaggagcgggccagcctgcccaccctgggcttcacccacttccagcctgcccagctgaccaccgtgggcaagcgctgctgcctgtggatccaggacctgtgcatggacctgcagaacctgaagagggtgagagatgacctgcgcttccggggcgtgaagggcaccaccggcacccaggccagcttcctgcagctgtttgaaggagatgaccacaaggtggagcagctggacaagatggtgacagagaaggccggcttcaagagggccttcatcatcaccggccagacctacaccaggaaggtggacatcgaggtgctgtctgtgctggccagcctgggcgcctctgtgcacaagatctgcacagacatccggctgctggccaacctgaaggagatggaggagccctttgagaagcagcagatcggcagcagcgccatgccctacaagaggaaccccatgaggtctgagcgctgctgcagcctggcccggcacctgatgaccctggtgatggaccccctgcagacagcctctgtgcagtggtttgagaggaccctggatgacagcgccaacagacgcatctgcctggccgaggccttcctgacagctgacaccatcctgaacaccctgcagaacatcagcgagggcctggtggtgtaccccaaggtgattgaaagacgcatccggcaggagctgcccttcatggccacagagaacatcatcatggccatggtgaaggccggcggcagccggcaggactgccacgagaagatccgggtgctgagccagcaggccgcctctgtggtgaagcaggagggcggggacaatgacctgattgaaagaatccaggtggatgcctacttcagccccatccacagccagctggaccacctgctggaccccagcagcttcaccggccgggccagccagcaggtgcagcgcttcctggaggaggaggtgtaccccctgctgaagccctatgagagcgtgatgaaggtgaaggccgagctgtgcctgtag

SEQ ID NO: 163313 - DNA, 237 bp, synthetic construct
  misc_feature 1..237: note = Description of Artificial Sequence: Synthetic coding sequence
  source 1..237: mol_type = other DNA
atggtgggcctgaagaagaagtctgcagatgatgtgaagaaggtgttccacatgctggacaaggacaagagcggcttcattgaagaagatgagctgggcttcatcctgaagggcttctccccagatgcccgggacctgagcgccaaggagaccaagatgctgatggctgctggggacaaggatggagatggcaagattggagtggatgagttcagcaccctggtggccgagagctag

SEQ ID NO: 163314 - DNA, 333 bp, synthetic construct
  misc_feature 1..333: note = Description of Artificial Sequence: Synthetic coding sequence
  source 1..333: mol_type = other DNA
atgtccatgacagacctgctgaatgctgaggacatcaagaaggctgtgggcgccttcagcgccacagacagctttgaccacaagaagttcttccagatggtgggcctgaagaagaagtctgcagatgatgtgaagaaggtgttccacatgctggacaaggacaagagcggcttcattgaagaagatgagctgggcttcatcctgaagggcttctccccagatgcccgggacctgagcgccaaggagaccaagatgctgatggctgctggggacaaggatggagatggcaagattggagtggatgagttcagcaccctggtggccgagagctag

SEQ ID NO: 163315 - DNA, 306 bp, synthetic construct
  misc_feature 1..306: note = Description of Artificial Sequence: Synthetic coding sequence
  source 1..306: mol_type = other DNA
atgtccatgacagacctgctgaatgctgaggacatcaagaaggctgtgggcgccttcagcgccacagacagctttgaccacaagaagttcttccagatggtgggcctgaagaagaagtctgcagatgatgtgaagaaggtgttccacatgctggacaaggacaagagcggcttcattgaagaagatgagctgggcttcatcctgaagggcttctccccagatgcccgggacctgagcgccaaggagaccaagatgctgatggctgctggggacaaggatggagatggcaagattggagtggactag

SEQ ID NO: 163316 - DNA, 984 bp, synthetic construct
  misc_feature 1..984: note = Description of Artificial Sequence: Synthetic coding sequence
  source 1..984: mol_type = other DNA
atgtctgacctgcaggaggagggcaagaatgccatcaacagccccatgagccctgccctggtggatgtgcaccctgaggacacccagctggaggagaatgaggagaggaccatgattgaccccaccagcaaagaagaccccaagttcaaggagctggtgaaggtgctgctggactggatcaatgatgtgctggtggaggagcgcatcatcgtgaagcagctggaggaggacctgtatgatggccaggtgctgcagaagctgctggagaagctggccggctgcaagctgaatgtggccgaggtgacccagagcgagatcggccagaagcagaagctgcagacagtgctggaggccgtgcatgacctgctgcggccccggggctgggccctgcgctggagcgtggacagcatccacggcaagaacctggtggccatcctgcacctgctggtgtccctggccatgcacttccgggcccccatccggctgcctgagcacgtgacagtgcaggtggtggtggtgaggaagcgggagggcctgctgcacagcagccacatcagcgaggagctgaccaccaccacagagatgatgatgggccgctttgaaagagatgcctttgacaccctgtttgaccacgccccagacaagctgtctgtggtgaagaagagcctcatcacctttgtgaacaagcacctgaacaagctgaacctggaggtgacagagctggagacccagtttgctgatggagtgtacctggtgctgctgatgggcctgctggaggactactttgtgcccctgcaccacttctacctgaccccagagagctttgaccagaaggtgcacaacgtgtcctttgcctttgagctgatgctggatggcggcctgaagaagcccaaggcccggccagaagatgtggtgaacctggacctgaagagcaccctgcgggtgctgtacaacctcttcaccaagtacaagaatgtggagtag

SEQ ID NO: 163317 - DNA, 1239 bp, synthetic construct
  misc_feature 1..1239: note = Description of Artificial Sequence: Synthetic coding sequence
  source 1..1239: mol_type = other DNA
atgctgggcatcatccccctgccctttgggaagccccagccccagagcagaagaagacccctgcggcccccatctgccagcagcgccagcaggcctgcccggggcagcctgcggcgggccatggccaccagcccccagaagagccccagcgtgcccaagagccccacccccaagagcccccccagcaggaagaaggatgacagcttcctgggcaagctgggcggcaccctggcccggaggaagaaggccaaggaggtgtctgagctgcaggaggagggcatgaatgccatcaacctgcccctgagccccatcccctttgagctggaccctgaggacaccatgctggaggagaatgaggtgaggaccatggtggaccccaacagcagaagtgaccccaagctgcaggagctgatgaaggtgctgattgactggatcaatgatgtgctggtgggggagcgcatcatcgtgaaggacctggccgaggacctgtatgatggccaggtgctgcagaagctgtttgagaagctggagagcgagaagctgaatgtggccgaggtgacccagagcgagatcgcccagaagcagaagctgcagacagtgctggagaagatcaatgagaccctgaagctgcccccaagaagcatcaagtggaatgtggacagcgtgcacgccaagagcctggtggccatcctgcacctgctggtggccctgagccagtacttccgggcccccatccggctgcctgaccacgtgtccatccaggtggtggtggtgcagaagcgggagggcatcctgcagagccggcagatccaggaggagatcactggaaacacagaggccctgagcggcagacatgaaagagatgcctttgacaccctgtttgaccacgccccagacaagctgaatgtggtgaagaagaccctcatcacctttgtgaacaagcacctgaacaagctgaacctggaggtgacagagctggagacccagtttgctgatggagtgtacctggtgctgctgatgggcctgctggagggctactttgtgcccctgcacagcttcttcctgaccccagacagctttgagcagaaggtgctgaatgtgtcctttgcctttgagctgatgcaggacggcggcctggagaagcccaagcccaggccagaagatattgtgaactgtgacctgaagagcaccctgcgggtgctgtacaacctcttcaccaagtacagaaatgtggagtag

SEQ ID NO: 163318 - DNA, 873 bp, synthetic construct
  misc_feature 1..873: note = Description of Artificial Sequence: Synthetic coding sequence
  source 1..873: mol_type = other DNA
atgaatgccatcaacctgcccctgagccccatcccctttgagctggaccctgaggacaccatgctggaggagaatgaggtgaggaccatggtggaccccaacagcagaagtgaccccaagctgcaggagctgatgaaggtgctgattgactggatcaatgatgtgctggtgggggagcgcatcatcgtgaaggacctggccgaggacctgtatgatggccaggtgctgcagaagctgtttgagaagctggagagcgagaagctgaatgtggccgaggtgacccagagcgagatcgcccagaagcagaagctgcagacagtgctggagaagatcaatgagaccctgaagctgccccccaggagcatcaagtggaatgtggacagcgtgcacgccaagagcctggtggccatcctgcacctgctggtggccctgagccagtacttccgggcccccatccggctgcctgaccacgtgtccatccaggtggtggtggtgcagaagcgggagggcatcctgcagagccggcagatccaggaggagatcaccggcaacacagaggccctgagcggcagacatgaaagagatgcctttgacaccctgtttgaccacgccccagacaagctgaatgtggtgaagaaggtgggcaagggctgcctgggctggacagagggcagcgagatgcagcagaacatcggcaagacccacccctgcagcctgcgggccagctgccagaactggtggcaccacctgaccagcgcccacacaggcctgagccccctgcccagcatgtacctgtctgtgccccactggatgctgcacctgggcctcttccccagcatctccatgaacagcctgagcagccaccctggatag

SEQ ID NO: 163319 - DNA, 1119 bp, synthetic construct
  misc_feature 1..1119: note = Description of Artificial Sequence: Synthetic coding sequence
  source 1..1119: mol_type = other DNA
atggccaccagcccccagaagagccccagcgtgcccaagagccccacccccaagagcccccccagcaggaagaaggatgacagcttcctgggcaagctgggcggcaccctggcccggaggaagaaggccaaggaggtgtctgagctgcaggaggagggcatgaatgccatcaacctgcccctgagccccatcccctttgagctggaccctgaggacaccatgctggaggagaatgaggtgaggaccatggtggaccccaacagcagaagtgaccccaagctgcaggagctgatgaaggtgctgattgactggatcaatgatgtgctggtgggggagcgcatcatcgtgaaggacctggccgaggacctgtatgatggccaggtgctgcagaagctgtttgagaagctggagagcgagaagctgaatgtggccgaggtgacccagagcgagatcgcccagaagcagaagctgcagacagtgctggagaagatcaatgagaccctgaagctgcccccaagaagcatcaagtggaatgtggacagcgtgcacgccaagagcctggtggccatcctgcacctgctggtggccctgagccagtacttccgggcccccatccggctgcctgaccacgtgtccatccaggtggtggtggtgcagaagcgggagggcatcctgcagagccggcagatccaggaggagatcactggaaacacagaatatgtgagcagccgccacaagagagatgcctttgacaccctgtttgaccacgccccagacaagctgaatgtggtgaagaagaccctcatcacctttgtgaacaagcacctgaacaagctgaacctggaggtgacagagctggagacccagtttgctgatggagtgtacctggtgctgctgatgggcctgctggagggctactttgtgcccctgcacagcttcttcctgaccccagacagctttgagcagaaggtgctgaatgtgtcctttgcctttgagctgatgcaggacggcggcctggagaagcccaagcccaggccagaagatattgtgaactgtgacctgaagagcaccctgcgggtgctgtacaacctcttcaccaagtacagaaatgtggagtag

SEQ ID NO: 163320 - DNA, 1119 bp, synthetic construct
  misc_feature 1..1119: note = Description of Artificial Sequence: Synthetic coding sequence
  source 1..1119: mol_type = other DNA
atggccaccagcccccagaagagccccagcgtgcccaagagccccacccccaagagcccccccagcaggaagaaggatgacagcttcctgggcaagctgggcggcaccctggcccggaggaagaaggccaaggaggtgtctgagctgcaggaggagggcatgaatgccatcaacctgcccctgagccccatcccctttgagctggaccctgaggacaccatgctggaggagaatgaggtgaggaccatggtggaccccaacagcagaagtgaccccaagctgcaggagctgatgaaggtgctgattgactggatcaatgatgtgctggtgggggagcgcatcatcgtgaaggacctggccgaggacctgtatgatggccaggtgctgcagaagctgtttgagaagctggagagcgagaagctgaatgtggccgaggtgacccagagcgagatcgcccagaagcagaagctgcagacagtgctggagaagatcaatgagaccctgaagctgcccccaagaagcatcaagtggaatgtggacagcgtgcacgccaagagcctggtggccatcctgcacctgctggtggccctgagccagtacttccgggcccccatccggctgcctgaccacgtgtccatccaggtggtggtggtgcagaagcgggagggcatcctgcagagccggcagatccaggaggagatcactggaaacacagaggccctgagcggcagacatgaaagagatgcctttgacaccctgtttgaccacgccccagacaagctgaatgtggtgaagaagaccctcatcacctttgtgaacaagcacctgaacaagctgaacctggaggtgacagagctggagacccagtttgctgatggagtgtacctggtgctgctgatgggcctgctggagggctactttgtgcccctgcacagcttcttcctgaccccagacagctttgagcagaaggtgctgaatgtgtcctttgcctttgagctgatgcaggacggcggcctggagaagcccaagcccaggccagaagatattgtgaactgtgacctgaagagcaccctgcgggtgctgtacaacctcttcaccaagtacagaaatgtggagtag

SEQ ID NO: 163321 - DNA, 1095 bp, synthetic construct
  misc_feature 1..1095: note = Description of Artificial Sequence: Synthetic coding sequence
  source 1..1095: mol_type = other DNA
atgagcagcgcccccaggagccccaccccccggcccaggaggatgaagaaggatgagagcttcctgggcaagctgggcggcaccctggccaggaagagaagagcccgggaggtgtctgacctgcaggaggagggcaagaatgccatcaacagccccatgagccctgccctggtggatgtgcaccctgaggacacccagctggaggagaatgaggagaggaccatgattgaccccaccagcaaggaggaccccaagttcaaggagctggtgaaggtgctgctggactggatcaatgatgtgctggtggaggagcgcatcatcgtgaagcagctggaggaggacctgtatgatggccaggtgctgcagaagctgctggagaagctggccggctgcaagctgaatgtggccgaggtgacccagagcgagatcggccagaagcagaagctgcagacagtgctggaggccgtgcatgacctgctgcggccccggggctgggccctgcgctggagcgtggacagcatccacggcaagaacctggtggccatcctgcacctgctggtgtccctggccatgcacttccgggcccccatccggctgcctgagcacgtgacagtgcaggtggtggtggtgaggaagcgggagggcctgctgcacagcagccacatcagcgaggagctgaccaccaccacagagatgatgatgggccgctttgaaagagatgcctttgacaccctgtttgaccacgccccagacaagctgtctgtggtgaagaagagcctcatcacctttgtgaacaagcacctgaacaagctgaacctggaggtgacagagctggagacccagtttgctgatggagtgtacctggtgctgctgatgggcctgctggaggactactttgtgcccctgcaccacttctacctgaccccagagagctttgaccagaaggtgcacaacgtgtcctttgcctttgagctgatgctggatggcggcctgaagaagcccaaggcccggccagaagatgtggtgaacctggacctgaagagcaccctgcgggtgctgtacaacctcttcaccaagtacaagaatgtggagtag

SEQ ID NO: 163322 - DNA, 1194 bp, synthetic construct
  misc_feature 1..1194: note = Description of Artificial Sequence: Synthetic coding sequence
  source 1..1194: mol_type = other DNA
atgcaccacgtgttcaaggaccaccagagaggagagaagaggggcttcctgagccctgagaacaagaactgccggcggctggagctgcggcggggctgcagctgctcctggggcctgtgcagccaggccctgatggccagcctggccggcagcctgctgcccggcagtgacagaagtggagtggagaccagtgaatatgcccagggcggcgtgtctgacctgcaggaggagggcaagaatgccatcaacagccccatgagccctgccctggtggatgtgcaccctgaggacacccagctggaggagaatgaggagaggaccatgattgaccccaccagcaaagaagaccccaagttcaaggagctggtgaaggtgctgctggactggatcaatgatgtgctggtggaggagcgcatcatcgtgaagcagctggaggaggacctgtatgatggccaggtgctgcagaagctgctggagaagctggccggctgcaagctgaatgtggccgaggtgacccagagcgagatcggccagaagcagaagctgcagacagtgctggaggccgtgcatgacctgctgcggccccggggctgggccctgcgctggagcgtggacagcatccacggcaagaacctggtggccatcctgcacctgctggtgtccctggccatgcacttccgggcccccatccggctgcctgagcacgtgacagtgcaggtggtggtggtgaggaagcgggagggcctgctgcacagcagccacatcagcgaggagctgaccaccaccacagagatgatgatgggccgctttgaaagagatgcctttgacaccctgtttgaccacgccccagacaagctgtctgtggtgaagaagagcctcatcacctttgtgaacaagcacctgaacaagctgaacctggaggtgacagagctggagacccagtttgctgatggagtgtacctggtgctgctgatgggcctgctggaggactactttgtgcccctgcaccacttctacctgaccccagagagctttgaccagaaggtgcacaacgtgtcctttgcctttgagctgatgctggatggcggcctgaagaagcccaaggcccggccagaagatgtggtgaacctggacctgaagagcaccctgcgggtgctgtacaacctcttcaccaagtacaagaatgtggagtag

SEQ ID NO: 163323 - DNA, 996 bp, synthetic construct
  misc_feature 1..996: note = Description of Artificial Sequence: Synthetic coding sequence
  source 1..996: mol_type = other DNA
atggagcctgagttcctgtatgacctgctgcagctgcccaagggcgtggagcccccagctgaggaggagctgagcaagggcggcaagaagaagtacctgccccccaccagcaggaaggaccccaagtttgaggagctgcagaaggtgctgatggagtggatcaatgccaccctgctgcctgagcacatcgtggtgcgcagcctggaggaggacatgtttgatggcctcatcctgcaccacctgttccagaggctggccgccctgaagctggaggctgaagatattgccctgacagccaccagccagaagcacaagctgactgtggtgctggaggccgtgaacagaagcctgcagctggaggagtggcaggccaagtggagcgtggagagcatcttcaacaaggacctgctgagcaccctgcacctgctggtggccctggccaagcgcttccagcctgacctgagcctgcccaccaacgtgcaggtggaggtgatcaccatcgagagcaccaagagcggcctgaagtctgagaagctggtggagcagctgacagagtacagcacagacaaggatgagccccccaaggatgtgtttgatgagctgttcaagctggcccctgagaaggtgaatgctgtgaaggaggccatcgtgaactttgtgaaccagaagctggaccggctgggcctgtctgtgcagaacctggacacccagtttgctgatggagtcatcctgctgctgctgattggccagctggagggcttcttcctgcacctgaaggagttctacctgacccccaacagccctgctgagatgctgcacaacgtgaccctggccctggagctgctgaaggatgagggcctgctgagctgccctgtgtccccagaagatattgtgaacaaggatgccaagagcaccctgcgggtgctgtatggcctcttctgcaagcacacccagaaggcccaccgggacaggacccctcatggagcccccaactag

SEQ ID NO: 163324 - DNA, 81 bp, synthetic construct
  misc_feature 1..81: note = Description of Artificial Sequence: Synthetic coding sequence
  source 1..81: mol_type = other DNA
atggagcctgagttcctgtatgacctgctgcagctgcccaagggcgtggagcccccagctgaggaggagctgagcaagtag

SEQ ID NO: 163325 - DNA, 93 bp, synthetic construct
  misc_feature 1..93: note = Description of Artificial Sequence: Synthetic coding sequence
  source 1..93: mol_type = other DNA
atggagcctgagttcctgtatgacctgctgcagctgcccaagggcgtggagcccccagctgaggaggagctgagcaagggcgtgtgcccctag

SEQ ID NO: 163326 - DNA, 996 bp, synthetic construct; identical to SEQ ID NO: 163323
  misc_feature 1..996: note = Description of Artificial Sequence: Synthetic coding sequence
  source 1..996: mol_type = other DNA

SEQ ID NO: 163327 - DNA, 996 bp, synthetic construct; identical to SEQ ID NO: 163323
  misc_feature 1..996: note = Description of Artificial Sequence: Synthetic coding sequence
  source 1..996: mol_type = other DNA

SEQ ID NO: 163328 - DNA, 414 bp, synthetic construct
  misc_feature 1..414: note = Description of Artificial Sequence: Synthetic coding sequence
  source 1..414: mol_type = other DNA
atggtgcctgccaaggagcaggtgcccggccgctgtgacagcacccagcgctgcttccctggccccagcaactggacaggagctgggggccgggccggcagccagccctttgtgggagatggcaccctgggcacccccaacttctgctgggaccacaaggagaagagagctgctgagagccagctgcaggcctgggaggccatggagcctgagttcctgtatgacctgctgcagctgcccaagggcgtggagcccccagctgaggaggagctgagcaaaggaggcaagaagaagtacctgccccccaccagcaggaaggaccccaagtttgaggagctgcagaagcacacctggcccagccctgtgactggaactggagacaccatctgtggcctggccaggaagacctggtag

SEQ ID NO: 163329 - DNA, 1083 bp, synthetic construct
  misc_feature 1..1083: note = Description of Artificial Sequence: Synthetic coding sequence
  source 1..1083: mol_type = other DNA
atggctgctgagagaggagctggccagcagcagagccaggagatgatggaggtggaccggcgggtggagagcgaggagagcggagatgaggagggcaagaagcacagcagcggcatcgtggccgacctgtctgagcagagcctgaaggatggagaggagcggggggaggaggaccctgaggaggagcacgagctgcctgtggacatggagaccatcaacctggacagagatgctgaagatgtggacctgaaccactaccgcatcggcaagattgagggctttgaggtgctgaagaaggtgaagaccctgtgcctgcggcagaacctgatcaagtgcatcgagaacctggaggagctgcagagcctgcgggagctggacctgtatgacaaccagatcaagaagattgagaacctggaggccctgacagagctggagatcctggacatctccttcaacctgctgagaaatattgaaggagtggacaagctgacccggctgaagaagctgttcctggtgaacaacaagatcagcaagattgagaacctgagcaacctgcaccagctgcagatgctggagctgggcagcaaccgcatccgggccatcgagaacatcgacaccctgaccaacctggagagcctcttcctgggcaagaacaagatcaccaagctgcagaacctggatgccctgaccaacctgactgtgctgtccatgcagagcaaccggctgaccaagattgagggcctgcagaacctggtgaacctgcgggagctgtacctgagccacaacggcatcgaggtgattgagggcctggagaacaacaacaagctgaccatgctggacatcgccagcaaccgcatcaagaagattgagaacatcagccacctgacagagctgcaggagttctggatgaatgacaacctgctggagagctggagcgacctggatgagctgaagggggcccggagcctggagaccgtgtacctggagaggaaccccctgcagaaggacccccagtacagaaggaaggtgatgctggccctgcccagcgtgcggcagattgatgccacctttgtgcgcttctag

SEQ ID NO: 163330 - DNA, 3993 bp, synthetic construct
  misc_feature 1..3993: note = Description of Artificial Sequence: Synthetic coding sequence
  source 1..3993: mol_type = other DNA
atggaggatggcggcctgacagcctttgaggaggaccagcgctgcctgagccagagcctgcccctgcctgtgtctgctgagggccctgctgcccagaccacagctgagcccagccgctccttcagcagcgcccaccgccacctgagcagaagaaatggcctgagccggctgtgccagagcaggacagccctgtctgaggaccgctggagcagctactgcctgagcagcctggccgcccagaacatctgcaccagcaagctgcactgcccagctgcccctgagcacacagaccccagcgagccccggggctctgtgtcctgctgcagcctgctgcggggcctgagcagcggctggagcagccccctgctgcctgcccctgtgtgcaaccccaacaaggccatcttcaccgtggatgccaagaccacagagatcctggtggccaatgacaaggcctgtggcctgctgggctacagcagccaggacctgattggccagaagctgacccagttcttcctgcggagtgacagtgatgtggtggaggccctgtctgaggagcacatggaggctgatggccatgctgctgtggtgtttggaacagtggtggacatcatcagccgctctggagagaagatccctgtgtctgtgtggatgaagaggatgaggcaggagcggcggctgtgctgcgtggtggtgctggagcctgtggagcgggtgtccacctgggtggccttccagagtgatggcaccgtgaccagctgtgacagcctgtttgcccacctgcacggctacgtgtctggagaagatgtggccggccagcacatcacagacctgatccccagcgtgcagctgccccccagcggccagcacatccccaagaacctgaagatccagaggtctgtgggccgggccagagatggcaccaccttccccctgagcctgaagctgaagagccagcccagcagcgaggaggccaccaccggggaggccgcccctgtgtctggctaccgggcctctgtgtgggtgttctgcaccatcagcggcctcatcaccctgctgcctgatggcaccatccacggcatcaaccacagctttgccctgaccctgtttggctacggcaagacagagctgctgggcaagaacatcaccttcctgatccctggcttctacagctacatggacctggcctacaacagcagcctgcagctgcctgacctggccagctgcctggatgtgggcaatgaaagtggctgtggggagaggaccctggacccctggcagggccaggaccctgctgagggcggccaggacccccgcatcaacgtggtgctggccggcggccacgtggtgcccagagatgagatcaggaagctgatggagagccaggacatcttcaccggcacccagacagagctgattgctgggggccagctgctgagctgcctgagcccccagcctgcccctggggtggacaacgtgcctgagggcagcctgcctgtgcacggggagcaggccctgcccaaggaccagcagatcacagccctgggccgggaggagcctgtggccatcgagagccctggccaggacctgctgggggagagccgctctgagcctgtggatgtgaagccctttgccagctgtgaagattctgaggcccctgtgcctgcagaagatggcggcagtgatgctggcatgtgtggcctgtgccagaaggcccagctggagaggatgggcgtgtctggccccagcggcagtgacctgtgggccggggctgctgtggccaagccccaggccaagggccagctggccggcggcagcctgctgatgcactgcccctgctacggcagcgagtggggcctgtggtggaggagccaggacctggcccccagccccagcggcatggccggcctgagctttggcacccccaccctggatgagccctggctgggcgtggagaatgaccgggaggagctgcagacctgcctgatcaaggagcagctgagccagctgagcctggccggggccctggatgtgccccacgccgagctggtgcccacagagtgccaggccgtgacagcccctgtgagcagctgtgacctgggcggccgggacctgtgtggcggctgcaccggcagcagcagcgcctgctacgccctggccacagacctgcccggcggcctggaggccgtggaggcccaggaggtggatgtgaacagcttctcctggaacctgaaggagctgttcttcagtgaccagacagaccagaccagcagcaactgcagctgtgccaccagcgagctgcgggagacccccagcagcctggccgtgggcagtgaccctgatgtgggcagcctgcaggagcagggcagctgtgtgctggatgaccgggagctgctgctgctgaccggcacctgtgtggacctgggccagggccgccgcttccgggagagctgtgtgggccatgaccccacagagcccctggaggtgtgcctggtgtcctctgagcactatgctgccagtgaccgggagagccctggccacgtgcccagcaccctggatgctggccctgaggacacctgccccagcgctgaggagccccggctgaatgtgcaggtgaccagcacccctgtgattgtgatgagaggagctgctggcctgcagcgggagatccaggagggcgcctacagcggcagctgctaccacagagatggcctgcggctgagcatccagtttgaggtgagaagagtggagctgcagggccccacccccctcttctgctgctggctggtgaaggacctgctgcacagccagagggacagcgctgcccggaccaggctcttcctggccagcctgcccggcagcacccacagcacagctgctgagctgaccggccccagcctggtggaggtgctgcgggcccggccctggtttgaggagccccccaaggctgtggagctggagggcctggccgcctgtgagggggagtacagccagaagtacagcaccatgagccccctgggcagcggggccttcggctttgtgtggacagctgtggacaaggagaagaacaaggaggtggtggtgaagttcatcaagaaggagaaggtgctggaggactgctggattgaggaccccaagctgggcaaggtgaccctggagatcgccatcctgagccgggtggagcacgccaacatcatcaaggtgctggacatctttgagaaccagggcttcttccagctggtgatggagaagcacggcagcggcctggacctgtttgccttcatcgacagacacccccggctggatgagcccctggccagctacatcttccggcaggtgcgggccggccagagccggctggtgtctgctgtgggctacctgcggctgaaggacatcatccaccgggacatcaaggatgaaaatattgtgattgctgaggacttcaccatcaagctgattgactttggcagcgctgcctacctggagcggggcaagctgttctacaccttctgtggcaccatcgagtactgtgcccctgaggtgctgatgggcaacccctaccggggccctgagctggagatgtggagcctgggcgtgaccctgtacaccctggtgtttgaggagaaccccttctgtgagctggaggagaccgtggaggccgccatccaccccccctacctggtgtccaaggagctgatgagcctggtgtctggcctgctgcagcctgtgcctgagaggaggaccaccctggagaagctggtgacagacccctgggtgacccagcctgtgaacctggccgactacacctgggaggaggtgttccgggtgaacaagccagagagcggcgtgctgtctgctgccagcctggagatgggcaacagaagcctgagtgatgtggcccaggcccaggagctgtgtggcggccctgtgcctggagaggccccaaatggccagggctgcctgcaccctggggacccccggctgctgaccagctag

SEQ ID NO: 163331 - DNA, 3972 bp, synthetic construct
  misc_feature 1..3972: note = Description of Artificial Sequence: Synthetic coding sequence
  source 1..3972: mol_type = other DNA
atggaggatggcggcctgacagcctttgaggaggaccagcgctgcctgagccagagcctgcccctgcctgtgtctgctgagggccctgctgcccagaccacagctgagcccagccgctccttcagcagcgcccaccgccacctgagcagaagaaatggcctgagccggctgtgccagagcaggacagccctgtctgaggaccgctggagcagctactgcctgagcagcctggccgcccagaacatctgcaccagcaagctgcactgcccagctgcccctgagcacacagaccccagcgagccccggggctctgtgtcctgctgcagcctgctgcggggcctgagcagcggctggagcagccccctgctgcctgcccctgtgtgcaaccccaacaaggccatcttcaccgtggatgccaagaccacagagatcctggtggccaatgacaaggcctgtggcctgctgggctacagcagccaggacctgattggccagaagctgacccagttcttcctgcggagtgacagtgatgtggtggaggccctgtctgaggagcacatggaggctgatggccatgctgctgtggtgtttggaacagtggtggacatcatcagccgctctggagagaagatccctgtgtctgtgtggatgaagaggatgaggcaggagcggcggctgtgctgcgtggtggtgctggagcctgtggagcgggtgtccacctgggtggccttccagagtgatggcaccgtgaccagctgtgacagcctgtttgcccacctgcacggctacgtgtctggagaagatgtggccggccagcacatcacagacctgatccccagcgtgcagctgccccccagcggccagcacatccccaagaacctgaagatccagaggtctgtgggccgggccagagatggcaccaccttccccctgagcctgaagctgaagagccagcccagcagcgaggaggccaccaccggggaggccgcccctgtgtctggctaccgggcctctgtgtgggtgttctgcaccatcagcggcctcatcaccctgctgcctgatggcaccatccacggcatcaaccacagctttgccctgaccctgtttggctacggcaagacagagctgctgggcaagaacatcaccttcctgatccctggcttctacagctacatggacctggcctacaacagcagcctgcagctgcctgacctggccagctgcctggatgtgggcaatgaaagtggctgtggggagaggaccctggacccctggcagggccaggaccctgctgagggcggccaggacccccgcatcaacgtggtgctggccggcggccacgtggtgcccagagatgagatcaggaagctgatggagagccaggacatcttcaccggcacccagacagagctgattgctgggggccagctgctgagctgcctgagcccccagcctgcccctggggtggacaacgtgcctgagggcagcctgcctgtgcacggggagcaggccctgcccaaggaccagcagatcacagccctgggccgggaggagcctgtggccatcgagagccctggccaggacctgctgggggagagccgctctgagcctgtggatgtgaagccctttgccagctgtgaagattctgaggcccctgtgcctgcagaagatggcggcagtgatgctggcatgtgtggcctgtgccagaaggcccagctggagaggatgggcgtgtctggccccagcggcagtgacctgtgggccggggctgctgtggccaagccccaggccaagggccagctggccggcggcagcctgctgatgcactgcccctgctacggcagcgagtggggcctgtggtggaggagccaggacctggcccccagccccagcggcatggccggcctgagctttggcacccccaccctggatgagccctggctgggcgtggagaatgaccgggaggagctgcagacctgcctgatcaaggagcagctgagccagctgagcctggccggggccctggatgtgccccacgccgagctggtgcccacagagtgccaggccgtgacagcccctgtgagcagctgtgacctgggcggccgggacctgtgtggcggctgcaccggcagcagcagcgcctgctacgccctggccacagacctgcccggcggcctggaggccgtggaggcccaggaggtggatgtgaacagcttctcctggaacctgaaggagctgttcttcagtgaccagacagaccagaccagcagcaactgcagctgtgccaccagcgagctgcgggagacccccagcagcctggccgtgggcagtgaccctgatgtgggcagcctgcaggagcagggcagctgtgtgctggatgaccgggagctgctgctgctgaccggcacctgtgtggacctgggccagggccgccgcttccgggagagctgtgtgggccatgaccccacagagcccctggaggtgtgcctggtgtcctctgagcactatgctgccagtgaccgggagagccctggccacgtgcccagcaccctggatgctggccctgaggacacctgccccagcgctgaggagccccggctgaatgtgcaggtgaccagcacccctgtgattgtgatgagaggagctgctggcctgcagcgggagatccaggagggcgcctacagcggcagctgctaccacagagatggcctgcggctgagcatccagtttgaggtgagaagagtggagctgcagggccccacccccctcttctgctgctggctggtgaaggacctgctgcacagccagagggacagcgctgcccggaccaggctcttcctggccagcctgcccggcagcacccacagcacagctgctgagctgaccggccccagcctggtggaggtgctgcgggcccggccctggtttgaggagccccccaaggctgtggagctggagggcctggccgcctgtgagggggagtacagccagaagtacagcaccatgagccccctgggcagcggggccttcggctttgtgtggacagctgtggacaaggagaagaacaaggaggtggtggtgaagttcatcaagaaggagaaggtgctggaggactgctggattgaggaccccaagctgggcaaggtgaccctggagatcgccatcctgagccgggtggagcacgccaacatcatcaaggtgctggacatctttgagaaccagggcttcttccagctggtgatggagaagcacggcagcggcctggacctgtttgccttcatcgacagacacccccggctggatgagcccctggccagctacatcttccggcagctggtgtctgctgtgggctacctgcggctgaaggacatcatccaccgggacatcaaggatgagaacatcgtgattgctgaggacttcaccatcaagctgattgactttggatctgctgcctacctggagcggggcaagctgttctacaccttctgtggcaccatcgagtactgtgcccctgaggtgctgatgggcaacccctaccggggccctgagctggagatgtggagcctgggcgtgaccctgtacaccctggtgtttgaggagaaccccttctgtgagctggaggagaccgtggaggccgccatccaccccccctacctggtgtccaaggagctgatgagcctggtgtctggcctgctgcagcctgtgcctgagaggaggaccaccctggagaagctggtgacagacccctgggtgacccagcctgtgaacctggccgactacacctgggaggaggtgttccgggtgaacaagccagagagcggcgtgctgtctgctgccagcctggagatgggcaacagaagcctgagtgatgtggcccaggcccaggagctgtgtggcggccctgtgcctggagaggcccccaacggccagggctgcctgcaccctggggacccccggctgctgaccagctag

SEQ ID NO: 163332 - DNA, 378 bp, synthetic construct
  misc_feature 1..378: note = Description of Artificial Sequence: Synthetic coding sequence
  source 1..378: mol_type = other DNA
atggaggatggcggcctgacagcctttgaggaggaccagcgctgcctgagccagagcctgcccctgcctgtgtctgctgagggccctgctgcccagaccacagctgagcccagccgctccttcagcagcgcccaccgccacctgagcagaagaaatggcctgagccggctgtgccagagcaggacagccctgtctgaggaccgctggagcagctactgcctgagcagcctggccgcccagaacatctgcaccagcaagctgcactgcccagctgcccctgagcacacagaccccagcgagccccggggctctgtgtcctgctgcagcctgctgcggggcctgagcagcggctggagcagccccctgctgcctgcctag

SEQ ID NO: 163333 - DNA, 3324 bp, synthetic construct
  misc_feature 1..3324: note = Description of Artificial Sequence: Synthetic coding sequence
  source 1..3324: mol_type = other DNA
atgaagaggatgaggcaggagcggcggctgtgctgcgtggtggtgctggagcctgtggagcgggtgtccacctgggtggccttccagagtgatggcaccgtgaccagctgtgacagcctgtttgcccacctgcacggctacgtgtctggagaagatgtggccggccagcacatcacagacctgatccccagcgtgcagctgccccccagcggccagcacatccccaagaacctgaagatccagaggtctgtgggccgggccagagatggcaccaccttccccctgagcctgaagctgaagagccagcccagcagcgaggaggccaccaccggggaggccgcccctgtgtctggctaccgggcctctgtgtgggtgttctgcaccatcagcggcctcatcaccctgctgcctgatggcaccatccacggcatcaaccacagctttgccctgaccctgtttggctacggcaagacagagctgctgggcaagaacatcaccttcctgatccctggcttctacagctacatggacctggcctacaacagcagcctgcagctgcctgacctggccagctgcctggatgtgggcaatgaaagtggctgtggggagaggaccctggacccctggcagggccaggaccctgctgagggcggccaggacccccgcatcaacgtggtgctggccggcggccacgtggtgcccagagatgagatcaggaagctgatggagagccaggacatcttcaccggcacccagacagagctgattgctgggggccagctgctgagctgcctgagcccccagcctgcccctggggtggacaacgtgcctgagggcagcctgcctgtgcacggggagcaggccctgcccaaggaccagcagatcacagccctgggccgggaggagcctgtggccatcgagagccctggccaggacctgctgggggagagccgctctgagcctgtggatgtgaagccctttgccagctgtgaagattctgaggcccctgtgcctgcagaagatggcggcagtgatgctggcatgtgtggcctgtgccagaaggcccagctggagaggatgggcgtgtctggccccagcggcagtgacctgtgggccggggctgctgtggccaagccccaggccaagggccagctggccggcggcagcctgctgatgcactgcccctgctacggcagcgagtggggcctgtggtggaggagccaggacctggcccccagccccagcggcatggccggcctgagctttggcacccccaccctggatgagccctggctgggcgtggagaatgaccgggaggagctgcagacctgcctgatcaaggagcagctgagccagctgagcctggccggggccctggatgtgccccacgccgagctggtgcccacagagtgccaggccgtgacagcccctgtgagcagctgtgacctgggcggccgggacctgtgtggcggctgcaccggcagcagcagcgcctgctacgccctggccacagacctgcccggcggcctggaggccgtggaggcccaggaggtggatgtgaacagcttctcctggaacctgaaggagctgttcttcagtgaccagacagaccagaccagcagcaactgcagctgtgccaccagcgagctgcgggagacccccagcagcctggccgtgggcagtgaccctgatgtgggcagcctgcaggagcagggcagctgtgtgctggatgaccgggagctgctgctgctgaccggcacctgtgtggacctgggccagggccgccgcttccgggagagctgtgtgggccatgaccccacagagcccctggaggtgtgcctggtgtcctctgagcactatgctgccagtgaccgggagagccctggccacgtgcccagcaccctggatgctggccctgaggacacctgccccagcgctgaggagccccggctgaatgtgcaggtgaccagcacccctgtgattgtgatgagaggagctgctggcctgcagcgggagatccaggagggcgcctacagcggcagctgctaccacagagatggcctgcggctgagcatccagtttgaggtgagaagagtggagctgcagggccccacccccctcttctgctgctggctggtgaaggacctgctgcacagccagagggacagcgctgcccggaccaggctcttcctggccagcctgcccggcagcacccacagcacagctgctgagctgaccggccccagcctggtggaggtgctgcgggcccggccctggtttgaggagccccccaaggctgtggagctggagggcctggccgcctgtgagggggagtacagccagaagtacagcaccatgagccccctgggcagcggggccttcggctttgtgtggacagctgtggacaaggagaagaacaaggaggtggtggtgaagttcatcaagaaggagaaggtgctggaggactgctggattgaggaccccaagctgggcaaggtgaccctggagatcgccatcctgagccgggtggagcacgccaacatcatcaaggtgctggacatctttgagaaccagggcttcttccagctggtgatggagaagcacggcagcggcctggacctgtttgccttcatcgacagacacccccggctggatgagcccctggccagctacatcttccggcagctggtgtctgctgtgggctacctgcggctgaaggacatcatccaccgggacatcaaggatgagaacatcgtgattgctgaggacttcaccatcaagctgattgactttggatctgctgcctacctggagcggggcaagctgttctacaccttctgtggcaccatcgagtactgtgcccctgaggtgctgatgggcaacccctaccggggccctgagctggagatgtggagcctgggcgtgaccctgtacaccctggtgtttgaggagaaccccttctgtgagctggaggagaccgtggaggccgccatccaccccccctacctggtgtccaaggagctgatgagcctggtgtctggcctgctgcagcctgtgcctgagaggaggaccaccctggagaagctggtgacagacccctgggtgacccagcctgtgaacctggccgactacacctgggaggaggtgttccgggtgaacaagccagagagcggcgtgctgtctgctgccagcctggagatgggcaacagaagcctgagtgatgtggcccaggcccaggagctgtgtggcggccctgtgcctggagaggcccccaacggccagggctgcctgcaccctggggacccccggctgctgaccagctag

SEQ ID NO: 163334 - DNA, 3414 bp, synthetic construct
  misc_feature 1..3414: note = Description of Artificial Sequence: Synthetic coding sequence
  source 1..3414: mol_type = other DNA
atgggcttcccagacagcgcccgggccggccagaggagcctggtggacatcatcagccgctctggagagaagatccctgtgtctgtgtggatgaagaggatgaggcaggagcggcggctgtgctgcgtggtggtgctggagcctgtggagcgggtgtccacctgggtggccttccagagtgatggcaccgtgaccagctgtgacagcctgtttgcccacctgcacggctacgtgtctggagaagatgtggccggccagcacatcacagacctgatccccagcgtgcagctgccccccagcggccagcacatccccaagaacctgaagatccagaggtctgtgggccgggccagagatggcaccaccttccccctgagcctgaagctgaagagccagcccagcagcgaggaggccaccaccggggaggccgcccctgtgtctggctaccgggcctctgtgtgggtgttctgcaccatcagcggcctcatcaccctgctgcctgatggcaccatccacggcatcaaccacagctttgccctgaccctgtttggctacggcaagacagagctgctgggcaagaacatcaccttcctgatccctggcttctacagctacatggacctggcctacaacagcagcctgcagctgcctgacctggccagctgcctggatgtgggcaatgaaagtggctgtggggagaggaccctggacccctggcagggccaggaccctgctgagggcggccaggacccccgcatcaacgtggtgctggccggcggccacgtggtgcccagagatgagatcaggaagctgatggagagccaggacatcttcaccggcacccagacagagctgattgctgggggccagctgctgagctgcctgagcccccagcctgcccctggggtggacaacgtgcctgagggcagcctgcctgtgcacggggagcaggccctgcccaaggaccagcagatcacagccctgggccgggaggagcctgtggccatcgagagccctggccaggacctgctgggggagagccgctctgagcctgtggatgtgaagccctttgccagctgtgaagattctgaggcccctgtgcctgcagaagatggcggcagtgatgctggcatgtgtggcctgtgccagaaggcccagctggagaggatgggcgtgtctggccccagcggcagtgacctgtgggccggggctgctgtggccaagccccaggccaagggccagctggccggcggcagcctgctgatgcactgcccctgctacggcagcgagtggggcctgtggtggaggagccaggacctggcccccagccccagcggcatggccggcctgagctttggcacccccaccctggatgagccctggctgggcgtggagaatgaccgggaggagctgcagacctgcctgatcaaggagcagctgagccagctgagcctggccggggccctggatgtgccccacgccgagctggtgcccacagagtgccaggccgtgacagcccctgtgagcagctgtgacctgggcggccgggacctgtgtggcggctgcaccggcagcagcagcgcctgctacgccctggccacagacctgcccggcggcctggaggccgtggaggcccaggaggtggatgtgaacagcttctcctggaacctgaaggagctgttcttcagtgaccagacagaccagaccagcagcaactgcagctgtgccaccagcgagctgcgggagacccccagcagcctggccgtgggcagtgaccctgatgtgggcagcctgcaggagcagggcagctgtgtgctggatgaccgggagctgctgctgctgaccggcacctgtgtggacctgggccagggccgccgcttccgggagagctgtgtgggccatgaccccacagagcccctggaggtgtgcctggtgtcctctgagcactatgctgccagtgaccgggagagccctggccacgtgcccagcaccctggatgctggccctgaggacacctgccccagcgctgaggagccccggctgaatgtgcaggtgaccagcacccctgtgattgtgatgagaggagctgctggcctgcagcgggagatccaggagggcgcctacagcggcagctgctaccacagagatggcctgcggctgagcatccagtttgaggtgagaagagtggagctgcagggccccacccccctcttctgctgctggctggtgaaggacctgctgcacagccagagggacagcgctgcccggaccaggctcttcctggccagcctgcccggcagcacccacagcacagctgctgagctgaccggccccagcctggtggaggtgctgcgggcccggccctggtttgaggagccccccaaggctgtggagctggagggcctggccgcctgtgagggggagtacagccagaagtacagcaccatgagccccctgggcagcggggccttcggctttgtgtggacagctgtggacaaggagaagaacaaggaggtggtggtgaagttcatcaagaaggagaaggtgctggaggactgctggattgaggaccccaagctgggcaaggtgaccctggagatcgccatcctgagccgggtggagcacgccaacatcatcaaggtgctggacatctttgagaaccagggcttcttccagctggtgatggagaagcacggcagcggcctggacctgtttgccttcatcgacagacacccccggctggatgagcccctggccagctacatcttccggcagctggtgtctgctgtgggctacctgcggctgaaggacatcatccaccgggacatcaaggatgagaacatcgtgattgctgaggacttcaccatcaagctgattgactttggatctgctgcctacctggagcggggcaagctgttctacaccttctgtggcaccatcgagtactgtgcccctgaggtgctgatgggcaacccctaccggggccctgagctggagatgtggagcctgggcgtgaccctgtacaccctggtgtttgaggagaaccccttctgtgagctggaggagaccgtggaggccgccatccaccccccctacctggtgtccaaggagctgatgagcctggtgtctggcctgctgcagcctgtgcctgagaggaggaccaccctggagaagctggtgacagacccctgggtgacccagcctgtgaacctggccgactacacctgggaggaggtgttccgggtgaacaagccagagagcggcgtgctgtctgctgccagcctggagatgggcaacagaagcctgagtgatgtggcccaggcccaggagctgtgtggcggccctgtgcctggagaggcccccaacggccagggctgcctgcaccctggggacccccggctgctgaccagctag

SEQ ID NO: 163335 - DNA, 3432 bp, synthetic construct
  misc_feature 1..3432: note = Description of Artificial Sequence: Synthetic coding sequence
  source 1..3432: mol_type = other DNA
atggaggatggcggcctgacagcctttgaggaggaccagcgctgcctgagccagagcctgcccctgcctgtgtctgctgagggccctgctgcccagaccacagctgagcccagccgctccttcagcagcgcccaccgccacctgagcagaagaaatggcctgagccggctgtgccagagcaggacagccctgtctgaggaccgctggagcagctactgcctgagcagcctggccgcccagaacatctgcaccagcaagctgcactgcccagctgcccctgagcacacagaccccagcgagccccggggctctgtgtcctgctgcagcctgctgcggggcctgagcagcggctggagcagccccctgctgcctgcccctgtgtgcaaccccaacaaggccatcttcaccgtggatgccaagaccacagagatcctggtggccaatgacaaggcctgtggcctgctgggctacagcagccaggacctgattggccagaagctgacccagttcttcctgcggagtgacagtgatgtggtggaggccctgtctgaggagcacatggaggctgatggccatgctgctgtggtgtttggaacagtggtggacatcatcagccgctctggagagaagatccctgtgtctgtgtggatgaagaggatgaggcaggagcggcggctgtgctgcgtggtggtgctggagcctgtggagcgggtgtccacctgggtggccttccagagtgatggcaccgtgaccagctgtgacagcctgtttgcccacctgcacggctacgtgtctggagaagatgtggccggccagcacatcacagacctgatccccagcgtgcagctgccccccagcggccagcacatccccaagaacctgaagatccagaggtctgtgggccgggccagagatggcaccaccttccccctgagcctgaagctgaagagccagcccagcagcgaggaggccaccaccggggaggccgcccctgtgtctggctaccgggcctctgtgtgggtgttctgcaccatcagcggcctcatcaccctgctgcctgatggcaccatccacggcatcaaccacagctttgccctgaccctgtttggctacggcaagacagagctgctgggcaagaacatcaccttcctgatccctggcttctacagctacatggacctggcctacaacagcagcctgcagctgcctgacctggccagctgcctggatgtgggcaatgaaagtggctgtggggagaggaccctggacccctggcagggccaggaccctgctgagggcggccaggacccccgcatcaacgtggtgctggccggcggccacgtggtgcccagagatgagatcaggaagctgatggagagccaggacatcttcaccggcacccagacagagctgattgctgggggccagctgctgagctgcctgagcccccagcctgcccctggggtggacaacgtgcctgagggcagcctgcctgtgcacggggagcaggccctgcccaaggaccagcagatcacagccctgggccgggaggagcctgtggccatcgagagccctggccaggacctgctgggggagagccgctctgagcctgtggatgtgaagccctttgccagctgtgaagattctgaggcccctgtgcctgcagaagatggcggcagtgatgctggcatgtgtggcctgtgccagaaggcccagctggagaggatgggcgtgtctggccccagcggcagtgacctgtgggccggggctgctgtggccaagccccaggccaagggccagctggccggcggcagcctgctgatgcactgcccctgctacggcagcgagtggggcctgtggtggaggagccaggacctggcccccagccccagcggcatggccggcctgagctttggcacccccaccctggatgagccctggctgggcgtggagaatgaccgggaggagctgcagacctgcctgatcaaggagcagctgagccagctgagcctggccggggccctggatgtgccccacgccgagctggtgcccacagagtgccaggccgtgacagcccctgtgagcagctgtgacctgggcggccgggacctgtgtggcggctgcaccggcagcagcagcgcctgctacgccctggccacagacctgcccggcggcctggaggccgtggaggcccaggaggtggatgtgaacagcttctcctggaacctgaaggagctgttcttcagtgaccagacagaccagaccagcagcaactgcagctgtgccaccagcgagctgcgggagacccccagcagcctggccgtgggcagtgaccctgatgtgggcagcctgcaggagcagggcagctgtgtgctggatgaccgggagctgctgctgctgaccggcacctgtgtggacctgggccagggccgccgcttccgggagagctgtgtgggccatgaccccacagagcccctggaggtgtgcctggtgtcctctgagcactatgctgccagtgaccgggagagccctggccacgtgcccagcaccctggatgctggccctgaggacacctgccccagcgctgaggagccccggctgaatgtgcaggtgaccagcacccctgtgattgtgatgagaggagctgctggcctgcagcgggagatccaggagggcgcctacagcggcagctgctaccacagagatggcctgcggctgagcatccagtttgaggtgagaagagtggagctgcagggccccacccccctcttctgctgctggctggtgaaggacctgctgcacagccagagggacagcgctgcccggaccaggctcttcctggccagcctgcccggcagcacccacagcacagctgctgagctgaccggccccagcctggtggaggtgctgcgggcccggccctggtttgaggagccccccaaggctgtggagctggagggcctggccgcctgtgagggggagtacagccagaagtacagcaccatgagccccctgggcagcggggccttcggctttgtgtggacagctgtggacaaggagaagaacaaggaggtggtggtgaagttcatcaagaaggagaaggtgctggaggactgctggattgaggaccccaagctgggcaaggtgaccctggagatcgccatcctgagccgggtggagcacgccaacatcatcaaggtgctggacatctttgagaaccagggcttcttccagctggtgatggagaagcacggcagcggcctggacctgtttgccttcatcgacagacacccccggctggatgagcccctggccagctacatcttccggcaggtgcgggccggccagagccgggtgtctgtgaatgccggcctgggcgcctgggtgcgctggctgcagaggagcgtcatccacacccgcttcagcctgtag

SEQ ID NO: 163336 - DNA, 1314 bp, synthetic construct
  misc_feature 1..1314: note = Description of Artificial Sequence: Synthetic coding sequence
  source 1..1314: mol_type = other DNA
atggtgcagatgatgaggcagttcctgtacagagtgctgcctgaagattcctacaaggtgaccaccgggaagctgcacgtgtccctgacccggctgacagatggagaaaatgtggtggtgtctgagttcaccagcaaggaggagctgattgaggccctgtactgcagctgctttgtgcctgtgtactgcggcctcatcccccccacctaccggggcgtgcgctacattgatggcggcttcaccggcatgcagccctgtgccttctggacagatgccatcaccatcagcaccttcagcggccagcaggacatctgcccccgggactgcccagccatcttccatgacttcaggatgttcaactgcagcttccagttcagcctggagaacatcgccaggatgacccacgccctcttccccccagacctggtgatcctgcatgactactactaccggggctatgaagatgctgtgctgtacctgcggcggctgaatgctgtgtacctgaacagcagcagcaagagggtcatcttcccccgggtggaggtgtactgccagatcgagctggccctgggcaatgaatgtcctgagaggagccagcccagcctgcgggcccggcaggccagcctggagggcgccacccagccccacaaggagtgggtgcccaagggagatggccggggcagccacggcccccctgtgtcccagcctgtgcagaccctggagttcacctgtgagagccctgtgtctgcccctgtgagccccctggagcagcccccagcccagcccctggccagcagcacccccctgagcctgagcggcatgcctcctgtgtccttccctgctgtgcacaagccacccagcagcaccccaggcagcagcctgcccaccccacctcctggcctgagccccctgagcccccagcagcaggtgcagcccagcggcagccctgcccggagcctgcacagccaggcccccaccagcccccggcccagcctgggccccagcacagtgggcgccccccagaccctgcccaggagcagcctgagcgccttccctgcccagccccctgtggaggagctgggccaggagcagccccaggccgtggccctgctggtgagcagcaagcccaagtctgctgtgcccctggtgcacgtgaaggagaccgtgtccaagccctacgtgacagagagccctgctgaggacagcaactgggtgaacaaggtgttcaagaagaacaagcagaagaccagcggcaccaggaagggcttccccaggcacagcggcagcaagaagcccagcagcaaggtgcagtag

SEQ ID NO: 163337 - DNA, 1599 bp, synthetic construct
  misc_feature 1..1599: note = Description of Artificial Sequence: Synthetic coding sequence
  source 1..1599: mol_type = other DNA
atggaggagcaggtgttcaagggggaccctgacaccccccacagcatctccttcagcggcagcggcttcctgtccttctaccaggccggggctgtggatgccctgcgggacctggcccccaggatgctggagacagcccacagatttgctggcaccagcgctggagctgtgattgctgccctggccatctgtggcatcgagatggatgagtacctgcgggtgctgaatgtgggcgtggccgaggtgaagaagagcttcctgggccccctgagccccagctgcaagatggtgcagatgatgaggcagttcctgtacagagtgctgcctgaggacagctacaaggtgaccaccgggaagctgcacgtgtccctgacccggctgacagatggagaaaatgtggtggtgtctgagttcaccagcaaggaggagctgattgaggccctgtactgcagctgctttgtgcctgtgtactgcggcctcatcccccccacctacagaggagtgcgctacattgatggcggcttcaccggcatgcagccctgtgccttctggacagatgccatcaccatcagcaccttcagcggccagcaggacatctgcccccgggactgcccagccatcttccatgacttcaggatgttcaactgcagcttccagttcagcctggagaacatcgccaggatgacccacgccctcttccccccagacctggtgatcctgcatgactactactaccggggctatgaagatgctgtgctgtacctgcggcggctgaatgctgtgtacctgaacagcagcagcaagagggtcatcttcccccgggtggaggtgtactgccagatcgagctggccctgggcaatgaatgtcctgagaggagccagcccagcctgcgggcccggcaggccagcctggagggcgccacccagccccacaaggagtgggtgcccaagggagatggccggggcagccacggcccccctgtgtcccagcctgtgcagaccctggagttcacctgtgagagccctgtgtctgcccctgtgagccccctggagcagcccccagcccagcccctggccagcagcacccccctgagcctgagcggcatgcctcctgtgtccttccctgctgtgcacaagccacccagcagcaccccaggcagcagcctgcccaccccacctcctggcctgagccccctgagcccccagcagcaggtgcagcccagcggcagccctgcccggagcctgcacagccaggcccccaccagcccccggcccagcctgggccccagcacagtgggcgccccccagaccctgcccaggagcagcctgagcgccttccctgcccagccccctgtggaggagctgggccaggagcagccccaggccgtggccctgctggtgagcagcaagcccaagtctgctgtgcccctggtgcacgtgaaggagaccgtgtccaagccctacgtgacagagagccctgctgaggacagcaactgggtgaacaaggtgttcaagaagaacaagcagaagaccagcggcaccaggaagggcttccccaggcacagcggcagcaagaagcccagcagcaaggtgcagtag

SEQ ID NO: 163338 - DNA, 1602 bp, synthetic construct
  misc_feature 1..1602: note = Description of Artificial Sequence: Synthetic coding sequence
  source 1..1602: mol_type = other DNA
atggaggagcaggtgttcaagggggaccctgacaccccccacagcatctccttcagcggcagcggcttcctgtccttctaccaggccggggctgtggatgccctgcgggacctggcccccaggatgctggagacagcccacagatttgctggcaccagcgctggagctgtgattgctgccctggccatctgtggcatcgagatggatgagtacctgcgggtgctgaatgtgggcgtggccgaggtgaagaagagcttcctgggccccctgagccccagctgcaagatggtgcagatgatgaggcagttcctgtacagagtgctgcctgaggacagctacaaggtgaccaccgggaagctgcacgtgtccctgacccggctgacagatggagaaaatgtggtggtgtctgagttcaccagcaaggaggagctgattgaagctgccctgtactgcagctgctttgtgcctgtgtactgcggcctcatcccccccacctaccggggcgtgcgctacattgatggcggcttcaccggcatgcagccctgtgccttctggacagatgccatcaccatcagcaccttcagcggccagcaggacatctgcccccgggactgcccagccatcttccatgacttcaggatgttcaactgcagcttccagttcagcctggagaacatcgccaggatgacccacgccctcttccccccagacctggtgatcctgcatgactactactaccggggctatgaagatgctgtgctgtacctgcggcggctgaatgctgtgtacctgaacagcagcagcaagagggtcatcttcccccgggtggaggtgtactgccagatcgagctggccctgggcaatgaatgtcctgagaggagccagcccagcctgcgggcccggcaggccagcctggagggcgccacccagccccacaaggagtgggtgcccaagggagatggccggggcagccacggcccccctgtgtcccagcctgtgcagaccctggagttcacctgtgagagccctgtgtctgcccctgtgagccccctggagcagcccccagcccagcccctggccagcagcacccccctgagcctgagcggcatgcctcctgtgtccttccctgctgtgcacaagccacccagcagcaccccaggcagcagcctgcccaccccacctcctggcctgagccccctgagcccccagcagcaggtgcagcccagcggcagccctgcccggagcctgcacagccaggcccccaccagcccccggcccagcctgggccccagcacagtgggcgccccccagaccctgcccaggagcagcctgagcgccttccctgcccagccccctgtggaggagctgggccaggagcagccccaggccgtggccctgctggtgagcagcaagcccaagtctgctgtgcccctggtgcacgtgaaggagaccgtgtccaagccctacgtgacagagagccctgctgaggacagcaactgggtgaacaaggtgttcaagaagaacaagcagaagaccagcggcaccaggaagggcttccccaggcacagcggcagcaagaagcccagcagcaaggtgcagtag

SEQ ID NO: 163339 - DNA, 1341 bp, synthetic construct
  misc_feature 1..1341: note = Description of Artificial Sequence: Synthetic coding sequence
  source 1..1341: mol_type = other DNA
atggtgcagatgatgaggcagttcctgtacagagtgctgcctgaagattcctacaaggtgaccaccgggaagctgcacgtgtccctgacccggctgacagatggagaaaatgtggtggtgtctgagttcaccagcaaggaggagctgattgaggccctgtactgcagctgctttgtgcctgtgtactgcggcctcatcccccccacctaccggggcgtgtgggccttcctgaccctgcccccccagcgctacattgatggcggcttcaccggcatgcagccctgtgccttctggacagatgccatcaccatcagcaccttcagcggccagcaggacatctgcccccgggactgcccagccatcttccatgacttcaggatgttcaactgcagcttccagttcagcctggagaacatcgccaggatgacccacgccctcttccccccagacctggtgatcctgcatgactactactaccggggctatgaagatgctgtgctgtacctgcggcggctgaatgctgtgtacctgaacagcagcagcaagagggtcatcttcccccgggtggaggtgtactgccagatcgagctggccctgggcaatgaatgtcctgagaggagccagcccagcctgcgggcccggcaggccagcctggagggcgccacccagccccacaaggagtgggtgcccaagggagatggccggggcagccacggcccccctgtgtcccagcctgtgcagaccctggagttcacctgtgagagccctgtgtctgcccctgtgagccccctggagcagcccccagcccagcccctggccagcagcacccccctgagcctgagcggcatgcctcctgtgtccttccctgctgtgcacaagccacccagcagcaccccaggcagcagcctgcccaccccacctcctggcctgagccccctgagcccccagcagcaggtgcagcccagcggcagccctgcccggagcctgcacagccaggcccccaccagcccccggcccagcctgggccccagcacagtgggcgccccccagaccctgcccaggagcagcctgagcgccttccctgcccagccccctgtggaggagctgggccaggagcagccccaggccgtggccctgctggtgagcagcaagcccaagtctgctgtgcccctggtgcacgtgaaggagaccgtgtccaagccctacgtgacagagagccctgctgaggacagcaactgggtgaacaaggtgttcaagaagaacaagcagaagaccagcggcaccaggaagggcttccccaggcacagcggcagcaagaagcccagcagcaaggtgcagtag

SEQ ID NO: 163340 - DNA, 1515 bp, synthetic construct
  misc_feature 1..1515: note = Description of Artificial Sequence: Synthetic coding sequence
  source 1..1515: mol_type = other DNA
atgttcccccgggagaagacctggaacatcagctttgctggctgcggcttcctgggcgtgtactacgtgggcgtggccagctgcctgcgggagcacgcccccttcctggtggccaatgccacccacatctacggggccagcgctggggccctgacagccacagccctggtgactggagtgtgcctgggggaggccggggccaagttcatcgaggtgtccaaggaggccaggaagcgcttcctgggccccctgcaccccagcttcaacctggtgaagatcatccgctccttcctgctgaaggtgctgcctgctgacagccatgaacatgccagcggccgcctgggcatcagcctgaccagggtgtctgatggagaaaatgtcatcatcagccacttcaacagcaaggatgagctgatccaggccaacgtgtgcagcggcttcatccctgtgtactgcggcctcatcccccccagcctgcagggcgtgcgctacgtggatggcggcatcagtgacaacctgcccctgtatgagctgaagaacaccatcaccgtgagccccttcagcggggagagtgacatctgcccccaggacagcagcaccaacatccacgagctgcgggtgaccaacaccagcatccagttcaacctgaggaacctgtaccgcctgagcaaggccctcttccccccagagcccctggtgctgcgggagatgtgcaagcagggctacagagatggcctgcgcttcctgcagagaaatggcctgctgaaccggcccaaccccctgctggccctgcccccagcccggccccacggccctgaggacaaggaccaggccgtggagagcgcccaggccgaggactacagccagctgcctggagaggaccacatcctggagcacctgcctgcccggctgaatgaggccctgctggaggcctgtgtggagcccacagacctgctgaccaccctgagcaacatgctgcctgtgcggctggccacagccatgatggtgccctacaccctgcccctggagagcgccctgtccttcaccatccggctgctggagtggctgcctgatgtgcctgaggacatccgctggatgaaggagcagacaggcagcatctgccagtacctggtgatgagggccaagaggaagctgggccgccacctgcccagccggctgcctgagcaggtggagctgcggcgggtgcagagcctgcccagcgtgcccctgagctgtgccgcctaccgggaggccctgcccggctggatgaggaacaacctgagcctgggagatgccctggccaagtgggaggagtgccagaggcagctgctgctgggcctcttctgcaccaacgtggccttccccccagaggccctgaggatgagggccccagctgaccctgccccagccccagctgaccctgccagcccccagcaccagctggccggccctgcccccctgctgagcaccccagcccctgaggcccggcctgtgattggagccctgggcctgtag

SEQ ID NO: 163341 - DNA, 1290 bp, synthetic construct
  misc_feature 1..1290: note = Description of Artificial Sequence: Synthetic coding sequence
  source 1..1290: mol_type = other DNA
atgggcttcctggaggaggagggccgctggaacctgtccttctctggagctggctacctgggcgcccaccacgtgggcgccacagaatgtctgcggcagagggccccccggctgctgcagggcgcccggcgcatctacggcagcagcagcggggccctgaatgctgtgtccatcgtgtgtgggaagtctgtggacttctgctgcagccacctgctgggcatggtgggccagctggagcggctgagcctgagcatcctgcacccagcctatgcccccattgaacatgtgaagcagcagctgcaggatgccctgcccccagatgcccacgtgctggccagccagaggctgggcatcagcctgacccgctggccagatggaagaaacttcctggtgacagactttgccacctgtgatgagctgatccaggccctggtgtgcaccctgtacttccccttctactgcggcctcatccccccagagttccggggggagcgctacattgatggagccctgagcaacaacctgccctttgctgactgccccagcaccatcaccgtgagccccttccacggcaccgtggacatctgcccccagagcaccagccccaacctgcacgagctgaatgtgttcaacttctccttccagatcagcacagagaacttcttcctgggcctcatctgcctgatcccccccagcctggaggtggtggccgacaactgccggcagggctacctggatgccctgcgcttcctggagcggcggggcctgaccaaggagcctgtgctgtggaccctggtgtccaaggagcccccagccccagcagatggcaactgggatgctggctgtgaccagcgctggaagggcggcctgagcctgaactggaaggtgccccacgtgcaggtgaaggatgtgcccaactttgagcagctgagccctgagctggaggccgccctgaagaaggcctgcacccgggaccccagccgctgggcccgcttctggcacagcggccctggccaggtgctgacctacctgctgctgccctgcaccctgccctttgagtacatctacttccgcagccggcggctggtggtgtggctgcctgatgtgcctgctgacctgtggtggatgcagggcctgctgaggaacatggccctggaggtgttcagcaggaccaaggcccagctgctgggccccatcagccccccagccaccagggtgctggagaccagccccctgcagccccagatcgccccccaccgggaggagctgggccccacccaccaggcctag

SEQ ID NO: 163342 - DNA, 1515 bp, synthetic construct
  misc_feature 1..1515: note = Description of Artificial Sequence: Synthetic coding sequence
  source 1..1515: mol_type = other DNA
atggccgcccagaggaggagcctgctgcagagcgagcagcagcccagctggacagatgacctgcccctgtgccacctgtctggagtgggcagcgccagcaacagaagctacagcgcagatggcaagggcacagagagccaccccccagaggacagctggctgaagttccgctctgagaacaactgcttcctgtatggagtcttcaacggctatgatggcaacagagtgaccaactttgtggcccagaggctgtctgctgagctgctgctgggccagctgaatgctgagcacgccgaggctgatgtgagaagagtgctgctgcaggcctttgatgtggtggagaggagcttcctggagagcattgatgatgccctggccgagaaggccagcctgcagagccagctgcctgagggcgtgccccagcaccagctgcccccccagtaccagaagatcctggagcggctgaagaccctggagcgggagatctctggaggagccatggctgtggtggccgtgctgctgaacaacaagctgtatgtggccaacgtgggcaccaacagagccctgctgtgcaagagcacagtggatggcctgcaggtgacccagctgaatgtggaccacaccacagaaaatgaagatgagctgttccggctgagccagctgggcctggatgctgggaagatcaagcaggtgggcatcatctgtggccaggagagcaccaggagaattggagactacaaggtgaagtatggctacacagacatcgacctgctgtctgctgccaagagcaagcccatcatcgccgagcctgagatccatggagcccagcccctggatggagtgacaggcttcctggtgctgatgtctgagggcctgtacaaggccctggaggccgcccacggccctggccaggccaaccaggagattgctgccatgattgacacagaatttgccaagcagaccagcctggatgctgtggcccaggccgtggtggacagagtgaagaggatccacagcgacacctttgccagcggcggggagcgggcccgcttctgccccaggcatgaggacatgaccctgctggtgaggaactttggctaccccctgggggagatgagccagcccacccccagccctgccccagctgctgggggccgggtgtaccctgtgtctgtgccctacagcagcgcccagagcaccagcaagacctctgtgaccctgagcctggtgatgcccagccagggccagatggtgaatggagcccacagcgccagcaccctggatgaggccacccccaccctgaccaaccagagccccaccctgaccctgcagagcaccaacacccacacccagagcagcagcagcagcagtgatggcggcctcttccgcagcaggcctgcccacagcctgcccccaggagaagatggccgggtggagccctacgtggactttgctgagttctaccgcctgtggagcgtggaccatggagagcagagcgtggtgacagccccctag

SEQ ID NO: 163343 - DNA, 948 bp, synthetic construct
  misc_feature 1..948: note = Description of Artificial Sequence: Synthetic coding sequence
  source 1..948: mol_type = other DNA
atgggcttcctggaggaggagggccgctggaacctgtccttctctggagctggctacctgggcgcccaccacgtgggcgccacagaatgtctgcggcagagggccccccggctgctgcagggcgcccggcgcatctacggcagcagcagcggggccctgaatgctgtgtccatcgtgtgtgggaagtctgtggactgccccagcaccatcaccgtgagccccttccacggcaccgtggacatctgcccccagagcaccagccccaacctgcacgagctgaatgtgttcaacttctccttccagatcagcacagagaacttcttcctgggcctcatctgcctgatcccccccagcctggaggtggtggccgacaactgccggcagggctacctggatgccctgcgcttcctggagcggcggggcctgaccaaggagcctgtgctgtggaccctggtgtccaaggagcccccagccccagcagatggcaactgggatgctggctgtgaccagcgctggaagggcggcctgagcctgaactggaaggtgccccacgtgcaggtgaaggatgtgcccaactttgagcagctgagccctgagctggaggccgccctgaagaaggcctgcacccgggaccccagccgctgggcccgcttctggcacagcggccctggccaggtgctgacctacctgctgctgccctgcaccctgccctttgagtacatctacttccgcagccggcggctggtggtgtggctgcctgatgtgcctgctgacctgtggtggatgcagggcctgctgaggaacatggccctggaggtgttcagcaggaccaaggcccagctgctgggccccatcagccccccagccaccagggtgctggagaccagccccctgcagccccagatcgccccccaccgggaggagctgggccccacccaccaggcctag

SEQ ID NO: 163344 - DNA, 807 bp, synthetic construct
  misc_feature 1..807: note = Description of Artificial Sequence: Synthetic coding sequence
  source 1..807: mol_type = other DNA
atgggcttcctggaggaggagggccgctggaacctgtccttctctggagctggctacctgggcgcccaccacgtgggcgccacagaatgtctgcggcagagggccccccggctgctgcagggcgcccggcgcatctacggcagcagcagcggggccctgaatgctgtgtccatcgtgtgtgggaagtctgtggacttctgctgcagccacctgctgggcatggtgggccagctggagcggctgagcctgagcatcctgcacccagcctatgcccccattgaacatgtgaagcagcagctgcaggatgccctgcccccagatgcccacgtgctggccagccagaggctgggcatcagcctgacccgctggccagatggaagaaacttcctggtgacagactttgccacctgtgatgagctgatccaggtggtggccgacaactgccggcagggctacctggatgccctgcgcttcctggagcggcggggcctgaccaaggagcctgtgctgtggaccctggtgtccaaggagcccccagccccagcagatggcaactgggatgctggctgtgaccagcgctggaagggcggcctgagcctgaactggaaggtgccccacgtgcaggtgaaggatgtgcccaactttgagcagctgagccctgagctggaggccgccctgaagaaggcctgcacccgggaccccagccgctgggcccgcttctggcacagcggccctggccaggtgctgacctacctgctgctgccctgcaccctgccctttgagtacatctacttccgcagcaggtag

SEQ ID NO: 163345 - DNA, 948 bp, synthetic construct; identical to SEQ ID NO: 163343
  misc_feature 1..948: note = Description of Artificial Sequence: Synthetic coding sequence
  source 1..948: mol_type = other DNA

SEQ ID NO: 163346 - DNA, 708 bp, synthetic construct
  misc_feature 1..708: note = Description of Artificial Sequence: Synthetic coding sequence
  source 1..708: mol_type = other DNA
atggaggaggagacccacacagatgccaagatccgggcagaaaatggaacaggcagcagcccccggggccctggctgcagcctgcggcactttgcctgtgagcagaacctgctgagcaggccagatggcagcgccagcttcctgcagggcgacacctctgtgctggccggcgtgtatggccctgctgaggtgaaggtgtccaaggagatcttcaacaaggccaccctggaggtgatcctgcggcccaagattggcctgcccggggtggccgagaagagccgggagcggctcatccggaacacctgtgaggccgtggtgctgggcaccctgcaccccaggaccagcatcaccgtggtgctgcaggtggtgtctgatgctggcagcctgctggcctgctgcctgaatgctgcctgcatggccctggtggatgctggggtgcccatgagggccctcttctgtggggtggcctgtgccctggacagtgatggcaccctggtgctggaccccaccagcaagcaggagaaggaggcccgggctgtgctgacctttgccctggacagcgtggagaggaagctgctgatgagcagcaccaagggcctgtacagcgacacagagctgcagcagtgcctggccgccgcccaggccgccagccagcacgtgttccgcttctaccgggagagcctgcagaggcgctacagcaagagctag

SEQ ID NO: 163347 - DNA, 4128 bp, synthetic construct
  misc_feature 1..4128: note = Description of Artificial Sequence: Synthetic coding sequence
  source 1..4128: mol_type = other DNA
atggaggcccccctgcagacaggcatgatgggcaccagcagccacggcctggccaccaacagcagcggggccaaggtggccgagagagatggcttccaggatgtgctggcccctggagagggcagcgctggccgcatctgtggggcccagcctgtgccctttgtgccccaggtgctgggcgtgatgattggagctggggtggccgtggtggtgacagctgtgctgatcctgctggtggtgcggcggctgcgggtgcccaagaccccagccccagatggcccccgctaccgcttcaggaagagggacaaggtgctcttctacggcaggaagatcatgaggaaggtgtcccagagcaccagcagcctggtggacacctctgtgtctgccaccagccggcccaggatgaggaagaagctgaagatgctgaacatcgccaagaagatcctgcgcatccagaaggagacccccaccctgcagaggaaggagcccccacctgctgtgctggaggccgacctgacagaaggagacctggccaacagccacctgcccagcgaggtgctgtacatgctgaagaatgtgcgggtgctgggccactttgagaagcccctcttcctggagctgtgccgccacatggtgttccagaggctgggccagggcgactatgtgttccggcccggccagccagatgccagcatctacgtggtgcaggacggcctgctggagctgtgcctgcccggcccagatggcaaggaatgtgtggtgaaggaggtggtgcctggggacagcgtgaacagcctgctgagcatcctggatgtgatcaccggccaccagcacccccagaggacagtgtctgcccgggccgcccgggacagcacagtgctgcggctgcctgtggaggccttctctgctgtgttcaccaagtacccagagagcctggtgcgggtggtgcagatcatcatggtgcggctgcagagggtgaccttcctggccctgcacaactacctgggcctgaccaatgaactcttcagccatgagatccagcccctgcggctcttccccagccctggcctgcccaccaggaccagccctgtgcggggcagcaagaggatggtgtccaccagcgccacagatgagccccgggagaccccaggccggcccccagaccccaccggggcccccctgcccggccccaccggggaccctgtgaagcccaccagcctggagaccccatctgcccccctgctgagccgctgtgtgtccatgcctggggacatcagcggcctgcagggcggccccaggagtgactttgacatggcctatgaaagaggccgcatctctgtgtccctgcaggaggaggccagcggcggcagcctggccgccccagcccggacccccacccaggagccccgggagcagcctgctggggcctgtgagtacagctactgtgaagatgagagcgccaccggcggctgccccttcggcccctaccagggccggcagaccagcagcatctttgaagctgccaagcaggagctggccaagctgatgagaattgaggaccccagcctgctgaacagccgggtgctgctgcaccacgccaaggccggcaccatcatcgcccggcagggcgaccaggatgtgtccctgcactttgtgctgtggggctgcctgcacgtgtaccagaggatgattgacaaggccgaggatgtgtgcctgtttgtggcccagcctggagagctggtgggccagctggccgtgctgaccggggagcccctcatcttcaccctgcgggcccagagggactgcaccttcctgcgcatcagcaagagtgacttctatgagatcatgagggcccagcccagcgtggtgctgtctgctgcccacacagtggccgccaggatgagcccctttgtgcggcagatggactttgccatcgactggacagctgtggaggccggccgggccctgtaccggcagggcgacagaagtgactgcacctacatcgtgctgaatggccgcctgcggagcgtcatccagaggggcagcggcaagaaggagctggtgggggagtatggccgcggggacctgattggagtggtggaggccctgacccggcagccccgggccaccaccgtgcatgctgtgcgggacacagagctggccaagctgcctgagggcaccctgggccacatcaagaggcgctacccccaggtggtgaccaggctcatccacctgctgagccagaagatcctgggcaacctgcagcagctgcagggccccttccctgctggcagcggcctgggcgtgcccccccacagcgagctgaccaacccagccagcaacctggccaccgtggccatcctgcctgtgtgtgccgaggtgcccatggtggccttcaccctggagctgcagcacgccctgcaggccatcggccccaccctgctgctgaacagcgacatcatccgggcccggctgggcgccagcgccctggacagcatccaggagttccggctgagcggctggctggcccagcaggaggatgcccacagaattgtgctgtaccagacagatgccagcctgaccccctggacagtgcgctgcctgcggcaggccgactgcatcctgattgtgggcctgggggaccaggagcccaccctgggccagctggagcagatgctggagaacacagctgtgcgggccctgaagcagctggtgctgctgcaccgggaggagggcgccggccccaccaggacagtggagtggctgaacatgaggtcctggtgcagcggccacctgcacctgcgctgcccccggcggctcttcagcagaagaagccctgccaagctgcacgagctgtatgagaaggtgttcagcagaagagctgacagacacagcgacttcagccggctggcccgggtgctgactggaaacaccatcgccctggtgctgggcggcggcggggcccggggctgcagccacatcggcgtgctgaaggccctggaggaggccggcgtgcctgtggacctggtgggcggcaccagcatcggcagcttcatcggggccctgtatgcagaggagaggtctgccagcaggaccaagcagagggcccgggagtgggccaagtccatgacctctgtgctggagcctgtgctggacctgacctaccctgtgacctccatgttcaccggcagcgccttcaacagaagcatccacagggtcttccaggacaagcagatcgaggacctgtggctgccctacttcaacgtgaccacagacatcacagccagcgccatgagggtgcacaaggatggcagcctgtggaggtatgtgcgggcctccatgaccctgagcggctacctgccccccctgtgtgaccccaaggatggccacctgctgatggatggcggctacatcaacaacctgcctgctgacatcgcccgctccatgggcgccaagacagtgattgccattgatgtgggcagccaggatgaaacagacctgagcacctacggggacagcctgagcggctggtggctgctgtggaagaggctgaacccctgggccgacaaggtgaaggtgcctgacatggccgagatccagagccggctggcctacgtgtcctgtgtgcggcagctggaggtggtgaagagcagcagctactgtgagtacctgcggccccccatcgactgcttcaagaccatggactttgggaagtttgaccagatctatgatgtgggctaccagtatggcaaggctgtgtttggaggctggagcagaggaaatgtgattgagaagatgctgacagaccggcgcagcacagacctgaatgaaagcagaagagcagatgtgctggccttccccagcagcggcttcacagacctggccgagatcgtgtccagaattgagccccccaccagctatgtgtctgatggctgtgctgatggagaggagagtgactgcctgacagaatatgaggaggatgctggccctgactgcagcagagatgaaggaggcagccctgagggcgccagccccagcacagccagcgagatggaggaggagaagagcatcctgcggcagaggcgctgcctgccccaggagcccccaggcagcgccacagatgcctag

SEQ ID NO: 163348 - DNA, 3984 bp, synthetic construct
  misc_feature 1..3984: note = Description of Artificial Sequence: Synthetic coding sequence
  source 1..3984: mol_type = other DNA
atggaggcccccctgcagacaggcatggtgctgggcgtgatgattggagctggggtggccgtggtggtgacagctgtgctgatcctgctggtggtgcggcggctgcgggtgcccaagaccccagccccagatggcccccgctaccgcttcaggaagagggacaaggtgctcttctacggcaggaagatcatgaggaaggtgtcccagagcaccagcagcctggtggacacctctgtgtctgccaccagccggcccaggatgaggaagaagctgaagatgctgaacatcgccaagaagatcctgcgcatccagaaggagacccccaccctgcagaggaaggagcccccacctgctgtgctggaggccgacctgacagaaggagacctggccaacagccacctgcccagcgaggtgctgtacatgctgaagaatgtgcgggtgctgggccactttgagaagcccctcttcctggagctgtgccgccacatggtgttccagaggctgggccagggcgactatgtgttccggcccggccagccagatgccagcatctacgtggtgcaggacggcctgctggagctgtgcctgcccggcccagatggcaaggaatgtgtggtgaaggaggtggtgcctggggacagcgtgaacagcctgctgagcatcctggatgtgatcaccggccaccagcacccccagaggacagtgtctgcccgggccgcccgggacagcacagtgctgcggctgcctgtggaggccttctctgctgtgttcaccaagtacccagagagcctggtgcgggtggtgcagatcatcatggtgcggctgcagagggtgaccttcctggccctgcacaactacctgggcctgaccaatgaactcttcagccatgagatccagcccctgcggctcttccccagccctggcctgcccaccaggaccagccctgtgcggggcagcaagaggatggtgtccaccagcgccacagatgagccccgggagaccccaggccggcccccagaccccaccggggcccccctgcccggccccaccggggaccctgtgaagcccaccagcctggagaccccatctgcccccctgctgagccgctgtgtgtccatgcctggggacatcagcggcctgcagggcggccccaggagtgactttgacatggcctatgaaagaggccgcatctctgtgtccctgcaggaggaggccagcggcggcagcctggccgccccagcccggacccccacccaggagccccgggagcagcctgctggggcctgtgagtacagctactgtgaagatgagagcgccaccggcggctgccccttcggcccctaccagggccggcagaccagcagcatctttgaagctgccaagcaggagctggccaagctgatgagaattgaggaccccagcctgctgaacagccgggtgctgctgcaccacgccaaggccggcaccatcatcgcccggcagggcgaccaggatgtgtccctgcactttgtgctgtggggctgcctgcacgtgtaccagaggatgattgacaaggccgaggatgtgtgcctgtttgtggcccagcctggagagctggtgggccagctggccgtgctgaccggggagcccctcatcttcaccctgcgggcccagagggactgcaccttcctgcgcatcagcaagagtgacttctatgagatcatgagggcccagcccagcgtggtgctgtctgctgcccacacagtggccgccaggatgagcccctttgtgcggcagatggactttgccatcgactggacagctgtggaggccggccgggccctgtaccggcagggcgacagaagtgactgcacctacatcgtgctgaatggccgcctgcggagcgtcatccagaggggcagcggcaagaaggagctggtgggggagtatggccgcggggacctgattggagtggtggaggccctgacccggcagccccgggccaccaccgtgcatgctgtgcgggacacagagctggccaagctgcctgagggcaccctgggccacatcaagaggcgctacccccaggtggtgaccaggctcatccacctgctgagccagaagatcctgggcaacctgcagcagctgcagggccccttccctgctggcagcggcctgggcgtgcccccccacagcgagctgaccaacccagccagcaacctggccaccgtggccatcctgcctgtgtgtgccgaggtgcccatggtggccttcaccctggagctgcagcacgccctgcaggccatcggccccaccctgctgctgaacagcgacatcatccgggcccggctgggcgccagcgccctggacagcatccaggagttccggctgagcggctggctggcccagcaggaggatgcccacagaattgtgctgtaccagacagatgccagcctgaccccctggacagtgcgctgcctgcggcaggccgactgcatcctgattgtgggcctgggggaccaggagcccaccctgggccagctggagcagatgctggagaacacagctgtgcgggccctgaagcagctggtgctgctgcaccgggaggagggcgccggccccaccaggacagtggagtggctgaacatgaggtcctggtgcagcggccacctgcacctgcgctgcccccggcggctcttcagcagaagaagccctgccaagctgcacgagctgtatgagaaggtgttcagcagaagagctgacagacacagcgacttcagccggctggcccgggtgctgactggaaacaccatcgccctggtgctgggcggcggcggggcccggggctgcagccacatcggcgtgctgaaggccctggaggaggccggcgtgcctgtggacctggtgggcggcaccagcatcggcagcttcatcggggccctgtatgcagaggagaggtctgccagcaggaccaagcagagggcccgggagtgggccaagtccatgacctctgtgctggagcctgtgctggacctgacctaccctgtgacctccatgttcaccggcagcgccttcaacagaagcatccacagggtcttccaggacaagcagatcgaggacctgtggctgccctacttcaacgtgaccacagacatcacagccagcgccatgagggtgcacaaggatggcagcctgtggaggtatgtgcgggcctccatgaccctgagcggctacctgccccccctgtgtgaccccaaggatggccacctgctgatggatggcggctacatcaacaacctgcctgctgacatcgcccgctccatgggcgccaagacagtgattgccattgatgtgggcagccaggatgaaacagacctgagcacctacggggacagcctgagcggctggtggctgctgtggaagaggctgaacccctgggccgacaaggtgaaggtgcctgacatggccgagatccagagccggctggcctacgtgtcctgtgtgcggcagctggaggtggtgaagagcagcagctactgtgagtacctgcggccccccatcgactgcttcaagaccatggactttgggaagtttgaccagatctatgatgtgggctaccagtatggcaaggctgtgtttggaggctggagcagaggaaatgtgattgagaagatgctgacagaccggcgcagcacagacctgaatgaaagcagaagagcagatgtgctggccttccccagcagcggcttcacagacctggccgagatcgtgtccagaattgagccccccaccagctatgtgtctgatggctgtgctgatggagaggagagtgactgcctgacagaatatgaggaggatgctggccctgactgcagcagagatgaaggaggcagccctgagggcgccagccccagcacagccagcgagatggaggaggagaagagcatcctgcggcagaggcgctgcctgccccaggagcccccaggcagcgccacagatgcctag

SEQ ID NO: 163349 - DNA, 1371 bp, synthetic construct
  misc_feature 1..1371: note = Description of Artificial Sequence: Synthetic coding sequence
  source 1..1371: mol_type = other DNA
atgaggaaggtgtcccagagcaccagcagcctggtggacacctctgtgtctgccaccagccggcccaggatgaggaagaagctgaagatgctgaacatcgccaagaagatcctgcgcatccagaaggagacccccaccctgcagaggaaggagcccccacctgctgtgctggaggccgacctgacagaaggagacctggccaacagccacctgcccagcgaggtgctgtacatgctgaagaatgtgcgggtgctgggccactttgagaagcccctcttcctggagctgtgccgccacatggtgttccagaggctgggccagggcgactatgtgttccggcccggccagccagatgccagcatctacgtggtgcaggacggcctgctggagctgtgcctgcccggcccagatggcaaggaatgtgtggtgaaggaggtggtgcctggggacagcgtgaacagcctgctgagcatcctggatgtgatcaccggccaccagcacccccagaggacagtgtctgcccgggccgcccgggacagcacagtgctgcggctgcctgtggaggccttctctgctgtgttcaccaagtacccagagagcctggtgcgggtggtgcagatcatcatggtgcggctgcagagggtgaccttcctggccctgcacaactacctgggcctgaccaatgagctgttcagccatgagatccagcccctgcggctcttccccagccctggcctgcccaccaggaccagccctgtgcggggcagcaagaggatggtgtccaccagcgccacagatgagccccgggagaccccaggccggcccccagaccccactggagcccccctgcccggccccactggagaccctgtgaagcccaccagcctggagacccccagcgcccccctgctgagccgctgtgtgtccatgcctggggacatcagcggcctgcagggcggccccaggagtgactttgacatggcctatgagcggggccgcatctctgtgtccctgcaggaggaggccagcggcggcagcctggccgccccagcccggacccccacccaggagccccgggagcagcctgctggggcctgtgagtacagctactgtgaagatgaaagtgccactggaggctgccccttcggcccctaccagggccggcagaccagcagcatctttgaggccgccaagcaggagctggccaagctgatgagaattgaggaccccagcctgctgaacagccgggtgctgctgcaccacgccaaggccggcaccatcatcgcccggcagggcgaccaggatgtgtctggcccccacacaggcctgacctgcccagagcggggctgcagcgtggccctgatgacctag

SEQ ID NO: 163350 - DNA, 3903 bp, synthetic construct
  misc_feature 1..3903: note = Description of Artificial Sequence: Synthetic coding sequence
  source 1..3903: mol_type = other DNA
atggaggcccccctgcagacaggcatggtgctgggcgtgatgattggagctggggtggccgtggtggtgacagctgtgctgatcctgctggtggtgcggcggctgcgggtgcccaagaccccagccccagatggcccccgctaccgcttcaggaagagggacaaggtgctcttctacggcaggaagatcatgaggaaggtgtcccagagcaccagcagcctggtggacacctctgtgtctgccaccagccggcccaggatgaggaagaagctgaagatgctgaacatcgccaagaagatcctgcgcatccagaaggagacccccaccctgcagaggaaggagcccccacctgctgtgctggaggccgacctgacagaaggagacctggccaacagccacctgcccagcgaggtgctgtacatgctgaagaatgtgcgggtgctgggccactttgagaagcccctcttcctggagctgtgccgccacatggtgttccagaggctgggccagggcgactatgtgttccggcccggccagccagatgccagcatctacgtggtgcaggacggcctgctggagctgtgcctgcccggcccagatggcaaggaatgtgtggtgaaggaggtggtgcctggggacagcgtgaacagcctgctgagcatcctggatgtgatcaccggccaccagcacccccagaggacagtgtctgcccgggccgcccgggacagcacagtgctgcggctgcctgtggaggccttctctgctgtgttcaccaagtacccagagagcctggtgcgggtggtgcagatcatcatggtgcggctgcagagggtgaccttcctggccctgcacaactacctgggcctgaccaatgaactcttcagccatgagatccagcccctgcggctcttccccagccctggcctgcccaccaggaccagccctgtgcggggcagcaagaggatggtgtccaccagcgccacagatgagccccgggagaccccaggccggcccccagaccccaccggggcccccctgcccggccccaccggggaccctgtgaagcccaccagcctggagaccccatctgcccccctgctgagccgctgtgtgtccatgcctggggacatcagcggcctgcagggcggccccaggagtgactttgacatggcctatgaaagaggccgcatctctgtgtccctgcaggaggaggccagcggcggcagcctggccgccccagcccggacccccacccaggagccccgggagcagcctgctggggcctgtgagtacagctactgtgaagatgagagcgccaccggcggctgccccttcggcccctaccagggccggcagaccagcagcatctttgaagctgccaagcaggagctggccaagctgatgagaattgaagatgtgtccctgcactttgtgctgtggggctgcctgcacgtgtaccagaggatgattgacaaggccgaggatgtgtgcctgtttgtggcccagcctggagagctggtgggccagctggccgtgctgaccggggagcccctcatcttcaccctgcgggcccagagggactgcaccttcctgcgcatcagcaagagtgacttctatgagatcatgagggcccagcccagcgtggtgctgtctgctgcccacacagtggccgccaggatgagcccctttgtgcggcagatggactttgccatcgactggacagctgtggaggccggccgggccctgtaccggcagggcgacagaagtgactgcacctacatcgtgctgaatggccgcctgcggagcgtcatccagaggggcagcggcaagaaggagctggtgggggagtatggccgcggggacctgattggagtggtggaggccctgacccggcagccccgggccaccaccgtgcatgctgtgcgggacacagagctggccaagctgcctgagggcaccctgggccacatcaagaggcgctacccccaggtggtgaccaggctcatccacctgctgagccagaagatcctgggcaacctgcagcagctgcagggccccttccctggcagcggcctgggcgtgcccccccacagcgagctgaccaacccagccagcaacctggccaccgtggccatcctgcctgtgtgtgccgaggtgcccatggtggccttcaccctggagctgcagcacgccctgcaggccatcggccccaccctgctgctgaacagcgacatcatccgggcccggctgggcgccagcgccctggacagcatccaggagttccggctgagcggctggctggcccagcaggaggatgcccaccgcatcgtgctgtaccagacagatgccagcctgaccccctggacagtgcgctgcctgcggcaggccgactgcatcctgattgtgggcctgggggaccaggagcccaccctgggccagctggagcagatgctggagaacacagctgtgcgggccctgaagcagctggtgctgctgcaccgggaggagggcgccggccccaccaggacagtggagtggctgaacatgaggtcctggtgcagcggccacctgcacctgcgctgccccaggaggctcttcagccgccgcagccctgccaagctgcacgagctgtatgagaaggtgttcagccggcgggctgacagacacagcgacttcagccggctggcccgggtgctgaccggcaacaccatcgccctggtgctgggcggcggcggggcccggggctgcagccacatcggcgtgctgaaggccctggaggaggccggcgtgcctgtggacctggtgggcggcaccagcatcggcagcttcatcggggccctgtatgcagaggagaggtctgccagcaggaccaagcagagggcccgggagtgggccaagtccatgacctctgtgctggagcctgtgctggacctgacctaccctgtgacctccatgttcaccggcagcgccttcaacagaagcatccacagggtcttccaggacaagcagatcgaggacctgtggctgccctacttcaacgtgaccacagacatcacagccagcgccatgagggtgcacaaggatggcagcctgtggaggtatgtgcgggcctccatgaccctgagcggctacctgccccccctgtgtgaccccaaggatggccacctgctgatggatggcggctacatcaacaacctgcctgctgacatcgcccgctccatgggcgccaagacagtcatcgccattgatgtgggcagccaggatgaaacagacctgagcacctatggagacagcctgagcggctggtggctgctgtggaagaggctgaacccctgggccgacaaggtgaaggtgcctgacatggccgagatccagagccggctggcctacgtgtcctgtgtgcggcagctggaggtggtgaagagcagcagctactgtgagtacctgcggccccccatcgactgcttcaagaccatggactttgggaagtttgaccagatctatgatgtgggctaccagtatggcaaggctgtgtttggaggctggagcagaggaaatgtcatcgagaagatgctgacagacagaagaagcacagacctgaatgaaagccggcgggcagatgtgctggccttccccagcagcggcttcacagacctggccgagatcgtgagccgcatcgagccccccaccagctatgtgtctgatggctgtgctgatggagaggagagtgactgcctgacagaatatgaagaagatgctggccctgactgcagcagagatgagggcggcagccctgagggcgccagccccagcacagccagcgagatggaggaggagaagagcatcctgcggcagaggcgctgcctgccccaggagcccccaggcagcgccacagatgcctag

SEQ ID NO: 163351 - DNA, 3954 bp, synthetic construct
  misc_feature 1..3954: note = Description of Artificial Sequence: Synthetic coding sequence
  source 1..3954: mol_type = other DNA
atggaggaggagaaggatgacagcccccagctgaccggcattgctgtgggcgccctgctggccctggccctggtgggcgtgctgatcctcttcatgttccggcggctgcggcagttccggcaggcccagcccaccccccagtaccgcttcaggaagagggacaaggtgatgttttatggcaggaagatcatgaggaaggtgaccaccctgcccaacaccctggtggagaacacagccctgccccggcagagggccaggaagaggaccaaggtgctgagcctggccaagaggatcctgcgcttcaagaaggagtacccagccctgcagcccaaggagcccccacccagcctgctggaggccgacctgacagaatttgatgtgaagaacagccacctgcccagcgaggtgctgtacatgctgaagaatgtgcgggtgctgggccactttgagaagcccctcttcctggagctgtgcaagcacatcgtgtttgtgcagctgcaggagggggagcacgtgttccagccccgggagccagaccccagcatctgtgtggtgcaggacggccgcctggaggtgtgcatccaggacacagatggaacagaggtggtggtgaaggaggtgctggccggggacagcgtgcacagcctgctgagcatcctggacatcatcaccggccatgctgccccctacaagacagtgtctgtgcgggccgccatccccagcaccatcctgcggctgcctgctgctgccttccacggcgtgtttgagaagtacccagagaccctggtgcgggtggtgcagatcatcatggtgcggctgcagagggtgaccttcctggccctgcacaactacctgggcctgaccacagagctgttcaatgctgagagccaggccatccccctggtgtctgtggcctctgtggccgccggcaaggccaagaagcaggtgttctacggggaggaggagcggctgaagaagccaccccggctgcaggagagctgtgacagcgaccacggcggcggccggcctgctgctgctggccccctgctgaagaggagccacagcgtgcctgcccccagcatcaggaagcagatcctggaggagctggagaagccaggggccggggaccctgaccccagcgccccccagggcggccctggcagcgccaccagtgacctgggcatggcctgtgaccgggcccgggtcttcctgcacagtgatgagcaccctggcagctctgtggccagcaagagcaggaagtctgtgatggtggccgagatccccagcacagtgtcccagcacagcgagagccacacagatgagaccctggccagcaggaagagtgatgccatcttccgggccgccaagaaggacctgctgaccctgatgaagctggaggacagcagcctgctggatggccgggtggccctgctgcacgtgcctgctggcaccgtggtgtcccggcagggcgaccaggatgccagcatcctgtttgtggtgtctggcctgctgcacgtgtaccagaggaagattggcagccaggaggacacctgcctcttcctgaccaggcctggagagatggtgggccagctggccgtgctgactggagagcccctcatcttcaccgtgaaggccaacagagactgcagcttcctgagcatcagcaaggcccacttctatgagatcatgaggaagcagcccaccgtggtgctgggcgtggcccacacagtggtgaagaggatgagcagctttgtgcggcagattgactttgccctggactgggtggaggtggaggccggccgggccatctaccggcagggcgacaagagtgactgcacctacatcatgctgagcggccgcctgcggagcgtcatcaggaaggatgatggcaagaagaggctggccggggagtatggccgcggggacctggtgggcgtggtggagaccctgacccaccaggcccgggccaccaccgtgcatgctgtgcgggacagcgagctggccaagctgcctgctggggccctgaccagcatcaagaggcgctacccccaggtggtgaccaggctcatccacctgctgggggagaagatcctgggcagcctgcagcagggccctgtgacaggccaccagctgggcctgcccacagagggcagcaagtgggacctgggcaacccagctgtgaacctgagcacagtggccgtgatgcctgtgtctgaggaggtgcccctgacagcctttgccctggagctggagcacgccctgagcgccatcggccccaccctgctgctgaccagtgacaacatcaagaggcggctgggcagcgctgccctggacagcgtgcatgagtaccgcctgagctcctggctgggccagcaggaggacacccaccgcatcgtgctgtaccaggtggatggcaccctgaccccctggacccagagatgtgtgcggcaggccgactgcatcctgattgtgggcctgggggaccaggagcccaccgtgggggagctggagaggatgctggagagcacagctgtgcgggcccagaagcagctgatcctgctgcaccgggaggagggccctgccccagccaggacagtggagtggctgaacatgaggtcctggtgcagcggccacctgcacctgtgctgccccaggagggtcttcagccgccgcagcctgcccaagctggtggagatgtacaagcacgtgttccagaggcccccagacagacacagcgacttcagccggctggcccgggtgctgactggaaatgccatcgccctggtgctgggcggcggcggggcccggggctgtgcccaggtgggcgtgctgaaggccctggctgaatgtggcatccctgtggacatggtgggcggcaccagcatcggggcctttgtgggcgccctgtacagcgaggagaggaactacagccagatgaggatccgggccaagcagtgggccgagggcatgaccagcctgatgaaggccgccctggacctgacctaccccatcacctccatgttttctggagctggcttcaacagcagcatcttctctgtgttcaaggaccagcagatcgaggacctgtggatcccctactttgccatcaccacagacatcacagccagcgccatgagggtgcacacagatggcagcctgtggtggtacgtgcgggcctccatgagcctgagcggctacatgccacccctgtgtgaccccaaggatggccacctgctgatggatggcggctacatcaacaacctgcctgcagatgtggcccgctccatgggcgccaaggtggtgattgccattgatgtgggcagcagagatgaaacagacctgaccaactatggagatgccctgagcggctggtggctgctgtggaagcgctggaaccccctggccaccaaggtgaaggtgctgaacatggccgagatccagacccggctggcctacgtgtgctgcgtgcggcagctggaggtggtgaagagcagtgactactgtgagtacctgcggccccccatcgacagctacagcaccctggactttgggaagttcaatgagatctgtgaggtgggctaccagcacggccgcacagtgtttgacatctggggccgctctggagtgctggagaagatgctgcgggaccagcagggccccagcaagaagccagccagcgctgtgctgacctgccccaatgccagcttcacagacctggccgagatcgtgagccgcatcgagcccgccaagccagccatggtggatgatgaaagtgactaccagacagaatatgaggaggagctgctggatgtgcccagagatgcctatgctgacttccagagcaccagcgcccagcagggcagtgacctggaggatgagagcagcctgcggcaccgccaccccagcctggccttccccaagctgtctgagggcagcagtgaccaggacggctag

SEQ ID NO: 163352 - DNA, 2178 bp, synthetic construct
  misc_feature 1..2178: note = Description of Artificial Sequence: Synthetic coding sequence
  source 1..2178: mol_type = other DNA
atggtgcggctgcagagggtgaccttcctggccctgcacaactacctgggcctgaccacagagctgttcaatgctgagagccaggccatccccctggtgtctgtggcctctgtggccgccggcaaggccaagaagcaggtgttctatggagaggaggagcggctgaagaagccaccccggctgcaggagagctgtgacagcgctgaccacggcggcggccggcctgctgctgctggccccctgctgaagaggagccacagcgtgcctgcccccagcatcaggaagcagatcctggaggagctggagaagccaggggccggggaccctgaccccagcgccccccagggccaccagctgggcctgcccacagagggcagcaagtgggacctgggcaacccagctgtgaacctgagcacagtggccgtgatgcctgtgtctgaggaggtgcccctgacagcctttgccctggagctggagcacgccctgagcgccatcggccccaccctgctgctgaccagtgacaacatcaagaggcggctgggcagcgctgccctggacagcgtgcatgagtaccgcctgagctcctggctgggccagcaggaggacacccaccgcatcgtgctgtaccaggtggatggcaccctgaccccctggacccagagatgtgtgcggcaggccgactgcatcctgattgtgggcctgggggaccaggagcccaccgtgggggagctggagaggatgctggagagcacagctgtgcgggcccagaagcagctgatcctgctgcaccgggaggagggccctgccccagccaggacagtggagtggctgaacatgaggtcctggtgcagcggccacctgcacctgtgctgccccaggagggtcttcagccgccgcagcctgcccaagctggtggagatgtacaagcacgtgttccagaggcccccagacagacacagcgacttcagccggctggcccgggtgctgactggaaatgccatcgccctggtgctgggcggcggcggggcccggggctgtgcccaggtgggcgtgctgaaggccctggctgaatgtggcatccctgtggacatggtgggcggcaccagcatcggggcctttgtgggcgccctgtacagcgaggagaggaactacagccagatgaggatccgggccaagcagtgggccgagggcatgaccagcctgatgaaggccgccctggacctgacctaccccatcacctccatgttttctggagctggcttcaacagcagcatcttctctgtgttcaaggaccagcagatcgaggacctgtggatcccctactttgccatcaccacagacatcacagccagcgccatgagggtgcacacagatggcagcctgtggtggtacgtgcgggcctccatgagcctgagcggctacatgccacccctgtgtgaccccaaggatggccacctgctgatggatggcggctacatcaacaacctgcctgcagatgtggcccgctccatgggcgccaaggtggtgattgccattgatgtgggcagcagagatgaaacagacctgaccaactatggagatgccctgagcggctggtggctgctgtggaagcgctggaaccccctggccaccaaggtgaaggtgctgaacatggccgagatccagacccggctggcctacgtgtgctgcgtgcggcagctggaggtggtgaagagcagtgactactgtgagtacctgcggccccccatcgacagctacagcaccctggactttgggaagttcaatgagatctgtgaggtgggctaccagcacggccgcacagtgtttgacatctggggccgctctggagtgctggagaagatgctgcgggaccagcagggccccagcaagaagccagccagcgctgtgctgacctgccccaatgccagcttcacagacctggccgagatcgtgagccgcatcgagcccgccaagccagccatggtggatgatgaaagtgactaccagacagaatatgaggaggagctgctggatgtgcccagagatgcctatgctgacttccagagcaccagcgcccagcagggcagtgacctggaggatgagagcagcctgcggcaccgccaccccagcctggccttccccaagctgtctgagggcagcagtgaccaggacggctag

SEQ ID NO: 163353 - DNA, 1377 bp, synthetic construct
  misc_feature 1..1377: note = Description of Artificial Sequence: Synthetic coding sequence
  source 1..1377: mol_type = other DNA
atggaggaggagaaggatgacagcccccaggccgacttctgcctgggcacagccctgcacagctggggcctgtggttcacagaggagggcagccccagcaccatgctgactggaattgctgtgggcgccctgctggccctggccctggtgggcgtgctgatcctcttcatgttccggcggctgcggcagttccggcaggcccagcccaccccccagtaccgcttcaggaagagggacaaggtgatgttctacggcaggaagatcatgaggaaggtgaccaccctgcccaacaccctggtggagaacacagccctgccccggcagagggccaggaagaggaccaaggtgctgagcctggccaagaggatcctgcgcttcaagaaggagtacccagccctgcagcccaaggagcccccacccagcctgctggaggccgacctgacagaatttgatgtgaagaacagccacctgcccagcgaggtgctgtacatgctgaagaatgtgcgggtgctgggccactttgagaagcccctcttcctggagctgtgcaagcacatcgtgtttgtgcagctgcaggagggggagcacgtgttccagccccgggagccagaccccagcatctgtgtggtgcaggacggccgcctggaggtgtgcatccaggacacagatggaacagaggtggtggtgaaggaggtgctggccggggacagcgtgcacagcctgctgagcatcctggacatcatcactggacatgctgccccctacaagacagtgtctgtgcgggccgccatccccagcaccatcctgcggctgcctgctgctgccttccatggagtgtttgagaagtacccagagaccctggtgcgggtggtgcagatcatcatggtgcggctgcagagggtgaccttcctggccctgcacaactacctgggcctgaccacagagctgttcaatgctgagagccaggccatccccctggtgtctgtggcctctgtggccgccggcaaggccaagaagcaggtgttctatggagaggaggagcggctgaagaagccaccccggctgcaggagagctgtgacagcgaccatggaggcggccggcctgctgctgctggccccctgctgaagaggagccacagcgtgcctgcccccagcatcaggaagcagatcctggaggagctggagaagccaggagctggggaccctgaccccagcgccccccaggcccgggtgctgtgcctgctgccccagtgcctgggcggcctgcccccaacagacacctctgtgtacagcagcgccagcagtgactgctgcggctgcagcatgcctgtgctgtgcatcatgggccacaagccccacgtgacagtggacacctag

SEQ ID NO: 163354 - DNA, 3765 bp, synthetic construct
  misc_feature 1..3765: note = Description of Artificial Sequence: Synthetic coding sequence
  source 1..3765: mol_type = other DNA
atggaggaggagaaggatgacagcccccagctgaccggcattgctgtgggcgccctgctggccctggccctggtgggcgtgctgatcctcttcatgttccggcggctgcggcagttccggcaggcccagcccaccccccagtaccgcttcaggaagagggacaaggtgatgttttatggcaggaagatcatgaggaaggtgaccaccctgcccaacaccctggtggagaacacagccctgccccggcagagggccaggaagaggaccaaggtgctgagcctggccaagaggatcctgcgcttcaagaaggagtacccagccctgcagcccaaggagcccccacccagcctgctggaggccgacctgacagaatttgatgtgaagaacagccacctgcccagcgaggtgctgtacatgctgaagaatgtgcgggtgctgggccactttgagaagcccctcttcctggagctgtgcaagcacatcgtgtttgtgcagctgcaggagggggagcacgtgttccagccccgggagccagaccccagcatctgtgtggtgcaggacggccgcctggaggtgtgcatccaggacacagatggaacagaggtggtggtgaaggaggtgctggccggggacagcgtgcacagcctgctgagcatcctggacatcatcaccggccatgctgccccctacaagacagtgtctgtgcgggccgccatccccagcaccatcctgcggctgcctgctgctgccttccacggcgtgtttgagaagtacccagagaccctggtgcgggtggtgcagatcatcatggtgcggctgcagagggtgaccttcctggccctgcacaactacctgggcctgaccacagagctgttcaatgctgagagccaggccatccccctggtgtctgtggcctctgtggccgccggcaaggccaagaagcaggtgttctacggggaggaggagcggctgaagaagccaccccggctgcaggagagctgtgacagcgaccacggcggcggccggcctgctgctgctggccccctgctgaagaggagccacagcgtgcctgcccccagcatcaggaagcagatcctggaggagctggagaagccaggggccggggaccctgaccccagcgccccccagggcggccctggcagcgccaccagtgacctgggcatggcctgtgaccgggcccgggtcttcctgcacagtgatgagcaccctggcagctctgtggccagcaagagcaggaagtctgtgatggtggccgagatccccagcacagtgtcccagcacagcgagagccacacagatgagaccctggccagcaggaagagtgatgccatcttccgggccgccaagaaggacctgctgaccctgatgaagctggaggacagcagcctgctggatggccgggtggccctgctgcacgtgcctgctggcaccgtggtgtcccggcagggcgaccaggatgccagcatcctgtttgtggtgtctggcctgctgcacgtgtaccagaggaagattggcagccaggaggacacctgcctcttcctgaccaggcctggagagatggtgggccagctggccgtgctgactggagagcccctcatcttcaccgtgaaggccaacagagactgcagcttcctgagcatcagcaaggcccacttctatgagatcatgaggaagcagcccaccgtggtgctgggcgtggcccacacagtggtgaagaggatgagcagctttgtgcggcagattgactttgccctggactgggtggaggtggaggccggccgggccatctaccggcagggcgacaagagtgactgcacctacatcatgctgagcggccgcctgcggagcgtcatcaggaaggatgatggcaagaagaggctggccggggagtatggccgcggggacctggtgggcgtggtggagaccctgacccaccaggcccgggccaccaccgtgcatgctgtgcgggacagcgagctggccaagctgcctgctggggccctgaccagcatcaagaggcgctacccccaggtggtgaccaggctcatccacctgctgggggagaagatcctgggcagcctgcagcagggccctgtgacaggccaccagctgggcctgcccacagagggcagcaagtgggacctgggcaacccagctgtgaacctgagcacagtggccgtgatgcctgtgtctgaggaggtgcccctgacagcctttgccctggagctggagcacgccctgagcgccatcggccccaccctgctgctgaccagtgacaacatcaagaggcggctgggcagcgctgccctggacagcgtgcatgagtaccgcctgagctcctggctgggccagcaggaggacacccaccgcatcgtgctgtaccaggtggatggcaccctgaccccctggacccagagatgtgtgcggcaggccgactgcatcctgattgtgggcctgggggaccaggagcccaccgtgggggagctggagaggatgctggagagcacagctgtgcgggcccagaagcagctgatcctgctgcaccgggaggagggccctgccccagccaggacagtggagtggctgaacatgaggtcctggtgcagcggccacctgcacctgtgctgccccaggagggtcttcagccgccgcagcctgcccaagctggtggagatgtacaagcacgtgttccagaggcccccagacagacacagcgacttcagccggctggcccgggtgctgactggaaatgccatcgccctggtgctgggcggcggcggggcccggggctgtgcccaggtgggcgtgctgaaggccctggctgaatgtggcatccctgtggacatggtgggcggcaccagcatcggggcctttgtgggcgccctgtacagcgaggagaggaactacagccagatgaggatccgggccaagcagtgggccgagggcatgaccagcctgatgaaggccgccctggacctgacctaccccatcacctccatgttttctggagctggcttcaacagcagcatcttctctgtgttcaaggaccagcagatcgaggacctgtggatcccctactttgccatcaccacagacatcacagccagcgccatgagggtgcacacagatggcagcctgtggtggtacgtgcgggcctccatgagcctgagcggctacatgccacccctgtgtgaccccaaggatggccacctgctgatggatggcggctacatcaacaacctgcctgcagatgtggcccgctccatgggcgccaaggtggtgattgccattgatgtgggcagcagagatgaaacagacctgaccaactatggagatgccctgagcggctggtggctgctgtggaagcgctggaaccccctggccaccaaggtgaaggtgctgaacatggccgagatccagacccggctggcctacgtgtgctgcgtgcggcagctggaggtggtgaagagcagtgactactgtgagtacctgcggccccccatcgacagctacagcaccctggactttgggaagttcaatgagatctgtgtgcctgatgaaagtgactaccagacagaatatgaggaggagctgctggatgtgcccagagatgcctatgctgacttccagagcaccagcgcccagcagggcagtgacctggaggatgagagcagcctgcggcaccgccaccccagcctggccttccccaagctgtctgagggcagcagtgaccaggatggatag

SEQ ID NO: 163355 - DNA, 2772 bp, synthetic construct
  misc_feature 1..2772: note = Description of Artificial Sequence: Synthetic coding sequence
  source 1..2772: mol_type = other DNA
atggcctgtgaccgggcccgggtcttcctgcacagtgatgagcaccctggcagctctgtggccagcaagagcaggaagtctgtgatggtggccgagatccccagcacagtgtcccagcacagcgagagccacacagatgagaccctggccagcaggaagagtgatgccatcttccgggccgccaagaaggacctgctgaccctgatgaagctggaggacagcagcctgctggatggccgggtggccctgctgcacgtgcctgctggcaccgtggtgtcccggcagggcgaccaggatgccagcatcctgtttgtggtgtctggcctgctgcacgtgtaccagaggaagattggcagccaggaggacacctgcctcttcctgaccaggcctggagagatggtgggccagctggccgtgctgactggagagcccctcatcttcaccgtgaaggccaacagagactgcagcttcctgagcatcagcaaggcccacttctatgagatcatgaggaagcagcccaccgtggtgctgggcgtggcccacacagtggtgaagaggatgagcagctttgtgcggcagattgactttgccctggactgggtggaggtggaggccggccgggccatctaccggcagggcgacaagagtgactgcacctacatcatgctgagcggccgcctgcggagcgtcatcaggaaggatgatggcaagaagaggctggccggggagtatggccgcggggacctggtgggcgtggtggagaccctgacccaccaggcccgggccaccaccgtgcatgctgtgcgggacagcgagctggccaagctgcctgctggggccctgaccagcatcaagaggcgctacccccaggtggtgaccaggctcatccacctgctgggggagaagatcctgggcagcctgcagcagggccctgtgacaggccaccagctgggcctgcccacagagggcagcaagtgggacctgggcaacccagctgtgaacctgagcacagtggccgtgatgcctgtgtctgaggaggtgcccctgacagcctttgccctggagctggagcacgccctgagcgccatcggccccaccctgctgctgaccagtgacaacatcaagaggcggctgggcagcgctgccctggacagcgtgcatgagtaccgcctgagctcctggctgggccagcaggaggacacccaccgcatcgtgctgtaccaggtggatggcaccctgaccccctggacccagagatgtgtgcggcaggccgactgcatcctgattgtgggcctgggggaccaggagcccaccgtgggggagctggagaggatgctggagagcacagctgtgcgggcccagaagcagctgatcctgctgcaccgggaggagggccctgccccagccaggacagtggagtggctgaacatgaggtcctggtgcagcggccacctgcacctgtgctgccccaggagggtcttcagccgccgcagcctgcccaagctggtggagatgtacaagcacgtgttccagaggcccccagacagacacagcgacttcagccggctggcccgggtgctgactggaaatgccatcgccctggtgctgggcggcggcggggcccggggctgtgcccaggtgggcgtgctgaaggccctggctgaatgtggcatccctgtggacatggtgggcggcaccagcatcggggcctttgtgggcgccctgtacagcgaggagaggaactacagccagatgaggatccgggccaagcagtgggccgagggcatgaccagcctgatgaaggccgccctggacctgacctaccccatcacctccatgttttctggagctggcttcaacagcagcatcttctctgtgttcaaggaccagcagatcgaggacctgtggatcccctactttgccatcaccacagacatcacagccagcgccatgagggtgcacacagatggcagcctgtggtggtacgtgcgggcctccatgagcctgagcggctacatgccacccctgtgtgaccccaaggatggccacctgctgatggatggcggctacatcaacaacctgcctgcagatgtggcccgctccatgggcgccaaggtggtgattgccattgatgtgggcagcagagatgaaacagacctgaccaactatggagatgccctgagcggctggtggctgctgtggaagcgctggaaccccctggccaccaaggtgaaggtgctgaacatggccgagatccagacccggctggcctacgtgtgctgcgtgcggcagctggaggtggtgaagagcagtgactactgtgagtacctgcggccccccatcgacagctacagcaccctggactttgggaagttcaatgagatctgtgaggtgggctaccagcacggccgcacagtgtttgacatctggggccgctctggagtgctggagaagatgctgcgggaccagcagggccccagcaagaagccagccagcgctgtgctgacctgccccaatgccagcttcacagacctggccgagatcgtgagccgcatcgagcccgccaagccagccatggtggatgatgaaagtgactaccagacagaatatgaggaggagctgctggatgtgcccagagatgcctatgctgacttccagagcaccagcgcccagcagggcagtgacctggaggatgagagcagcctgcggcaccgccaccccagcctggccttccccaagctgtctgagggcagcagtgaccaggacggctag

SEQ ID NO: 163356 - DNA, 4029 bp, synthetic construct
  misc_feature 1..4029: note = Description of Artificial Sequence: Synthetic coding sequence
  source 1..4029: mol_type = other DNA
atggaggaggagaaggatgacagcccccaggccgacttctgcctgggcacagccctgcacagctggggcctgtggttcacagaggagggcagccccagcaccatgctgactggaattgctgtgggcgccctgctggccctggccctggtgggcgtgctgatcctcttcatgttccggcggctgcggcagttccggcaggcccagcccaccccccagtaccgcttcaggaagagggacaaggtgatgttctacggcaggaagatcatgaggaaggtgaccaccctgcccaacaccctggtggagaacacagccctgccccggcagagggccaggaagaggaccaaggtgctgagcctggccaagaggatcctgcgcttcaagaaggagtacccagccctgcagcccaaggagcccccacccagcctgctggaggccgacctgacagaatttgatgtgaagaacagccacctgcccagcgaggtgctgtacatgctgaagaatgtgcgggtgctgggccactttgagaagcccctcttcctggagctgtgcaagcacatcgtgtttgtgcagctgcaggagggggagcacgtgttccagccccgggagccagaccccagcatctgtgtggtgcaggacggccgcctggaggtgtgcatccaggacacagatggaacagaggtggtggtgaaggaggtgctggccggggacagcgtgcacagcctgctgagcatcctggacatcatcactggacatgctgccccctacaagacagtgtctgtgcgggccgccatccccagcaccatcctgcggctgcctgctgctgccttccatggagtgtttgagaagtacccagagaccctggtgcgggtggtgcagatcatcatggtgcggctgcagagggtgaccttcctggccctgcacaactacctgggcctgaccacagagctgttcaatgctgagagccaggccatccccctggtgtctgtggcctctgtggccgccggcaaggccaagaagcaggtgttctatggagaggaggagcggctgaagaagccaccccggctgcaggagagctgtgacagcgaccatggaggcggccggcctgctgctgctggccccctgctgaagaggagccacagcgtgcctgcccccagcatcaggaagcagatcctggaggagctggagaagccaggagctggggaccctgaccccagcgccccccagggcggccctggcagcgccaccagtgacctgggcatggcctgtgaccgggcccgggtcttcctgcacagtgatgagcaccctggcagctctgtggccagcaagagcaggaagtctgtgatggtggccgagatccccagcacagtgtcccagcacagcgagagccacacagatgagaccctggccagcaggaagagtgatgccatcttccgggccgccaagaaggacctgctgaccctgatgaagctggaggacagcagcctgctggatggccgggtggccctgctgcacgtgcctgctggcaccgtggtgtcccggcagggcgaccaggatgccagcatcctgtttgtggtgtctggcctgctgcacgtgtaccagaggaagattggcagccaggaggacacctgcctcttcctgaccaggcctggagagatggtgggccagctggccgtgctgaccggggagcccctcatcttcaccgtgaaggccaacagagactgcagcttcctgagcatcagcaaggcccacttctatgagatcatgaggaagcagcccaccgtggtgctgggcgtggcccacacagtggtgaagaggatgagcagctttgtgcggcagattgactttgccctggactgggtggaggtggaggccggccgggccatctaccggcagggcgacaagagtgactgcacctacatcatgctgagcggccgcctgcggagcgtcatcaggaaggatgatggcaagaagaggctggccggggagtatggccgcggggacctggtgggcgtggtggagaccctgacccaccaggcccgggccaccaccgtgcatgctgtgcgggacagcgagctggccaagctgcctgctggggccctgaccagcatcaagaggcgctacccccaggtggtgaccaggctcatccacctgctgggggagaagatcctgggcagcctgcagcagggccctgtgacaggccaccagctgggcctgcccacagagggcagcaagtgggacctgggcaacccagctgtgaacctgagcacagtggccgtgatgcctgtgtctgaggaggtgcccctgacagcctttgccctggagctggagcacgccctgagcgccatcggccccaccctgctgctgaccagtgacaacatcaagaggcggctgggcagcgctgccctggacagcgtgcatgagtaccgcctgagctcctggctgggccagcaggaggacacccacagaattgtgctgtaccaggtggatggcaccctgaccccctggacccagagatgtgtgcggcaggccgactgcatcctgattgtgggcctgggggaccaggagcccaccgtgggggagctggagaggatgctggagagcacagctgtgcgggcccagaagcagctgatcctgctgcaccgggaggagggccctgccccagccaggacagtggagtggctgaacatgaggtcctggtgcagcggccacctgcacctgtgctgcccccggcgggtcttcagcagaagaagcctgcccaagctggtggagatgtacaagcacgtgttccagaggcccccagacagacacagcgacttcagccggctggcccgggtgctgactggaaatgccatcgccctggtgctgggcggcggcggggcccggggctgtgcccaggtgggcgtgctgaaggccctggccgagtgtggcatccctgtggacatggtgggcggcaccagcattggagcctttgtgggcgccctgtacagcgaggagaggaactacagccagatgaggatccgggccaagcagtgggccgagggcatgaccagcctgatgaaggccgccctggacctgacctaccccatcacctccatgttcagcggggccggcttcaacagcagcatcttcagcgtcttcaaggaccagcagatcgaggacctgtggatcccctactttgccatcaccacagacatcacagccagcgccatgagggtgcacacagatggcagcctgtggtggtacgtgcgggcctccatgagcctgagcggctacatgccacccctgtgtgaccccaaggatggccacctgctgatggatggcggctacatcaacaacctgcctgcagatgtggcccgctccatgggcgccaaggtggtgattgccattgatgtgggcagcagagatgaaacagacctgaccaactatggagatgccctgagcggctggtggctgctgtggaagcgctggaaccccctggccaccaaggtgaaggtgctgaacatggccgagatccagacccggctggcctacgtgtgctgcgtgcggcagctggaggtggtgaagagcagtgactactgtgagtacctgcggccccccatcgacagctacagcaccctggactttgggaagttcaatgagatctgtgaggtgggctaccagcacggccgcacagtgtttgacatctggggccgcagcggcgtgctggagaagatgctgcgggaccagcagggccccagcaagaagccagccagcgctgtgctgacctgccccaatgccagcttcacagacctggccgagatcgtgtccagaattgaaccagccaagccagccatggtggatgatgaaagtgactaccagacagaatatgaggaggagctgctggatgtgcccagagatgcctatgctgacttccagagcaccagcgcccagcagggcagtgacctggaggatgagagcagcctgcggcaccgccaccccagcctggccttccccaagctgtctgagggcagcagtgaccaggatggatag

SEQ ID NO: 163357 - DNA, 3846 bp, synthetic construct
  misc_feature 1..3846: note = Description of Artificial Sequence: Synthetic coding sequence
  source 1..3846: mol_type = other DNA
atgctgactggaattgctgtgggcgccctgctggccctggccctggtgggcgtgctgatcctcttcatgttccggcggctgcggcagttccggcaggcccagcccaccccccagtaccgcttcaggaagagggacaaggtgatgttctacggcaggaagatcatgaggaaggtgaccaccctgcccaacaccctggtggagaacacagccctgccccggcagagggccaggaagaggaccaaggtgctgagcctggccaagaggatcctgcgcttcaagaaggagtacccagccctgcagcccaaggagcccccacccagcctgctggaggccgacctgacagaatttgatgtgaagaacagccacctgcccagcgaggtgctgtacatgctgaagaatgtgcgggtgctgggccactttgagaagcccctcttcctggagctgtgcaagcacatcgtgtttgtgcagctgcaggagggggagcacgtgttccagccccgggagccagaccccagcatctgtgtggtgcaggacggccgcctggaggtgtgcatccaggacacagatggaacagaggtggtggtgaaggaggtgctggccggggacagcgtgcacagcctgctgagcatcctggacatcatcactggacatgctgccccctacaagacagtgtctgtgcgggccgccatccccagcaccatcctgcggctgcctgctgctgccttccatggagtgtttgagaagtacccagagaccctggtgcgggtggtgcagatcatcatggtgcggctgcagagggtgaccttcctggccctgcacaactacctgggcctgaccacagagctgttcaatgctgagagccaggccatccccctggtgtctgtggcctctgtggccgccggcaaggccaagaagcaggtgttctatggagaggaggagcggctgaagaagccaccccggctgcaggagagctgtgacagcgaccatggaggcggccggcctgctgctgctggccccctgctgaagaggagccacagcgtgcctgcccccagcatcaggaagcagatcctggaggagctggagaagccaggagctggggaccctgaccccagcgccccccagggcggccctggcagcgccaccagtgacctgggcatggcctgtgaccgggcccgggtcttcctgcacagtgatgagcaccctggcagctctgtggccagcaagagcaggaagtctgtgatggtggccgagatccccagcacagtgtcccagcacagcgagagccacacagatgagaccctggccagcaggaagagtgatgccatcttccgggccgccaagaaggacctgctgaccctgatgaagctggaggacagcagcctgctggatggccgggtggccctgctgcacgtgcctgctggcaccgtggtgtcccggcagggcgaccaggatgccagcatcctgtttgtggtgtctggcctgctgcacgtgtaccagaggaagattggcagccaggaggacacctgcctcttcctgaccaggcctggagagatggtgggccagctggccgtgctgaccggggagcccctcatcttcaccgtgaaggccaacagagactgcagcttcctgagcatcagcaaggcccacttctatgagatcatgaggaagcagcccaccgtggtgctgggcgtggcccacacagtggtgaagaggatgagcagctttgtgcggcagattgactttgccctggactgggtggaggtggaggccggccgggccatctaccggcagggcgacaagagtgactgcacctacatcatgctgagcggccgcctgcggagcgtcatcaggaaggatgatggcaagaagaggctggccggggagtatggccgcggggacctggtgggcgtggtggagaccctgacccaccaggcccgggccaccaccgtgcatgctgtgcgggacagcgagctggccaagctgcctgctggggccctgaccagcatcaagaggcgctacccccaggtggtgaccaggctcatccacctgctgggggagaagatcctgggcagcctgcagcagggccctgtgacaggccaccagctgggcctgcccacagagggcagcaagtgggacctgggcaacccagctgtgaacctgagcacagtggccgtgatgcctgtgtctgaggaggtgcccctgacagcctttgccctggagctggagcacgccctgagcgccatcggccccaccctgctgctgaccagtgacaacatcaagaggcggctgggcagcgctgccctggacagcgtgcatgagtaccgcctgagctcctggctgggccagcaggaggacacccacagaattgtgctgtaccaggtggatggcaccctgaccccctggacccagagatgtgtgcggcaggccgactgcatcctgattgtgggcctgggggaccaggagcccaccgtgggggagctggagaggatgctggagagcacagctgtgcgggcccagaagcagctgatcctgctgcaccgggaggagggccctgccccagccaggacagtggagtggctgaacatgaggtcctggtgcagcggccacctgcacctgtgctgcccccggcgggtcttcagcagaagaagcctgcccaagctggtggagatgtacaagcacgtgttccagaggcccccagacagacacagcgacttcagccggctggcccgggtgctgactggaaatgccatcgccctggtgctgggcggcggcggggcccggggctgtgcccaggtgggcgtgctgaaggccctggccgagtgtggcatccctgtggacatggtgggcggcaccagcattggagcctttgtgggcgccctgtacagcgaggagaggaactacagccagatgaggatccgggccaagcagtgggccgagggcatgaccagcctgatgaaggccgccctggacctgacctaccccatcacctccatgttcagcggggccggcttcaacagcagcatcttcagcgtcttcaaggaccagcagatcgaggacctgtggatcccctactttgccatcaccacagacatcacagccagcgccatgagggtgcacacagatggcagcctgtggtggtacgtgcgggcctccatgagcctgagcggctacatgccacccctgtgtgaccccaaggatggccacctgctgatggatggcggctacatcaacaacctgcctgcagatgtggcccgctccatgggcgccaaggtggtgattgccattgatgtgggcagcagagatgaaacagacctgaccaactatggagatgccctgagcggctggtggctgctgtggaagcgctggaaccccctggccaccaaggtgaaggtgctgaacatggccgagatccagacccggctggcctacgtgtgctgcgtgcggcagctggaggtggtgaagagcagtgactactgtgagtacctgcggccccccatcgacagctacagcaccctggactttgggaagttcaatgagatctgtgaggtgggctaccagcacggccgcacagtgtttgacatctggggccgcagcggcgtgctggagaagatgctgcgggaccagcagggccccagcaagaagccagccagcgctgtgctgacctgccccaatgccagcttcacagacctggccgagatcgtgtccagaattgaaccagccaagccagccatggtggatgatgaaagtgactaccagacagaatatgaggaggagctgctggatgtgcccagagatgcctatgctgacttccagagcaccagcgcccagcagggcagtgacctgtag

SEQ ID NO: 163358 - DNA, 2349 bp, synthetic construct
  misc_feature 1..2349: note = Description of Artificial Sequence: Synthetic coding sequence
  source 1..2349: mol_type = other DNA
atgagcatcaacctgactgtggacatctacatctacctgctgagcaatgcccggtctgtgtgtgggaagcagaggagcaagcagctgtacttcctgttcagccccaagcactactggaggatcagccacatcagcctgcagaggggcttccacaccaacatcatccgctgcaagtggaccaagtctgaggcccacagctgcagcaagcactgctacagccccagcaaccacggcctgcacatcggcatcctgaagctgagcaccagcgcccccaagggcctgaccaaggtgaacatctgcatgagccgcatcaagagcaccctgaacagcgtgtccaaggctgtgtttggaaaccagaatgagatgatcagccggctggcccagttcaagcccagcagccagatcctgaggaaggtgtctgacagcggctggctgaagcagaagaacatcaagcaggccatcaagagcctgaagaagtacagcgacaagtctgctgagaagagccccttccctgaggagaagagccacatcatcgacaaggaggaggacatcggcaagaggagcctcttccactacaccagcagcatcaccaccaagtttggagacagcttctacttcctgagcaaccacatcaacagctacttcaagaggaaggagaagatgagccagcagaaggaaaatgagcacttccgggacaagtctgagctggaggacaagaaggtggaggagggcaagctgcggagcccagaccccggcatcctggcctacaagccaggcagcgagagcgtgcacacagtggacaagcccaccagccccagcgccatcccagatgtgctgcaggtgtccaccaagcagagcatcgccaacttcctgagccggcccacagaaggagtgcaggccctggtgggcggctacatcggcggcctggtgcccaagctgaagtatgacagcaagagccagagcgaggagcaggaggagcccgccaagacagaccaggccgtgtccaaggacagaaatgctgaggagaagaagaggctgagcctgcagcgggagaagatcatcgcccgggtgtccattgacaacagaacccgggccctggtgcaggccctgcggaggaccacagaccccaagctgtgcatcaccagggtggaggagctgaccttccacctgctggagttccctgagggcaaaggagtggccgtgaaggagcgcatcatcccctacctgctgcggctgcggcagatcaaggatgagaccctgcaggccgctgtgcgggagatcctggccctgattggctacgtggaccctgtgaagggccggggcatccgcatcctgagcattgatggcggcggcacccggggcgtggtggccctgcagaccctgaggaagctggtggagctgacccagaagcctgtgcaccagctgtttgactacatctgtggggtgtccactggagccatcctggccttcatgctgggcctcttccacatgcccctggatgaatgtgaggagctgtacaggaagctgggcagtgatgtgttcagccagaatgtgattgtgggcaccgtgaagatgtcctggagccacgccttctatgacagccagacctgggagaacatcctgaaggacaggatgggcagcgccctgatgattgaaacagccaggaaccccacctgccccaaggtggccgctgtgtccaccatcgtgaacagaggcatcacccccaaggcctttgtgttcagaaattatggccacttccctggcatcaacagccactacctgggcggctgccagtacaagatgtggcaggccatccgggccagcagcgctgcccctggctactttgctgaatatgccctgggcaatgacctgcaccaggacggcggcctgctgctgaacaaccccagcgccctggccatgcatgagtgcaagtgcctgtggccagatgtgcccctggagtgcatcgtgtccctgggcaccggccgctatgaaagtgatgtgaggaacacagtgacctacaccagcctgaagaccaagctgagcaatgtcatcaacagcgccacagacacagaggaggtgcacatcatgctggatggcctgctgcccccagacacctacttccgcttcaaccctgtgatgtgtgagaacatccccctggatgagagcagaaatgagaagctggaccagctgcagctggagggcctgaagtacatcgagagaaatgagcagaagatgaagaaggtggccaagatcctgagccaggagaagaccaccctgcagaagatcaatgactggatcaagctgaagacagacatgtatgagggcctgcccttcttcagcaagctgtag

SEQ ID NO: 163359 - DNA, 2163 bp, synthetic construct
  misc_feature 1..2163: note = Description of Artificial Sequence: Synthetic coding sequence
  source 1..2163: mol_type = other DNA
atgagcatcaacctgactgtggacatctacatctacctgctgagcaatgcccggtctgtgtgtgggaagcagaggagcaagcagctgtacttcctgttcagccccaagcactactggaggatcagccacatcagcctgcagaggggcttccacaccaacatcatccgctgcaagtggaccaagtctgaggcccacagctgcagcaagcactgctacagccccagcaaccacggcctgcacatcggcatcctgaagctgagcaccagcgcccccaagggcctgaccaaggtgaacatctgcatgagccgcatcaagagcaccctgaacagcgtgtccaaggctgtgtttggaaaccagaatgagatgatcagccggctggcccagttcaagcccagcagccagatcctgaggaaggtgtctgacagcggctggctgaagcagaagaacatcaagcaggccatcaagagcctgaagaagtacagcgacaagtctgctgagaagagccccttccctgaggagaagagccacatcatcgacaaggaggaggacatcggcaagaggagcctcttccactacaccagcagcatcaccaccaagtttggagacagcttctacttcctgagcaaccacatcaacagctacttcaagaggaaggagaagatgagccagcagaaggaaaatgagcacttccgggacaagtctgagctggaggacaagaaggtggaggagggcaagctgcggagcccagaccccggcatcctggcctacaagccaggcagcgagagcgtgcacacagtggacaagcccaccagccccagcgccatcccagatgtgctgcaggtgtccaccaagcagagcatcgccaacttcctgagccggcccacagaaggagtgcaggccctggtgggcggctacatcggcggcctggtgcccaagctgaagtatgacagcaagagccagagcgaggagcaggaggagcccgccaagacagaccaggccgtgtccaaggacagaaatgctgaggagaagaagaggctgagcctgcagcgggagaagatcatcgcccgggtgtccattgacaacagaacccgggccctggtgcaggccctgcggaggaccacagaccccaagctgtgcatcaccagggtggaggagctgaccttccacctgctggagttccctgagggcaaaggagtggccgtgaaggagcgcatcatcccctacctgctgcggctgcggcagatcaaggatgagaccctgcaggccgctgtgcgggagatcctggccctgattggctacgtggaccctgtgaagggccggggcatccgcatcctgagcattgatggcggcggcacccggggcgtggtggccctgcagaccctgaggaagctggtggagctgacccagaagcctgtgcaccagctgtttgactacatctgtggggtgtccactggagccatcctggccttcatgctgggcctcttccacatgcccctggatgaatgtgaggagctgtacaggaagctgggcagtgatgtgttcagccagaatgtgattgtgggcaccgtgaagatgtcctggagccacgccttctatgacagccagacctgggagaacatcctgaaggacaggatgggcagcgccctgatgattgaaacagccaggaaccccacctgccccaaggtgaggaaggatggcggcctgctgctgaacaaccccagcgccctggccatgcatgagtgcaagtgcctgtggccagatgtgcccctggagtgcatcgtgtccctgggcaccggccgctatgaaagtgatgtgaggaacacagtgacctacaccagcctgaagaccaagctgagcaatgtcatcaacagcgccacagacacagaggaggtgcacatcatgctggatggcctgctgcccccagacacctacttccgcttcaaccctgtgatgtgtgagaacatccccctggatgagagcagaaatgagaagctggaccagctgcagctggagggcctgaagtacatcgagagaaatgagcagaagatgaagaaggtggccaagatcctgagccaggagaagaccaccctgcagaagatcaatgactggatcaagctgaagacagacatgtatgagggcctgcccttcttcagcaagctgtag

SEQ ID NO: 163360 - DNA, 168 bp, synthetic construct
  misc_feature 1..168: note = Description of Artificial Sequence: Synthetic coding sequence
  source 1..168: mol_type = other DNA
atgagcatcaacctgactgtggacatctacatctacctgctgagcaatgcccggtctgtgtgtgggaagcagaggagcaagcagctgtacttcctgttcagccccaagcactactggaggatcagccacatcagcctgcagaggggcttccacaccaacatcatctag

SEQ ID NO: 163361 - DNA, 2349 bp, synthetic construct; identical to SEQ ID NO: 163358
  misc_feature 1..2349: note = Description of Artificial Sequence: Synthetic coding sequence
  source 1..2349: mol_type = other DNA

SEQ ID NO: 163362 - DNA, 582 bp, synthetic construct
  misc_feature 1..582: note = Description of Artificial Sequence: Synthetic coding sequence
  source 1..582: mol_type = other DNA
atgagcatcaacctgactgtggacatctacatctacctgctgagcaatgcccggtctgtgtgtgggaagcagaggagcaagcagctgtacttcctgttcagccccaagcactactggaggatcagccacatcagcctgcagaggggcttccacaccaacatcatccgctgcaagtggaccaagtctgaggcccacagctgcagcaagcactgctacagccccagcaaccacggcctgcacatcggcatcctgaagctgagcaccagcgcccccaagggcctgaccaaggtgaacatctgcatgagccgcatcaagagcaccctgaacagcgtgtccaaggctgtgtttggaaaccagaatgagatgatcagccggctggcccagttcaagcccagcagccagatcctgaggaaggtgtctgacagcggctggctgaagcagaagaacatcaagcaggccatcaagagcctgaagaagtacagcgacaagtctgctgagaagagccccttccctgaggagaagagccacatcatcgacaaggaggaggacatcggcaagaggagcctcttccactacacctag

SEQ ID NO: 163363 - DNA, 2349 bp, synthetic construct; identical to SEQ ID NO: 163358
  misc_feature 1..2349: note = Description of Artificial Sequence: Synthetic coding sequence
  source 1..2349: mol_type = other DNA

SEQ ID NO: 163364 - DNA, 2154 bp, synthetic construct
  misc_feature 1..2154: note = Description of Artificial Sequence: Synthetic coding sequence
  source 1..2154: mol_type = other DNA
atgagcatcaacctgactgtggacatctacatctacctgctgagcaatgcccggtctgtgtgtgggaagcagaggagcaagcagctgtacttcctgttcagccccaagcactactggaggatcagccacatcagcctgcagaggggcttccacaccaacatcatccgctgcaagtggaccaagtctgaggcccacagctgcagcaagcactgctacagccccagcaaccacggcctgcacatcggcatcctgaagctgagcaccagcgcccccaagggcctgaccaaggtgaacatctgcatgagccgcatcaagagcaccctgaacagcgtgtccaaggctgtgtttggaaaccagaatgagatgatcagccggctggcccagttcaagcccagcagccagatcctgaggaaggtgtctgacagcggctggctgaagcagaagaacatcaagcaggccatcaagagcctgaagaagtacagcgacaagtctgctgagaagagccccttccctgaggagaagagccacatcatcgacaaggaggaggacatcggcaagaggagcctcttccactacaccagcagcatcaccaccaagtttggagacagcttctacttcctgagcaaccacatcaacagctacttcaagaggaaggagaagatgagccagcagaaggaaaatgagcacttccgggacaagtctgagctggaggacaagaaggtggaggagggcaagctgcggagcccagaccccggcatcctggcctacaagccaggcagcgagagcgtgcacacagtggacaagcccaccagccccagcgccatcccagatgtgctgcaggtgtccaccaagcagagcatcgccaacttcctgagccggcccacagaaggagtgcaggccctggtgggcggctacatcggcggcctggtgcccaagctgaagtatgacagcaagagccagagcgaggagcaggaggagcccgccaagacagaccaggccgtgtccaaggacagaaatgctgaggagaagaagaggctgagcctgcagcgggagaagatcatcgcccgggtgtccattgacaacagaacccgggccctggtgcaggccctgcggaggaccacagaccccaagctgtgcatcaccagggtggaggagctgaccttccacctgctggagttccctgagggcaaaggagtggccgtgaaggagcgcatcatcccctacctgctgcggctgcggcagatcaaggatgagaccctgcaggccgctgtgcgggagatcctggccctgattggctacgtggaccctgtgaagggccggggcatccgcatcctgagcattgatggcggcggcacccggggcgtggtggccctgcagaccctgaggaagctggtggagctgacccagaagcctgtgcaccagctgtttgactacatctgtggggtgtccactggagccatcctggccttcatgctgggcctcttccacatgcccctggatgaatgtgaggagctgtacaggaagctgggcagtgatgtgttcagccagaatgtgattgtgggcaccgtgaagatgtcctggagccacgccttctatgacagccagacctgggagaacatcctgaaggacaggatgggcagcgccctgatgattgaaacagccaggaaccccacctgccccaaggatggcggcctgctgctgaacaaccccagcgccctggccatgcatgagtgcaagtgcctgtggccagatgtgcccctggagtgcatcgtgtccctgggcaccggccgctatgaaagtgatgtgaggaacacagtgacctacaccagcctgaagaccaagctgagcaatgtcatcaacagcgccacagacacagaggaggtgcacatcatgctggatggcctgctgcccccagacacctacttccgcttcaaccctgtgatgtgtgagaacatccccctggatgagagcagaaatgagaagctggaccagctgcagctggagggcctgaagtacattgaaagaaatgagcagaagatgaagaaggtggccaagatcctgagccaggagaagaccaccctgcagaagatcaatgactggatcaagctgaagacagacatgtatgagggcctgcccttcttcagcaagctgtag

SEQ ID NO: 163365 - DNA, 2049 bp, synthetic construct
  misc_feature 1..2049: note = Description of Artificial Sequence: Synthetic coding sequence
  source 1..2049: mol_type = other DNA
atgagccgcatcaagagcaccctgaacagcgtgtccaaggctgtgtttggaaaccagaatgagatgatcagccggctggcccagttcaagcccagcagccagatcctgaggaaggtgtctgacagcggctggctgaagcagaagaacatcaagcaggccatcaagagcctgaagaagtacagcgacaagtctgctgagaagagccccttccctgaggagaagagccacatcatcgacaaggaggaggacatcggcaagaggagcctcttccactacaccagcagcatcaccaccaagtttggagacagcttctacttcctgagcaaccacatcaacagctacttcaagaggaaggagaagatgagccagcagaaggaaaatgagcacttccgggacaagtctgagctggaggacaagaaggtggaggagggcaagctgcggagcccagaccccggcatcctggcctacaagccaggcagcgagagcgtgcacacagtggacaagcccaccagccccagcgccatcccagatgtgctgcaggtgtccaccaagcagagcatcgccaacttcctgagccggcccacagaaggagtgcaggccctggtgggcggctacatcggcggcctggtgcccaagctgaagtatgacagcaagagccagagcgaggagcaggaggagcccgccaagacagaccaggccgtgtccaaggacagaaatgctgaggagaagaagaggctgagcctgcagcgggagaagatcatcgcccgggtgtccattgacaacagaacccgggccctggtgcaggccctgcggaggaccacagaccccaagctgtgcatcaccagggtggaggagctgaccttccacctgctggagttccctgagggcaaaggagtggccgtgaaggagcgcatcatcccctacctgctgcggctgcggcagatcaaggatgagaccctgcaggccgctgtgcgggagatcctggccctgattggctacgtggaccctgtgaagggccggggcatccgcatcctgagcattgatggcggcggcacccggggcgtggtggccctgcagaccctgaggaagctggtggagctgacccagaagcctgtgcaccagctgtttgactacatctgtggggtgtccactggagccatcctggccttcatgctgggcctcttccacatgcccctggatgaatgtgaggagctgtacaggaagctgggcagtgatgtgttcagccagaatgtgattgtgggcaccgtgaagatgtcctggagccacgccttctatgacagccagacctgggagaacatcctgaaggacaggatgggcagcgccctgatgattgaaacagccaggaaccccacctgccccaaggtggccgctgtgtccaccatcgtgaacagaggcatcacccccaaggcctttgtgttcagaaattatggccacttccctggcatcaacagccactacctgggcggctgccagtacaagatgtggcaggccatccgggccagcagcgctgcccctggctactttgctgaatatgccctgggcaatgacctgcaccaggacggcggcctgctgctgaacaaccccagcgccctggccatgcatgagtgcaagtgcctgtggccagatgtgcccctggagtgcatcgtgtccctgggcaccggccgctatgaaagtgatgtgaggaacacagtgacctacaccagcctgaagaccaagctgagcaatgtcatcaacagcgccacagacacagaggaggtgcacatcatgctggatggcctgctgcccccagacacctacttccgcttcaaccctgtgatgtgtgagaacatccccctggatgagagcagaaatgagaagctggaccagctgcagctggagggcctgaagtacatcgagagaaatgagcagaagatgaagaaggtggccaagatcctgagccaggagaagaccaccctgcagaagatcaatgactggatcaagctgaagacagacatgtatgagggcctgcccttcttcagcaagctgtag

SEQ ID NO: 163366 - DNA, 3612 bp, synthetic construct
  misc_feature 1..3612: note = Description of Artificial Sequence: Synthetic coding sequence
  source 1..3612: mol_type = other DNA
atgaccaggagcccccccctgcgggagctgcccccatcctacaccccaccagccaggacagctgccccccagatcctggccggcagcctgaaggcccccctgtggctgcgggcctacttccagggcctgctcttcagcctgggctgcggcatccagaggcactgcggcaaggtgctcttcctgggcctgctggccttcggggccctggccctgggcctgaggatggccatcatcgagaccaacctggagcagctgtgggtggaggtgggcagccgggtgtcccaggagctgcactacaccaaggagaagctgggggaggaggccgcctacaccagccagatgctgatccagacagcccggcaggagggggagaacatcctgaccccagaggccctgggcctgcacctgcaggccgccctgacagccagcaaggtgcaggtgtccctgtatggcaagtcctgggacctgaacaagatctgctacaagtctggagtgcccctgattgaaaatggcatgattgaaagaatgattgagaagctgttcccctgtgtgatcctgacccccctggactgcttctgggagggcgccaagctgcagggcggcagcgcctacctgcccggccgcccagacatccagtggaccaacctggaccctgagcagctgctggaggagctgggcccctttgccagcctggagggcttccgggagctgctggacaaggcccaggtgggccaggcctacgtgggccggccctgcctgcacccagatgacctgcactgccccccatctgcccccaaccaccacagccggcaggcccccaacgtggcccacgagctgagcggcggctgccacggcttcagccacaagttcatgcactggcaggaggagctgctgctgggcggcatggcccgggacccccagggcgagctgctgcgggcagaggccctgcagagcaccttcctgctgatgagcccccggcagctgtatgagcacttccggggggactaccagacccatgacatcggctggagcgaggagcaggccagcacagtgctgcaggcctggcagaggagatttgtgcagctggcccaggaggccctgcctgaaaatgccagccagcagatccacgccttcagcagcaccaccctggatgacatcctgcacgccttcagcgaggtgtctgctgcccgggtggtgggcggctacctgctgatgctggcctatgcctgtgtgaccatgctgcgctgggactgtgcccagagccagggctctgtgggcctggccggcgtgctgctggtggccctggccgtggccagcggcctgggcctgtgtgccctgctgggcatcaccttcaatgctgccaccacccaggtgctgcccttcctggccctgggcatcggcgtggatgatgtgttcctgctggcccacgccttcacagaggccctgcccggcacccccctgcaggagaggatgggagaatgtctgcagaggacaggcacctctgtggtgctgaccagcatcaacaacatggccgccttcctgatggccgccctggtgcccatcccagccctgcgggccttcagcctgcaggccgccatcgtggtgggctgcacctttgtggccgtgatgctggtgtttcctgccatcctgagcctggacctgcggcggcggcactgccagaggctggatgtgctgtgctgcttcagcagcccctgcagcgcccaggtgatccagatcctgccccaggagctgggagatggcaccgtgcctgtgggcatcgcccacctgacagccaccgtgcaggccttcacccactgtgaggccagcagccagcacgtggtgaccatcctgcccccccaggcccacctggtgcccccacccagcgaccccctgggcagcgagctgttcagccctgggggcagcacccgggacctgctgggccaggaggaggagacccggcagaaggccgcctgcaagagcctgccctgtgcccgctggaacctggcccactttgcccgctaccagtttgcccccctgctgctgcagagccacgccaaggccatcgtgctggtgctgtttggagccctgctgggcctgagcctgtatggagccaccctggtgcaggacggcctggccctgacagatgtggtgccccggggcaccaaggagcacgccttcctgagcgcccagctgcgctacttcagcctgtatgaggtggccctggtgacccagggcggctttgattatgcccacagccagagggccctgtttgacctgcaccagcgcttcagcagcctgaaggctgtgctgcccccaccagccacccaggcccccaggacctggctgcactactacagaaactggctgcagggcatccaggccgcctttgaccaggactgggccagcggccgcatcaccaggcacagctacagaaatggaagtgaagatggagccctggcctacaagctgctgatccagacaggagatgcccaggagcccctggacttcagccagctgaccaccaggaagctggtggaccgggagggcctcatccccccagagctgttctacatgggcctgactgtgtgggtgtccagtgaccccctgggcctggccgccagccaggccaacttctacccacctcctcctgagtggctgcatgacaagtatgacaccactggagagaacctgcgcatccccccagcccagcccctggagtttgcccagttccccttcctgctgcggggcctgcagaagacagctgactttgtggaggccattgaaggagcccgggccgcctgtgccgaggccggccaggccggcgtgcacgcctaccccagcggcagccccttcctgttctgggagcagtacctgggcctgcggcgctgcttcctgctggccgtgtgcatcctgctggtgtgcaccttcctggtgtgtgccctgctgctgctgaacccctggacagctggcctcatcgtgctggtgctggccatgatgacagtggagctgtttggcatcatgggcttcctgggcatcaagctgagcgccatccctgtggtgatcctggtggcctctgtgggcatcggcgtggagttcaccgtgcacgtggccctgggcttcctgaccacccagggcagcaggaacctgcgggccgcccacgccctggagcacacctttgcccctgtgacagatggagccatcagcaccctgctgggcctgctgatgctggccggcagccactttgacttcatcgtgcgctacttctttgctgccctgactgtgctgaccctgctgggcctgctgcacggcctggtgctgctgcctgtgctgctgagcatcctgggccccccacctgaggtgatccagatgtacaaggagagccctgagatcctgagccccccagccccccagggcggcggcctgcgctggggcgccagcagcagcctgccccagagctttgcccgggtgaccacctccatgacagtggccatccaccccccacccctgcccggggcctacatccacccagccccagatgagcccccctggagccctgctgccaccagcagcggcaacctgagcagccggggccctggccctgccaccggctag

SEQ ID NO: 163367 - DNA, 267 bp, synthetic construct
  misc_feature 1..267: note = Description of Artificial Sequence: Synthetic coding sequence
  source 1..267: mol_type = other DNA
tgatttgacttcatcgtgcgctacttctttgctgccctgactgtgctgaccctgctgggcctgctgcacggcctggtgctgctgcctgtgctgctgagcatcctgggccccccacctgaggtgatccagatgtacaaggagagccctgagatcctgagccccccagccccccagggcggcggcctgcgggtgggcagcctgcaggtgaacatctcctactggaaggagctgctgtggtgccaggacctgcggcctgaggagatctag

SEQ ID NO: 163368 - DNA, 3441 bp, synthetic construct
  misc_feature 1..3441: note = Description of Artificial Sequence: Synthetic coding sequence
  source 1..3441: mol_type = other DNA
atgaccaggagcccccccctgcgggagctgcccccatcctacaccccaccagccaggacagctgccccccagatcctggccggcagcctgaaggcccccctgtggctgcgggcctacttccagggcctgctcttcagcctgggctgcggcatccagaggcactgcggcaaggtgctcttcctgggcctgctggccttcggggccctggccctgggcctgaggatggccatcatcgagaccaacctggagcagctgtgggtggaggtgggcagccgggtgtcccaggagctgcactacaccaaggagaagctgggggaggaggccgcctacaccagccagatgctgatccagacagcccggcaggagggggagaacatcctgaccccagaggccctgggcctgcacctgcaggccgccctgacagccagcaaggtgcaggtgtccctgtatggcaagtcctgggacctgaacaagatctgctacaagtctggagtgcccctgattgaaaatggcatgattgaaagaatgattgagaagctgttcccctgtgtgatcctgacccccctggactgcttctgggagggcgccaagctgcagggcggcagcgcctacctgcccggccgcccagacatccagtggaccaacctggaccctgagcagctgctggaggagctgggcccctttgccagcctggagggcttccgggagctgctggacaaggcccaggtgggccaggcctacgtgggccggccctgcctgcacccagatgacctgcactgccccccatctgcccccaaccaccacagccggcaggcccccaacgtggcccacgagctgagcggcggctgccacggcttcagccacaagttcatgcactggcaggaggagctgctgctgggcggcatggcccgggacccccagggcgagctgctgcgggcagaggccctgcagagcaccttcctgctgatgagcccccggcagctgtatgagcacttccggggggactaccagacccatgacatcggctggagcgaggagcaggccagcacagtgctgcaggcctggcagaggagatttgtgcagctggcccaggaggccctgcctgaaaatgccagccagcagatccacgccttcagcagcaccaccctggatgacatcctgcacgccttcagcgaggtgtctgctgcccgggtggtgggcggctacctgctgatgctggcctatgcctgtgtgaccatgctgcgctgggactgtgcccagagccagggctctgtgggcctggccggcgtgctgctggtggccctggccgtggccagcggcctgggcctgtgtgccctgctgggcatcaccttcaatgctgccaccacccaggtgctgcccttcctggccctgggcatcggcgtggatgatgtgttcctgctggcccacgccttcacagaggccctgcccggcacccccctgcaggagaggatgggagaatgtctgcagaggacaggcacctctgtggtgctgaccagcatcaacaacatggccgccttcctgatggccgccctggtgcccatcccagccctgcgggccttcagcctgcaggccgccatcgtggtgggctgcacctttgtggccgtgatgctggtgtttcctgccatcctgagcctggacctgcggcggcggcactgccagaggctggatgtgctgtgctgcttcagcagcccctgcagcgcccaggtgatccagatcctgccccaggagctgggagatggcaccgtgcctgtgggcatcgcccacctgacagccaccgtgcaggccttcacccactgtgaggccagcagccagcacgtggtgaccatcctgcccccccaggcccacctggtgcccccacccagcgaccccctgggcagcgagctgttcagccctgggggcagcacccgggacctgctgggccaggaggaggagacccggcagaaggccgcctgcaagagcctgccctgtgcccgctggaacctggcccactttgcccgctaccagtttgcccccctgctgctgcagagccacgccaaggccatcgtgctggtgctgtttggagccctgctgggcctgagcctgtatggagccaccctggtgcaggacggcctggccctgacagatgtggtgccccggggcaccaaggagcacgccttcctgagcgcccagctgcgctacttcagcctgtatgaggtggccctggtgacccagggcggctttgattatgcccacagccagagggccctgtttgacctgcaccagcgcttcagcagcctgaaggctgtgctgcccccaccagccacccaggcccccaggacctggctgcactactacagaaactggctgcagggcatccaggccgcctttgaccaggactgggccagcggccgcatcaccaggcacagctacagaaatggaagtgaagatggagccctggcctacaagctgctgatccagacaggagatgcccaggagcccctggacttcagccagctgaccaccaggaagctggtggaccgggagggcctcatccccccagagctgttctacatgggcctgactgtgtgggtgtccagtgaccccctgggcctggccgccagccaggccaacttctacccacctcctcctgagtggctgcatgacaagtatgacaccactggagagaacctgcgcatccccccagcccagcccctggagtttgcccagttccccttcctgctgcggggcctgcagaagacagctgactttgtggaggccattgaaggagcccgggccgcctgtgccgaggccggccaggccggcgtgcacgcctaccccagcggcagccccttcctgttctgggagcagtacctgggcctgcggcgctgcttcctgctggccgtgtgcatcctgctggtgtgcaccttcctggtgtgtgccctgctgctgctgaacccctggacagctggcctcatcgtgctggtgctggccatgatgacagtggagctgtttggcatcatgggcttcctgggcatcaagctgagcgccatccctgtggtgatcctggtggcctctgtgggcatcggcgtggagttcaccgtgcacgtggccctgggcttcctgaccacccagggcagcaggaacctgcgggccgcccacgccctggagcacacctttgcccctgtgacagatggagccatcagcaccctgctgggcctgctgatgctggccggcagccactttgacttcatcgtgcgctacttctttgctgccctgactgtgctgaccctgctgggcctgctgcacggcctggtgctgctgcctgtgctgctgagcatcctgggccccccacctgaggtgatccagatgtacaaggagagccctgagatcctgagccccccagccccccagggcggcggcctgcggcctgaggagatctag

SEQ ID NO: 163369 - DNA, 2667 bp, synthetic construct
  misc_feature 1..2667: note = Description of Artificial Sequence: Synthetic coding sequence
  source 1..2667: mol_type = other DNA
atgctgcggcaggtgctgcaccggggcctgcggacctgcttcagccggctgggccacttcatcgccagccaccctgtgttctttgccagcgcccctgtgctgatcagcatcctgctgggcgccagcttcagccgctaccaggtggaggagagcgtggagcacctgctggccccccagcacagcctggccaagattgaaagaaacctggtgaacagcctcttccctgtgaacagaagcaagcaccggctgtacagcgacctgcagaccccaggccgctatggccgggtgattgtgaccagcttccagaaggccaacatgctggaccagcaccacacagacctgatcctgaagctgcacgccgctgtgaccaagatccaggtgccccggcccggcttcaactacacctttgcccacatctgcatcctgaacaatgacaagacctgcatcgtggatgacatcgtgcacgtgctggaggagctgaagaatgcccgggccaccaacagaaccaactttgccatcacctaccccatcacccacctgaaggatggccgggctgtgtacaacggccaccagctgggcggcgtgacagtgcacagcaaggacagagtgaagtctgctgaggccatccagctgacctactacctgcagagcatcaacagcctgaatgacatggtggccgagcgctgggagagcagcttctgtgacacagtgcggctcttccagaagagcaacagcaaggtgaagatgtacccctacaccagcagcagcctgcgggaggacttccagaagaccagccgggtgtctgagcgctacctggtgaccagcctcatcctggtggtgaccatggccatcctgtgctgcagcatgcaggactgtgtgcgcagcaagccctggctgggcctgctgggcctggtgaccatcagcctggccaccctgacagctgctggcatcatcaacctgactggaggcaagtacaacagcaccttcctgggcgtgccctttgtgatgctgggccacggcctgtatggcacctttgagatgctgagctcctggaggaagacccgggaggaccagcacgtgaaggagaggacagctgctgtgtatgctgacagcatgctgtccttcagcctgaccacagccatgtacctggtgaccttcggcatcggggccagccccttcaccaacatcgaggccgcccgcatcttctgctgcaacagctgcatcgccatcttcttcaactacctgtatgtgctgtccttctacggcagcagcctggtgttcaccggctacatcgagaacaactaccagcacagcatcttctgcaggaaggtgcccaagccagaggccctgcaggagaagccagcctggtaccgcttcctgctgacagcccgcttcagcgaggacacagctgagggggaggaggccaacacctatgagagccacctgctggtgtgcttcctgaagcgctactactgtgactggatcaccaacacctacgtgaagccctttgtggtgctcttctacctgatctacatcagctttgccctgatgggctacctgcaggtgtctgagggcagtgacctgagcaacatcgtggccacagccacccagaccatcgagtacaccacagcccagcagaagtacttcagcaactacagccctgtgattggcttctacatctatgagagcattgagtactggaacacctctgtgcaggaggatgtgctggagtacaccaagggctttgtgcgcatctcctggtttgagagctacctgaactacctgaggaagctgaatgtgtccacaggcctgcccaagaagaacttcacagacatgctgaggaacagcttcctgaaggccccccagttcagccacttccaggaggacatcatcttcagcaagaagtacaatgatgaggtggatgtggtggccagcaggatgttcctggtggccaagaccatggagaccaaccgggaggagctgtatgacctgctggagaccctgcggcggctgtctgtgaccagcaaggtgaagttcatcgtgttcaaccccagctttgtgtacatggacagatatgccagcagcctgggcgcccccctgcacaacagctgcatcagcgccctcttcctgctcttcttcagcgccttcctggtggccgacagcctcatcaacgtgtggatcaccctgactgtggtgtctgtggagtttggagtgattggcttcatgaccctgtggaaggtggagctggactgcatctctgtgctgtgcctgatctacggcatcaactacaccatcgacaactgtgcccccatgctgagcacctttgtgctgggcaaggacttcaccaggaccaagtgggtgaagaatgccctggaggtgcacggcgtggccatcctgcagagctacctgtgctacatcgtgggcctcatccccctggccgctgtgcccagcaacctgacctgcaccctcttccgctgcctcttcctgattgcctttgtgaccttcttccactgctttgccatcctgcctgtgatcctgaccttcctgccccccagcaagaagaagaggaaggagaagaagaacccagaaaatcgggaggagattgaatgtgtggagatggtggacatcgacagcaccagggtggtggaccagatcaccaccgtgtag

SEQ ID NO: 163370 - DNA, 4179 bp, synthetic construct
  misc_feature 1..4179: note = Description of Artificial Sequence: Synthetic coding sequence
  source 1..4179: mol_type = other DNA
atggacacagaagatgaccccctgctgcaggatgtgtggctggaggaggagcaggaggaggaggaggccaccggggagaccttcctgggcgcccagaagccaggcccccagcccggggccggcggccagtgctgctggaggcactggcccctggccagccggcccccagccagcggcttctggagcaccctgggctgggccttcaccaacccctgctgtgccggcctggtgctcttcctgggctgcagcatccccatggccctgagcgccttcatgttcctgtactacccacccctggacatcgacatctcctacaatgcctttgagatcagaaatcatgaggccagccagagatttgatgccctgaccctggccctgaagagccagtttggctcctggggcaggaacagaagagacctggccgacttcaccagcgagaccctgcagaggctcatcagcgagcagctgcagcagctgcacctgggcaacagaagccggcaggccagccgggcccccagggtcatcccagctgccagcctgggcggccctggcccctacagagacaccagcgctgcccagaagcccacagccaacagaagtggccgcctgcggcgggagaccccacccctggaggacctggccgccaaccagagcgaggaccccaggaaccagaggctgagcaagaatggccgctaccagcccagcatcccccctcatgctgctgtggccgccaaccagagccgggcccggcggggggccagccgctgggactacagccgggcctacgtgtctgccaacacccagacccacgcccactggagaattgagctgatcttcctggcccggggagatgctgagaggaacatcttcaccagcgagcggctggtgaccatccatgaaattgaaaggaagatcatggaccaccctggcttccgggagttctgctggaagccccatgaggtgctgaaggacctgcccctgggcagctacagctactgcagcccccccagcagcctgatgacctacttcttccccacagagcggggcggcaagatctactatgatggcatgggccaggacctggccgacatccggggcagcctggagctggccatgacccaccctgagttctactggtacgtggatgagggcctgtctgctgacaacctgaagagcagcctgctgcggtctgagatcctgtttggagcccccctgcccaactactacagcgtggatgaccgctgggaggagcagagggccaagttccagagctttgtggtgacctacgtggccatgctggccaagcagagcaccagcaaggtgcaggtgctgtatggaggaacagacctgtttgattatgaggtgcggaggaccttcaacaatgacatgctgctggccttcatcagcagcagctgcatcgccgccctggtgtacatcctgaccagctgcagcgtcttcctgtccttcttcggcatcgccagcatcggcctgagctgcctggtggccctcttcctgtaccacgtggtgtttggcatccagtacctgggcatcctgaatggagtggccgccttcgtcatcgtgggcattggagtggatgatgtgtttgtgttcatcaacacctaccggcaggccacccacctggaggacccccagctgaggatgatccacacagtgcagacagctgggaaggccaccttcttcaccagcctgaccacagctgctgcctatgctgccaacgtgttcagccagatcccagctgtgcatgactttggcctcttcatgagcctgattgtgtcctgctgctggctggccgtgctggtgaccatgcctgctgccctgggcctgtggagcctgtacctggcccccctggagagcagctgccagaccagctgccaccagaactgcagcaggaagaccagcctgcacttccctggagatgtgtttgctgcccctgagcaggtgggcggcagccctgcccagggccccatcccctacctggatgatgacatccccctgctggaggtggaggaggagcctgtgtccctggagctgggagatgtgtccctggtgtctgtgtccccagagggcctgcagcctgccagcaacacaggcagccggggccacctgattgtgcagctgcaggagctgctgcaccactgggtgctgtggagcgctgtgaagagccgctgggtgattgtgggcctgtttgtgtccatcctgatcctgagcctggtgtttgccagccggctgcggcctgccagccgggcccccctgctcttccggccagacaccaacatccaggtgctgctggacctgaagtacaacctgtctgctgagggcatcagctgcatcacctgcagcggcctcttccaggagaagccccacagcctgcagaacaacatccgcaccagcctggagaagaagagaagaggcagcggcgtgccctgggccagcaggcctgaggccaccctgcaggacttccctggcaccgtgtacatcagcaaggtgaagagccagggccaccctgctgtgtaccgcctgagcctgaatgccagcctgcctgccccctggcaggccgtgtccccaggagatggagaggtgcccagcttccaggtgtaccgggccccctttggaaacttcaccaagaagctgacagcctgcatgagcacagtgggcctgctgcaggccgccagccccagcaggaagtggatgctgaccaccctggcctgtgatgccaagaggggctggaagtttgacttctccttctacgtggccaccaaggagcagcagcacaccaggaagctgtactttgcccagagccacaagccacccttccacggccgggtgtgcatggcccctcctggctgcctgctgagcagcagcccagatggccccaccaagggcttcttctttgtgcccagcgagaaggtgcccaaggcccggctgagcgccaccttcggcttcaacccctgtgtgaacacaggctgtgggaagccagctgtgcggcccctggtggacacaggagccatggtgtttgtggtgtttggcatcatcggcgtgaacagaacccggcaggtggacaaccacgtgattggagaccccggctctgtggtgtatgacagcagctttgacctcttcaaggagatcggccacctgtgccacctgtgcaaggccatcgccgccaacagcgagctggtgaagccaggaggagcccagtgcctgcccagcggctacagcatcagcagcttcctgcagatgctgcaccctgagtgcaaggagctgcctgagcccaacctgctgcccggccagctgagccacggggctgtgggcgtgcgggagggccgggtgcagtggatctccatggcctttgagagcaccacctacaagggcaagagcagcttccagacctacagcgactacctgcgctgggagagcttcctgcagcagcagctgcaggccctgcctgagggctctgtgctgcggcggggcttccagacctgtgagcactggaagcagatcttcatggagatcgtgggcgtgcagagcgccctgtgtggcctggtgctgagcctgctgatctgtgtggccgctgtggccgtgttcaccacccacatcctgctgctgctgcctgtgctgctgagcatcctgggcatcgtgtgcctggtggtgaccatcatgtactggagcggctgggagatgggcgctgtggaggccatcagcctgagcatcctggtgggcagctctgtggactactgtgtgcacctggtggagggctacctgctggccggggagaacctgcccccccaccaggccgaggatgcccggacccagaggcagtggaggaccctggaggccgtgcgccacgtgggcgtggccatcgtgagcagcgccctgaccaccgtcatcgccaccgtgcccctcttcttctgcatcatcgccccctttgccaagtttgggaagatcgtggccctgaacacaggagtgtccatcctgtacaccctgactgtgtccacagccctgctgggcatcatggcccccagcagcttcaccaggaccaggaccagcttcctgaaggccctgggcgctgtgctgctggccggggccctgggcctgggcgcctgcctggtgctgctgcagagcggctacaagatccccctgcctgctggggccagcctgtag

SEQ ID NO: 163371 - DNA, 4179 bp, synthetic construct
  misc_feature 1..4179: note = Description of Artificial Sequence: Synthetic coding sequence
  source 1..4179: mol_type = other DNA
atggacacagaagatgaccccctgctgcaggatgtgtggctggaggaggagcaggaggaggaggaggccaccggggagaccttcctgggcgcccagaagccaggcccccagcccggggccggcggccagtgctgctggaggcactggcccctggccagccggcccccagccagcggcttctggagcaccctgggctgggccttcaccaacccctgctgtgccggcctggtgctcttcctgggctgcagcatccccatggccctgagcgccttcatgttcctgtactacccacccctggacatcgacatctcctacaatgcctttgagatcagaaatcatgaggccagccagagatttgatgccctgaccctggccctgaagagccagtttggctcctggggcaggaacagaagagacctggccgacttcaccagcgagaccctgcagaggctcatcagcgagcagctgcagcagctgcacctgggcaacagaagccggcaggccagccgggcccccagggtcatcccagctgccagcctgggcggccctggcccctacagagacaccagcgctgcccagaagcccacagccaacagaagtggccgcctgcggcgggagaccccacccctggaggacctggccgccaaccagagcgaggaccccaggaaccagaggctgagcaagaatggccgctaccagcccagcatcccccctcatgctgctgtggccgccaaccagagccgggcccggcggggggccagccgctgggactacagccgggcctacgtgtctgccaacacccagacccacgcccactggagaattgagctgatcttcctggcccggggagatgctgagaggaacatcttcaccagcgagcggctggtgaccatccatgaaattgaaaggaagatcatggaccaccctggcttccgggagttctgctggaagccccatgaggtgctgaaggacctgcccctgggcagctacagctactgcagcccccccagcagcctgatgacctacttcttccccacagagcggggcggcaagatctactatgatggcatgggccaggacctggccgacatccggggcagcctggagctggccatgacccaccctgagttctactggtacgtggatgagggcctgtctgctgacaacctgaagagcagcctgctgcggtctgagatcctgtttggagcccccctgcccaactactacagcgtggatgaccgctgggaggagcagagggccaagttccagagctttgtggtgacctacgtggccatgctggccaagcagagcaccagcaaggtgcaggtgctgtatggaggaacagacctgtttgattatgaggtgcggaggaccttcaacaatgacatgctgctggccttcatcagcagcagctgcatcgccgccctggtgtacatcctgaccagctgcagcgtcttcctgtccttcttcggcatcgccagcatcggcctgagctgcctggtggccctcttcctgtaccacgtggtgtttggcatccagtacctgggcatcctgaatggagtggccgccttcgtcatcgtgggcattggagtggatgatgtgtttgtgttcatcaacacctaccggcaggccacccacctggaggacccccagctgaggatgatccacacagtgcagacagctgggaaggccaccttcttcaccagcctgaccacagctgctgcctatgctgccaacgtgttcagccagatcccagctgtgcatgactttggcctcttcatgagcctgattgtgtcctgctgctggctggccgtgctggtgaccatgcctgctgccctgggcctgtggagcctgtacctggcccccctggagagcagctgccagaccagctgccaccagaactgcagcaggaagaccagcctgcacttccctggagatgtgtttgctgcccctgagcaggtgggcggcagccctgcccagggccccatcccctacctggatgatgacatccccctgctggaggtggaggaggagcctgtgtccctggagctgggagatgtgtccctggtgtctgtgtccccagagggcctgcagcctgccagcaacacaggcagccggggccacctgattgtgcagctgcaggagctgctgcaccactgggtgctgtggagcgctgtgaagagccgctgggtgattgtgggcctgtttgtgtccatcctgatcctgagcctggtgtttgccagccggctgcggcctgccagccgggcccccctgctcttccggccagacaccaacatccaggtgctgctggacctgaagtacaacctgtctgctgagggcatcagctgcatcacctgcagcggcctcttccaggagaagccccacagcctgcagaacaacatccgcaccagcctggagaagaagagaagaggcagcggcgtgccctgggccagcaggcctgaggccaccctgcaggacttccctggcaccgtgtacatcagcaaggtgaagagccagggccaccctgctgtgtaccgcctgagcctgaatgccagcctgcctgccccctggcaggccgtgtccccaggagatggagaggtgcccagcttccaggtgtaccgggccccctttggaaacttcaccaagaagctgacagcctgcatgagcacagtgggcctgctgcaggccgccagccccagcaggaagtggatgctgaccaccctggcctgtgatgccaagaggggctggaagtttgacttctccttctacgtggccaccaaggagcagcagcacaccaggaagctgtactttgcccagagccacaagccacccttccacggccgggtgtgcatggcccctcctggctgcctgctgagcagcagcccagatggccccaccaagggcttcttctttgtgcccagcgagaaggtgcccaaggcccggctgagcgccaccttcggcttcaacccctgtgtgaacacaggctgtgggaagccagctgtgcggcccctggtggacacaggagccatggtgtttgtggtgtttggcatcatcggcgtgaacagaacccggcaggtggacaaccacgtgattggagaccccggctctgtggtgtatgacagcagctttgacctcttcaaggagatcggccacctgtgccacctgtgcaaggccatcgccgccaacagcgagctggtgaagccaggaggagcccagtgcctgcccagcggctacagcatcagcagcttcctgcagatgctgcaccctgagtgcaaggagctgcctgagcccaacctgctgcccggccagctgagccacggggctgtgggcgtgcgggagggccgggtgcagtggatctccatggcctttgagagcaccacctacaagggcaagagcagcttccagacctacagcgactacctgcgctgggagagcttcctgcagcagcagctgcaggccctgcctgagggctctgtgctgcggcggggcttccagacctgtgagcactggaagcagatcttcatggagattgctggggtgcagagcgccctgtgtggcctggtgctgagcctgctgatctgtgtggccgctgtggccgtgttcaccacccacatcctgctgctgctgcctgtgctgctgagcatcctgggcatcgtgtgcctggtggtgaccatcatgtactggagcggctgggagatgggcgctgtggaggccatcagcctgagcatcctggtgggcagctctgtggactactgtgtgcacctggtggagggctacctgctggccggggagaacctgcccccccaccaggccgaggatgcccggacccagaggcagtggaggaccctggaggccgtgcgccacgtgggcgtggccatcgtgagcagcgccctgaccaccgtcatcgccaccgtgcccctcttcttctgcatcatcgccccctttgccaagtttgggaagatcgtggccctgaacacaggagtgtccatcctgtacaccctgactgtgtccacagccctgctgggcatcatggcccccagcagcttcaccaggaccaggaccagcttcctgaaggccctgggcgctgtgctgctggccggggccctgggcctgggcgcctgcctggtgctgctgcagagcggctacaagatccccctgcctgctggggccagcctgtag

SEQ ID NO: 163372 - DNA, 2304 bp, synthetic construct
  misc_feature 1..2304: note = Description of Artificial Sequence: Synthetic coding sequence
  source 1..2304: mol_type = other DNA
atgccctgggtggagcccaagccccggcccggccctgagcagaagcccaagctgaccaagccagattctgccaccggcccccagtggtaccaggagagccaggagagcgagagcgagggcaagcagcccccacctggccccctggccccacccaagagccctgagcccagcggccccctggccagcgagcaggatgcccccctgcctgaaggagatgatgccccaccccggcccagcatgctggatgatgccccccggctgcccctggagctggatgatgcccccctgcctgaggaggagaccccagagcccacagccatctgccgccaccgccaccgctgccacacagactgcctggagggcctgctgagcaggaccttccagtggctgggctggcaggtgggcgcccacccctggatcttcctgctggcccccctgatgctgacagctgccctgggcaccggcttcctgtacctgcccaaggatgaggaggaggacctggaggagcactacacccctgtgggcagccctgccaaggccgagaggagatttgtgcagggccacttcaccaccaatgacagctaccgcttcagcgccagcagaagaagcacagaggccaactttgtgtccctgctggtggtgtcctacagcgacagcctgctggaccctgccacctttgctgaggtgtccaagctggatggagctgtgcaggacctgcgggtggcccgggagaagggcagccagatccagtaccagcaggtgtgtgcccgctaccgggccctgtgtgtgccccccaaccccatcctgtatgcctggcaggtgaacaagaccctgaacctgagcagcatctccttccctgcctacaaccacggccgccaccccctgtacctgaccggcttctttggaggctacatcctgggcggcagcctgggcatgggccagctgctgctgcgggccaaggccatgaggctgctgtactacctgaagacagaagatcctgaatatgatgtgcagagcaagcagtggctgacccacctgctggaccagttcaccaacatcaagaacatcctggccctgaagaagattgaggtggtgcacttcaccagcctgagccggcagctggagtttgaggccacctctgtgaccgtcatccctgtgttccacctggcctacatcctgatcatcctgtttgctgtgaccagctgcttccgctttgactgcatccggaacaagatgtgtgtggccgcctttggagtcatcagcgccttcctggccgtggtgtctggcttcggcctgctgctgcacatcggcgtgcccttcgtcatcatcgtggccaacagccccttcctgatcctgggcgtgggcgtggatgacatgttcatcatgatcagcgcctggcacaagaccaacctggctgatgacatccgggagaggatgagcaatgtgtacagcaaggctgctgtgtccatcaccatcaccaccatcaccaacatcctggccctgtacacaggcatcatgagcagcttccgctctgtgcagtgcttctgcatctacacaggcatgaccctgctcttctgctacttctacaacatcacctgcttcggggccttcatggccctggatggcaagcgggaggtggtgtgcctgtgctggctgaagaaggctgaccccaagtggcccagcttcaagaagttctgctgcttccccttcggctctgtgcctgatgaacatggaacagacatccaccccatcagcctcttcttccgggactacttcggccccttcctgaccaggtctgagagcaagtactttgtggtgttcatctacgtgctgtacatcatcagcagcatctacggctgcttccacgtgcaggagggcctggacctgaggaacctggccagtgatgacagctacatcaccccctacttcaacgtggaggagaactacttcagtgactatggcccccgggtgatggtgattgtgaccaagaaggtggactactgggacaaggatgtgcggcagaagctggagaactgcaccaagatctttgagaagaatgtgtatgtggacaagaacctgacagagttctggctggatgcctacgtgcagtacctgaagggcaacagccaggaccccaatgagaagaacaccttcatgaacaacatcccagacttcctgagcaacttccccaacttccagcacgacatcaacatcagcagcagcaatgagatcatcagcagccggggcttcatccagaccacagatgtgagcagcagcgccaagaagaagatcctgctcttctag

SEQ ID NO: 163373 - DNA, 978 bp, synthetic construct
  misc_feature 1..978: note = Description of Artificial Sequence: Synthetic coding sequence
  source 1..978: mol_type = other DNA
atgacagagaggagaagagatgagctgtctgaggagatcaacaacctgcgggagaaggtgatgaagcagagcgaggagaacaacaacctgcagagccaggtgcagaagctgacagaggagaacaccaccctgcgggagcaggtggagcccaccccagaagatgaagatgatgacatcgagctgcggggagctgctgctgctgctgcccctcctccacccatcgaggaggagtgcccagaggacctgcctgagaagtttgatggcaacccagacatgctggcccccttcatggcccagtgccagatcttcatggagaagagcacccgggacttctctgtggacagagtgcgggtgtgctttgtgacctccatgatgacaggccgggccgcccgctgggccagcgccaagctggagaggagccactacctgatgcacaactacccagccttcatgatggagatgaagcacgtgtttgaggacccccagaggcgggaggtggccaagaggaagatccggcggctgcggcagggcatgggcagcgtcatcgactacagcaatgccttccagatgattgcccaggacctggactggaatgagcccgccctgattgaccagtaccacgagggcctgagtgaccacatccaggaggagctgagccacctggaggtggccaagagcctgagcgccctgattggccagtgcatccacattgaaagaaggctggcccgggctgctgctgccaggaagcccaggagccccccccgggccctggtgctgccccacatcgccagccaccaccaggtggaccccacagagcctgtgggcggggccaggatgaggctgacccaggaggagaaggagaggaggaggaagctgaacctgtgcctgtactgcggcaccggcggccactatgctgacaactgcccagccaaggccagcaagagcagccctgctggcaacagccctgcccccctgtag

SEQ ID NO: 163374 - DNA, 978 bp, synthetic construct; identical to SEQ ID NO: 163373
  misc_feature 1..978: note = Description of Artificial Sequence: Synthetic coding sequence
  source 1..978: mol_type = other DNA

SEQ ID NO: 163375 - DNA, 1311 bp, synthetic construct
  misc_feature 1..1311: note = Description of Artificial Sequence: Synthetic coding sequence
  source 1..1311: mol_type = other DNA
atgatggccacccagaccctgagcattgacagctaccaggacggccagcagatgcaggtggtgacagagctgaagacagagcaggaccccaactgcagcgagccagatgctgagggcgtgagccccccacctgtggagagccagacccccatggatgtggacaagcaggccatctaccgccaccccctcttccccctgctggccctgctgtttgagaagtgtgagcagagcacccagggcagcgagggcaccaccagcgccagctttgatgtggacatcgagaactttgtgaggaagcaggagaaggagggcaagcccttcttctgtgaggaccctgagacagacaacctgatggtgaaggccatccaggtgctgcgcatccacctgctggagctggagaaggtgaatgagctgtgcaaggacttctgcagccgctacatcgcctgcctgaagaccaagatgaacagcgagaccctgctgtctggagagcccggcagcccctacagccctgtgcagagccagcagatccagagcgccatcaccggcaccatcagcccccagggcatcgtggtgcctgccagcgccctgcagcagggcaatgtggccatggccaccgtggccggcggcaccgtgtaccagcctgtgacagtggtgaccccccagggccaggtggtgacccagaccctgagccctggcaccatccgcatccagaacagccagctgcagctgcagctgaaccaggacctgagcatcctgcaccaggatgatggcagcagcaagaacaagaggggcgtgctgcccaagcacgccaccaacgtgatgaggtcctggctgttccagcacatcggccacccctaccccacagaagatgagaagaagcagattgctgcccagaccaacctgaccctgctgcaggtgaacaactggttcatcaatgcccggcggcgcatcctgcagcccatgctggacagcagctgcagcgagacccccaagaccaagaagaagacagcccagaacagacctgtgcagcgcttctggccagacagcatcgccagcggcgtggcccagcccccacccagcgagctgaccatgtctgagggcgctgtggtgaccatcaccacccctgtgaacatgaatgtggacagcctgcagagcctgagcagtgatggagccaccctggccgtgcagcaggtgatgatggccggccagagtgaagatgagagcgtggacagcacagaggaggatgctggggccctggccccagcccacatcagcggcctggtgctggagaacagcgacagcctgcagtag

SEQ ID NO: 163376 - DNA, 960 bp, synthetic construct
  misc_feature 1..960: note = Description of Artificial Sequence: Synthetic coding sequence
  source 1..960: mol_type = other DNA
atggtgaaggccatccaggtgctgcgcatccacctgctggagctggagaaggtgaatgagctgtgcaaggacttctgcagccgctacatcgcctgcctgaagaccaagatgaacagcgagaccctgctgagcggggagcccggcagcccctacagccctgtgcagagccagcagatccagagcgccatcaccggcaccatcagcccccagggcatcgtggtgcctgccagcgccctgcagcagggcaatgtggccatggccaccgtggccggcggcaccgtgtaccagcctgtgacagtggtgaccccccagggccaggtggtgacccagaccctgagccctggcaccatccgcatccagaacagccagctgcagctgcagctgaaccaggacctgagcatcctgcaccaggatgatggcagcagcaagaacaagaggggcgtgctgcccaagcacgccaccaacgtgatgaggtcctggctgttccagcacatcggccacccctaccccacagaagatgagaagaagcagattgctgcccagaccaacctgaccctgctgcaggtgaacaactggttcatcaatgcccggcggcgcatcctgcagcccatgctggacagcagctgcagcgagacccccaagaccaagaagaagacagcccagaacagacctgtgcagcgcttctggccagacagcatcgccagcggcgtggcccagcccccaccttctgagctgaccatgtctgagggcgctgtggtgaccatcaccacccctgtgaacatgaatgtggacagcctgcagagcctgagcagtgatggagccaccctggccgtgcagcaggtgatgatggccggccagagtgaagatgaatctgtggacagcacagaagaagatgctggggccctggccccagcccacatcagcggcctggtgctggagaacagcgacagcctgcagtag

SEQ ID NO: 163377 - DNA, 1260 bp, synthetic construct
  misc_feature 1..1260: note = Description of Artificial Sequence: Synthetic coding sequence
  source 1..1260: mol_type = other DNA
atgatggccacccagaccctgagcattgacagctaccaggacggccagcagatgcaggtggtgacagagctgaagacagagcaggaccccaactgcagcgagccagatgctgagggcgtgagccccccacctgtggagagccagacccccatggatgtggacaagcaggccatctaccgccaccccctcttccccctgctggccctgctgtttgagaagtgtgagcagagcacccagggcagcgagggcaccaccagcgccagctttgatgtggacatcgagaactttgtgaggaagcaggagaaggagggcaagcccttcttctgtgaggaccctgagacagacaacctgatggtgaaggccatccaggtgctgcgcatccacctgctggagctggagaaggtgaatgagctgtgcaaggacttctgcagccgctacatcgcctgcctgaagaccaagatgaacagcgagaccctgctgtctggagagcccggcagcccctacagccctgtgcagagccagcagatccagagcgccatcaccggcaccatcagcccccagggcatcgtggtgcctgccagcgccctgcagcagggcaatgtggccatggccaccgtggccggcggcaccgtgtaccagcctgtgacagtggtgaccccccagggccaggtggtgacccagaccctgagccctggcaccatccgcatccagaacagccagctgcagctgcagctgaaccaggacctgagcatcctgcaccaggatgatggcagcagcaagaacaagaggggcgtgctgcccaagcacgccaccaacgtgatgaggtcctggctgttccagcacatcggccacccctaccccacagaagatgagaagaagcagattgctgcccagaccaacctgaccctgctgcaggtgaacaactggttcatcaatgcccggcggcgcatcctgcagcccatgctggacagcagctgcagcgagacccccaagaccaagaagaagacagcccagaacagacctgtgcagcgcttctggccagacagcatcgccagcggcgtggcccagcccccacccagcgagctgaccatgtctgagggcaccggcggccggcccaggccagacatggtggaccatggagtgggcatcatgaacaagaggcctggcagcggcctgctggccccacccaggcctgcagaaaatgacatcctgaagccacccctgcggagcagctttgtgaactgcctgctgatcttctag

SEQ ID NO: 163378 - DNA, 1419 bp, synthetic construct
  misc_feature 1..1419: note = Description of Artificial Sequence: Synthetic coding sequence
  source 1..1419: mol_type = other DNA
atgatgcagcacgccagccctgccccagccctgaccatgatggccacccagaatgtgcccccaccaccctaccaggacagcccccagatgacagccacagcccagccccccagcaaggcccaggccgtgcacatcagcgcccccagcgctgctgccagcacccctgtgcccagcgcccccatcgacccccaggcccagctggaggccgacaagagagctgtgtaccgccaccccctcttccccctgctgaccctgctgtttgagaagtgtgagcaggccacccagggcagcgagtgcatcaccagcgccagctttgatgtggacatcgagaactttgtgcaccagcaggagcaggagcacaagcccttcttcagtgatgatcctgagctggacaacctgatggtgaaggccatccaggtgctgcgcatccacctgctggagctggagaaggtgaatgagctgtgcaaggacttctgcaaccgctacatcacctgcctgaagaccaagatgcacagcgacaacctgctgagaaatgacctgggcggcccctacagccccaaccagcccagcatcaacctgcacagccaggacctgctgcagaacagccccaacagcatgtctggagtgagcaacaacccccagggcatcgtggtgcctgccagcgccctgcagcagggcaacatcgccatgaccaccgtgaacagccaggtggtgtctggaggagccctgtaccagcctgtgaccatggtgaccagccagggccaggtggtgacccaggccatcccccagggcgccatccagatccagaacacccaggtgaacctggacctgaccagcctgctggacaatgaagacaagaagagcaagaacaagaggggcgtgctgcccaagcacgccaccaacatcatgaggtcctggctgttccagcacctgatgcacccctaccccacagaagatgagaagaggcagattgctgcccagaccaacctgaccctgctgcaggtgaacaactggttcatcaatgcccggcggcgcatcctgcagcccatgctggatgccagcaacccagaccctgcccccaaggccaagaagatcaagagccagcaccggcccacccagcgcttctggcccaacagcattgctgctggggtgctgcagcagcagggcggggcccctggcaccaacccagatggcagcatcaacctggacaacctgcagagcctgagcagtgacagcgccaccatggccatgcagcaggccatgatggccgcccatgatgacagcctggatggaacagaggaggaggatgaagatgagatggaggaggaggaggaggaggagctggaggaggaggtggatgagctgcagaccaccaacgtgtctgacctgggcctggagcacagcgacagcctggagtag

SEQ ID NO: 163379 - DNA, 120 bp, synthetic construct
  misc_feature 1..120: note = Description of Artificial Sequence: Synthetic coding sequence
  source 1..120: mol_type = other DNA
atgatgcagcacgccagccctgccccagccctgaccatgatggccacccagaatgtgcccccaccaccctaccaggacagcccccagatgacagccacagcccagccccccagcaagtag

SEQ ID NO: 163380 - DNA, 1332 bp, synthetic construct
  misc_feature 1..1332: note = Description of Artificial Sequence: Synthetic coding sequence
  source 1..1332: mol_type = other DNA
atgacagccacagcccagccccccagcaaggcccaggccgtgcacatcagcgcccccagcgctgctgccagcacccctgtgcccagcgcccccatcgacccccaggcccagctggaggccgacaagagagctgtgtaccgccaccccctcttccccctgctgaccctgctgtttgagaagtgtgagcaggccacccagggcagcgagtgcatcaccagcgccagctttgatgtggacattgaaaattttgtgcaccagcaggagcaggagcacaagcccttcttcagtgatgatcctgagctggacaacctgatggtgaaggccatccaggtgctgcgcatccacctgctggagctggagaaggtgaatgagctgtgcaaggacttctgcaaccgctacatcacctgcctgaagaccaagatgcacagcgacaacctgctgagaaatgacctgggcggcccctacagccccaaccagcccagcatcaacctgcacagccaggacctgctgcagaacagccccaacagcatgtctggagtgagcaacaacccccagggcatcgtggtgcctgccagcgccctgcagcagggcaacatcgccatgaccaccgtgaacagccaggtggtgtctgggggcgccctgtaccagcctgtgaccatggtgaccagccagggccaggtggtgacccaggccatcccccagggcgccatccagatccagaacacccaggtgaacctggacctgaccagcctgctggacaatgaagacaagaagagcaagaacaagaggggcgtgctgcccaagcacgccaccaacatcatgaggtcctggctgttccagcacctgatgcacccctaccccacagaagatgagaagaggcagattgctgcccagaccaacctgaccctgctgcaggtgaacaactggttcatcaatgcccggcggcgcatcctgcagcccatgctggatgccagcaacccagaccctgcccccaaggccaagaagatcaagagccagcaccggcccacccagcgcttctggcccaacagcattgctgctggggtgctgcagcagcagggcggggcccctggcaccaacccagatggcagcatcaacctggacaacctgcagagcctgagcagtgacagcgccaccatggccatgcagcaggccatgatggccgcccatgatgacagcctggatggaacagaggaggaggatgaagatgagatggaggaggaggaggaggaggagctggaggaggaggtggatgagctgcagaccaccaacgtgtctgacctgggcctggagcacagcgacagcctggagtag

SEQ ID NO: 163381 - DNA, 1332 bp, synthetic construct; identical to SEQ ID NO: 163380
  misc_feature 1..1332: note = Description of Artificial Sequence: Synthetic coding sequence
  source 1..1332: mol_type = other DNA

SEQ ID NO: 163382 - DNA, 123 bp, synthetic construct
  misc_feature 1..123: note = Description of Artificial Sequence: Synthetic coding sequence
  source 1..123: mol_type = other DNA
atgatgcagcacgccagccctgccccagccctgaccatgatggccacccagaatgtgcccccaccaccctaccaggacagcccccagatgacagccacagcccagccccccagcaaggcctag

SEQ ID NO: 163383 - DNA, 921 bp, synthetic construct
  misc_feature 1..921: note = Description of Artificial Sequence: Synthetic coding sequence
  source 1..921: mol_type = other DNA
atgatggccacccagaatgtgcccccaccaccctaccaggacagcccccagatgacagccacagcccagccccccagcaaggcccaggccgtgcacatcagcgcccccagcgctgctgccagcacccctgtgcccagcgcccccatcgacccccaggcccagctggaggccgacaagagagctgtgtaccgccaccccctcttccccctgctgaccctgctgtttgagaagtgtgagcaggccacccagggcagcgagtgcatcaccagcgccagctttgatgtggacatcgagaactttgtgcaccagcaggagcaggagcacaagcccttcttcagtgatgatcctgagctggacaacctgatggtgaaggccatccaggtgctgcgcatccacctgctggagctggagaaggtgaatgagctgtgcaaggacttctgcaaccgctacatcacctgcctgaagaccaagatgcacagcgacaacctgctgagaaatgacctgggcggcccctacagccccaaccagcccagcatcaacctgcacagccaggacctgctgcagaacagccccaacagcatgtctggagtgagcaacaacccccagggcatcgtggtgcctgccagcgccctgcagcagggcaacatcgccatgaccaccgtgaacagccaggtggtgtctggaggagccctgtaccagcctgtgaccatggtgaccagccagggccaggtggtgacccaggccatcccccagggcgccatccagatccagaacacccaggtgaacctggacctgaccagcctgctggacaatgaagacaagaagagcaagaacaagaggggcgtgctgcccaagcacgccaccaacatcatgaggtcctggctgttccagcaccacgcccccctgccccacggcggctag

SEQ ID NO: 163384 - DNA, 1227 bp, synthetic construct
  misc_feature 1..1227: note = Description of Artificial Sequence: Synthetic coding sequence
  source 1..1227: mol_type = other DNA
atgagccggccccaccccaccaggacagcccaccgccaccccctcttccccctgctgaccctgctgtttgagaagtgtgagcaggccacccagggcagcgagtgcatcaccagcgccagctttgatgtggacatcgagaactttgtgcaccagcaggagcaggagcacaagcccttcttcagtgatgatcctgagctggacaacctgatggtgaaggccatccaggtgctgcgcatccacctgctggagctggagaaggtgaatgagctgtgcaaggacttctgcaaccgctacatcacctgcctgaagaccaagatgcacagcgacaacctgctgagaaatgacctgggcggcccctacagccccaaccagcccagcatcaacctgcacagccaggacctgctgcagaacagccccaacagcatgtctggagtgagcaacaacccccagggcatcgtggtgcctgccagcgccctgcagcagggcaacatcgccatgaccaccgtgaacagccaggtggtgtctggaggagccctgtaccagcctgtgaccatggtgaccagccagggccaggtggtgacccaggccatcccccagggcgccatccagatccagaacacccaggtgaacctggacctgaccagcctgctggacaatgaagacaagaagagcaagaacaagaggggcgtgctgcccaagcacgccaccaacatcatgaggtcctggctgttccagcacctgatgcacccctaccccacagaagatgagaagaggcagattgctgcccagaccaacctgaccctgctgcaggtgaacaactggttcatcaatgcccggcggcgcatcctgcagcccatgctggatgccagcaacccagaccctgcccccaaggccaagaagatcaagagccagcaccggcccacccagcgcttctggcccaacagcattgctgctggggtgctgcagcagcagggcggggcccctggcaccaacccagatggcagcatcaacctggacaacctgcagagcctgagcagtgacagcgccaccatggccatgcagcaggccatgatggccgcccatgatgacagcctggatggaacagaggaggaggatgaagatgagatggaggaggaggaggaggaggagctggaggaggaggtggatgagctgcagaccaccaacgtgtctgacctgggcctggagcacagcgacagcctggagtag

SEQ ID NO: 163385 - DNA, 297 bp, synthetic construct
  misc_feature 1..297: note = Description of Artificial Sequence: Synthetic coding sequence
  source 1..297: mol_type = other DNA
atgatgcagcacgccagccctgccccagccctgaccatgatggccacccagaatgtgcccccaccaccctaccaggacagcccccagatgacagccacagcccagccccccagcaaggcccaggccgtgcacatcagcgcccccagcgctgctgccagcacccctgtgcccagcgcccccatcgacccccaggcccagctggaggccgacaagagagctgtgtaccgccaccccctcttccccctgctgaccctgctgtttgagaagtgtgagcaggccacccagggcagcgagtag

SEQ ID NO: 163386 - DNA, 234 bp, synthetic construct
  misc_feature 1..234: note = Description of Artificial Sequence: Synthetic coding sequence
  source 1..234: mol_type = other DNA
atgatgcagcacgccagccctgccccagccctgaccatgatggccacccagaatgtgcccccaccaccctaccaggacagcccccagatgacagccacagcccagccccccagcaaggcccaggccgtgcacatcagcgcccccagcgctgctgccagcacccctgtgcccagcgcccccatcgacccccaggcccagctggaggccgacaagagagctgtgtaccgctggtag

SEQ ID NO: 163387 - DNA, 990 bp, synthetic construct
  misc_feature 1..990: note = Description of Artificial Sequence: Synthetic coding sequence
  source 1..990: mol_type = other DNA
atgacccgggacttcaagccaggggacctgatctttgccaagatgaagggctacccccactggccagcccgggtggatgaggtgcctgatggagctgtgaagccacccaccaacaagctgcccatcttcttcttcggcacccatgaaacagccttcctgggccccaaggacatcttcccctacagcgagaacaaggagaagtatggcaagcccaacaagaggaagggcttcaatgaaggcctgtgggagattgacaacaaccccaaggtgaagttcagcagccagcaggccgccaccaagcagagcaatgccagcagtgatgtggaggtggaggagaaggagacctctgtgtccaaggaggacacagaccacgaggagaaggccagcaatgaagatgtgaccaaggctgtggacatcaccacccccaaggccgcccggcggggcaggaagaggaaggccgagaagcaggtggagacagaggaggccggcgtggtgaccacagccacagcctctgtgaacctgaaggtgagccccaagaggggccggcctgctgccacagaggtgaagatccccaagccccggggccggcccaagatggtgaagcagccctgccccagcgagagtgacatcatcacagaggaggacaagagcaagaagaagggccaggaggagaagcagcccaagaagcagcccaagaaggatgaggagggccagaaggaggaggacaagcccaggaaggagccagacaagaaggagggcaagaaggaggtggagagcaagaggaagaacctggccaagacaggagtgaccagcaccagtgacagcgaggaggagggagatgaccaggagggggagaagaagaggaaaggaggcaggaacttccagacagcccacagaagaaacatgctgaagggccagcacgagaaggaggccgctgacaggaagaggaagcaggaggagcagatggagacagagcactttgccctgtag

SEQ ID NO: 163388 - DNA, 1002 bp, synthetic construct
  misc_feature 1..1002: note = Description of Artificial Sequence: Synthetic coding sequence
  source 1..1002: mol_type = other DNA
atgacccgggacttcaagccaggggacctgatctttgccaagatgaagggctacccccactggccagcccgggtggatgaggtgcctgatggagctgtgaagccacccaccaacaagctgcccatcttcttcttcggcacccatgaaacagccttcctgggccccaaggacatcttcccctacagcgagaacaaggagaagtatggcaagcccaacaagaggaagggcttcaatgaaggcctgtgggagattgacaacaaccccaaggtgaagttcagcagccagcaggccgccaccaagcagagcaatgccagcagtgatgtggaggtggaggagaaggagacctctgtgtccaaggaggacacagaccacgaggagaaggccagcaatgaagatgtgaccaaggctgtggacatcaccacccccaaggccgcccggcggggcaggaagaggaaggccgagaagcaggtggagacagaggaggccggcgtggtgaccacagccacagcctctgtgaacctgaaggtgagccccaagaggggccggcctgctgccacagaggtgaagatccccaagccccggggccggcccaagatggtgaagcagccctgccccagcgagagtgacatcatcacagaggaggacaagagcaagaagaagggccaggaggagaagcagcccaagaagcagcccaagaaggatgaggagggccagaaggaggaggacaagcccaggaaggagccagacaagaaggagggcaagaaggaggtggagagcaagaggaagaacctggccaagacaggagtgaccagcaccagtgacagcgaggaggagggagatgaccaggagggggagaagaagaggaaaggaggcaggaacttccagacagcccacagaagaaacatgctgaagggccagcacgagaaggaggccgctgacaggaagaggaagcaggaggagcagatggagacagagcaccagaccacctgcaacctgcagtag

SEQ ID NO: 163389 - DNA, 1593 bp, synthetic construct
  misc_feature 1..1593: note = Description of Artificial Sequence: Synthetic coding sequence
  source 1..1593: mol_type = other DNA
atgacccgggacttcaagccaggggacctgatctttgccaagatgaagggctacccccactggccagcccgggtggatgaggtgcctgatggagctgtgaagccacccaccaacaagctgcccatcttcttcttcggcacccatgaaacagccttcctgggccccaaggacatcttcccctacagcgagaacaaggagaagtatggcaagcccaacaagaggaagggcttcaatgaaggcctgtgggagattgacaacaaccccaaggtgaagttcagcagccagcaggccgccaccaagcagagcaatgccagcagtgatgtggaggtggaggagaaggagacctctgtgtccaaggaggacacagaccacgaggagaaggccagcaatgaagatgtgaccaaggctgtggacatcaccacccccaaggccgcccggcggggcaggaagaggaaggccgagaagcaggtggagacagaggaggccggcgtggtgaccacagccacagcctctgtgaacctgaaggtgagccccaagaggggccggcctgctgccacagaggtgaagatccccaagccccggggccggcccaagatggtgaagcagccctgccccagcgagagtgacatcatcacagaggaggacaagagcaagaagaagggccaggaggagaagcagcccaagaagcagcccaagaaggatgaggagggccagaaggaggaggacaagcccaggaaggagccagacaagaaggagggcaagaaggaggtggagagcaagaggaagaacctggccaagacaggagtgaccagcaccagtgacagcgaggaggagggagatgaccaggagggggagaagaagaggaaaggaggcaggaacttccagacagcccacagaagaaacatgctgaagggccagcacgagaaggaggccgctgacaggaagaggaagcaggaggagcagatggagacagagcagcagaacaaggatgagggcaagaagccagaggtgaagaaggtggagaagaagcgggagacctccatggacagccggctgcagagaattcatgctgagatcaagaacagcctgaagattgacaacctggatgtgaaccgctgcatcgaggccctggatgagctggccagcctgcaggtgaccatgcagcaggcccagaagcacacagagatgatcaccaccctgaagaagatccgccgcttcaaggtgtcccaggtgatcatggagaagagcaccatgctgtacaacaagttcaagaacatgttcctggtgggggagggggacagcgtcatcacccaggtgctgaacaagagcctggccgagcagaggcagcacgaggaggccaacaagaccaaggaccagggcaagaagggccccaacaagaagctggagaaggagcagacaggcagcaagaccctgaatggaggcagtgatgcccaggacggcaaccagccccagcacaatggagagagcaatgaagacagcaaggacaaccacgaggccagcaccaagaagaagcccagcagcgaggagcgggagacagagatcagcctgaaggacagcaccctggacaactag

SEQ ID NO: 163390 - DNA, 1593 bp, synthetic construct; identical to SEQ ID NO: 163389
  misc_feature 1..1593: note = Description of Artificial Sequence: Synthetic coding sequence
  source 1..1593: mol_type = other DNA

SEQ ID NO: 163391 - DNA, 1002 bp, synthetic construct; identical to SEQ ID NO: 163388
  misc_feature 1..1002: note = Description of Artificial Sequence: Synthetic coding sequence
  source 1..1002: mol_type = other DNA

SEQ ID NO: 163392 - DNA, 1362 bp, synthetic construct
  misc_feature 1..1362: note = Description of Artificial Sequence: Synthetic coding sequence
  source 1..1362: mol_type = other DNA
atggcccacatcaccatcaaccagtacctgcagcaggtgtatgaggccatcgacagcagagatggagccagctgtgccgagctggtgtccttcaagcacccccacgtggccaacccccggctgcagatggccagccctgaggagaagtgccagcaggtgctggagcccccctatgatgagatgtttgctgcccacctgcgctgcacctatgctgtgggcaaccacgacttcatcgaggcctacaagtgccagacagtgattgtgcagtaccccctgtccttcatggctgctgtgccccacaggacccatgctgtggactacctgggcctggagaccaggaagcactgggccagctgcagcttcctgcagctggagagaaatgattctgtgctggagcagaagctggtgtctgccctgagcctgggcaccagcttcctgcgggccttccaggcccacaaggaggagaactgggccctgcctgtgatgtatgctgtggccctggacctgcgggtgtttgccaacaatgctgaccagcagctggtgaagaagggcaagagcaaggtgggggacatgctggagaaggctgctgagctgctgatgagctgcttccgggtgtgtgccagtgacacccgggccggcatcgaggacagcaagaagtggggcatgctgttcctggtgaaccagctgttcaagatctacttcaagatcaacaagctgcacctgtgcaagcccctcatccgggccatcgacagcagcaacctgaaggatgactacagcacagcccagagggtgacctacaagtactacgtgggcaggaaggccatgtttgacagcgacttcaagcaggccgaggagtacctgagctttgcctttgagcactgccacaggagcagccagaagaacaagaggatgatcctgatctacctgctgcctgtgaagatgctgctgggccacatgcccaccgtggagctgctgaagaagtaccacctgatgcagtttgctgaggtgaccagggctgtgtctgagggcaacctgctgctgctgcacgaggccctggccaagcatgaggccttcttcatccgctgtggcatcttcctgatcctggagaagctgaagatcatcacctacagaaacctcttcaagaaggtgtacctgctgctgaagacccaccagctgagcctggatgccttcctggtggccctgaagttcatgcaggtggaggatgtggacattgatgaggtgcagtgcatcctggccaacctgatctacatgggccacgtgaagggctacatcagccaccagcaccagaagctggtggtgtccaagcagaaccccttcccccccctgagcacagtgtgctag

SEQ ID NO: 163393 - DNA, 1200 bp, synthetic construct
  misc_feature 1..1200: note = Description of Artificial Sequence: Synthetic coding sequence
  source 1..1200: mol_type = other DNA
atgaggctgacagatgtggtgcagcagctggtgtatgaggccatcgacagcagagatggagccagctgtgccgagctggtgtccttcaagcacccccacgtggccaacccccggctgcagatggccagccctgaggagaagtgccagcaggtgctggagcccccctatgatgagatgtttgctgcccacctgcgctgcacctatgctgtgggcaaccacgacttcatcgaggcctacaagtgccagacagtgattgtgcagtacaccagcttcctgcgggccttccaggcccacaaggaggagaactgggccctgcctgtgatgtatgctgtggccctggacctgcgggtgtttgccaacaatgctgaccagcagctggtgaagaagggcaagagcaaggtgggggacatgctggagaaggctgctgagctgctgatgagctgcttccgggtgtgtgccagtgacacccgggccggcatcgaggacagcaagaagtggggcatgctgttcctggtgaaccagctgttcaagatctacttcaagatcaacaagctgcacctgtgcaagcccctcatccgggccatcgacagcagcaacctgaaggatgactacagcacagcccagagggtgacctacaagtactacgtgggcaggaaggccatgtttgacagcgacttcaagcaggccgaggagtacctgagctttgcctttgagcactgccacaggagcagccagaagaacaagaggatgatcctgatctacctgctgcctgtgaagatgctgctgggccacatgcccaccgtggagctgctgaagaagtaccacctgatgcagtttgctgaggtgaccagggctgtgtctgagggcaacctgctgctgctgcacgaggccctggccaagcatgaggccttcttcatccgctgtggcatcttcctgatcctggagaagctgaagatcatcacctacagaaacctcttcaagaaggtgtacctgctgctgaagacccaccagctgagcctggatgccttcctggtggccctgaagttcatgcaggtggaggatgtggacattgatgaggtgcagtgcatcctggccaacctgatctacatgggccacgtgaagggctacatcagccaccagcaccagaagctggtggtgtccaagcagaaccccttcccccccctgagcacagtgtgctag

SEQ ID NO: 163394 - DNA, 1200 bp, synthetic construct
  misc_feature 1..1200: note = Description of Artificial Sequence: Synthetic coding sequence
  source 1..1200: mol_type = other DNA
atggcccacatcaccatcaaccagtacctgcagcaggtgtatgaggccatcgacagcagagatggagccagctgtgccgagctggtgtccttcaagcacccccacgtggccaacccccggctgcagatggccagccctgaggagaagtgccagcaggtgctggagcccccctatgatgagatgtttgctgcccacctgcgctgcacctatgctgtgggcaaccacgacttcatcgaggcctacaagtgccagacagtgattgtgcagagcttcctgcgggccttccaggcccacaaggaggagaactgggccctgcctgtgatgtatgctgtggccctggacctgcgggtgtttgccaacaatgctgaccagcagctggtgaagaagggcaagagcaaggtgggggacatgctggagaaggctgctgagctgctgatgagctgcttccgggtgtgtgccagtgacacccgggccggcatcgaggacagcaagaagtggggcatgctgttcctggtgaaccagctgttcaagatctacttcaagatcaacaagctgcacctgtgcaagcccctcatccgggccatcgacagcagcaacctgaaggatgactacagcacagcccagagggtgacctacaagtactacgtgggcaggaaggccatgtttgacagcgacttcaagcaggccgaggagtacctgagctttgcctttgagcactgccacaggagcagccagaagaacaagaggatgatcctgatctacctgctgcctgtgaagatgctgctgggccacatgcccaccgtggagctgctgaagaagtaccacctgatgcagtttgctgaggtgaccagggctgtgtctgagggcaacctgctgctgctgcacgaggccctggccaagcatgaggccttcttcatccgctgtggcatcttcctgatcctggagaagctgaagatcatcacctacagaaacctcttcaagaaggtgtacctgctgctgaagacccaccagctgagcctggatgccttcctggtggccctgaagttcatgcaggtggaggatgtggacattgatgaggtgcagtgcatcctggccaacctgatctacatgggccacgtgaagggctacatcagccaccagcaccagaagctggtggtgtccaagcagaaccccttcccccccctgagcacagtgtgctag

SEQ ID NO: 163395 - DNA, 1131 bp, synthetic construct
  misc_feature 1..1131: note = Description of Artificial Sequence: Synthetic coding sequence
  source 1..1131: mol_type = other DNA
atggcccacatcaccatcaaccagtacctgcagcaggtgtatgaggccatcgacagcagagatggagccagctgtgccgagctggtgtccttcaagcacccccacgtggccaacccccggctgcagatggccagccctgaggagaagtgccagcaggtgctggagcccccctatgatgagatgtttgctgcccacctgcgctgcacctatgctgtgggcaaccacgacttcatcgaggcctacaagtgccagacagtgattgtgcagtaccccctgtccttcatggctgctgtggccgaccagcagctggtgaagaagggcaagagcaaggtgggggacatgctggagaaggctgctgagctgctgatgagctgcttccgggtgtgtgccagtgacaccagggctggcatcgaggacagcaagaagtggggcatgctgttcctggtgaaccagctgttcaagatctacttcaagatcaacaagctgcacctgtgcaagcccctcatccgggccatcgacagcagcaacctgaaggatgactacagcacagcccagagggtgacctacaagtactacgtgggcaggaaggccatgtttgacagcgacttcaagcaggccgaggagtacctgagctttgcctttgagcactgccacaggagcagccagaagaacaagaggatgatcctgatctacctgctgcctgtgaagatgctgctgggccacatgcccaccgtggagctgctgaagaagtaccacctgatgcagtttgctgaggtgaccagggctgtgtctgagggcaacctgctgctgctgcacgaggccctggccaagcatgaggccttcttcatccgctgtggcatcttcctgatcctggagaagctgaagatcatcacctacagaaacctcttcaagaaggtgtacctgctgctgaagacccaccagctgagcctggatgccttcctggtggccctgaagttcatgcaggtggaggatgtggacattgatgaggtgcagtgcatcctggccaacctgatctacatgggccacgtgaagggctacatcagccaccagcaccagaagctggtggtgtccaagcagaaccccttcccccccctgagcacagtgtgctag

SEQ ID NO: 163396 - DNA, 1200 bp, synthetic construct; identical to SEQ ID NO: 163394
  misc_feature 1..1200: note = Description of Artificial Sequence: Synthetic coding sequence
  source 1..1200: mol_type = other DNA

SEQ ID NO: 163397 - DNA, 1200 bp, synthetic construct; identical to SEQ ID NO: 163394
  misc_feature 1..1200: note = Description of Artificial Sequence: Synthetic coding sequence
  source 1..1200: mol_type = other DNA

SEQ ID NO: 163398 - DNA, 1194 bp, synthetic construct
  misc_feature 1..1194: note = Description of Artificial Sequence: Synthetic coding sequence
  source 1..1194: mol_type = other DNA
atgaggctgacagatgtggtgcagcagctggtgtatgaggccatcgacagcagagatggagccagctgtgccgagctggtgtccttcaagcacccccacgtggccaacccccggctgcagatggccagccctgaggagaagtgccagcaggtgctggagcccccctatgatgagatgtttgctgcccacctgcgctgcacctatgctgtgggcaaccacgacttcatcgaggcctacaagtgccagacagtgattgtgcagagcttcctgcgggccttccaggcccacaaggaggagaactgggccctgcctgtgatgtatgctgtggccctggacctgcgggtgtttgccaacaatgctgaccagcagctggtgaagaagggcaagagcaaggtgggggacatgctggagaaggctgctgagctgctgatgagctgcttccgggtgtgtgccagtgacacccgggccggcatcgaggacagcaagaagtggggcatgctgttcctggtgaaccagctgttcaagatctacttcaagatcaacaagctgcacctgtgcaagcccctcatccgggccatcgacagcagcaacctgaaggatgactacagcacagcccagagggtgacctacaagtactacgtgggcaggaaggccatgtttgacagcgacttcaagcaggccgaggagtacctgagctttgcctttgagcactgccacaggagcagccagaagaacaagaggatgatcctgatctacctgctgcctgtgaagatgctgctgggccacatgcccaccgtggagctgctgaagaagtaccacctgatgcagtttgctgaggtgaccagggctgtgtctgagggcaacctgctgctgctgcacgaggccctggccaagcatgaggccttcttcatccgctgtggcatcttcctgatcctggagaagctgaagatcatcacctacagaaacctcttcaagaaggtgtacctgctgctgaagacccaccagctgagcctggatgccttcctggtggccctgaagttcatgcaggtggaggatgtggacattgatgaggtgcagtgcatcctggccaacctgatctacatgggccacgtgaagggctacatcagccaccagcaccagaagctggtggtgtccaagcagaaccccttcccccccctgagcacagtgtgctag

SEQ ID NO: 163399 - DNA, 546 bp, synthetic construct
  misc_feature 1..546: note = Description of Artificial Sequence: Synthetic coding sequence
  source 1..546: mol_type = other DNA
atgcccaagggcggcaggaaaggaggccacaagggccgggcccggcagtacaccagccctgaggagattgatgcccagctgcaggccgagaagcagaaggcccgggaggaggaggagcagaaggagggcggagatggagctgctggggaccccaagaaggagaagaagagcctggacagtgatgaaagtgaagatgaagaagatgactaccagcagaagaggaaaggagtggagggcctgattgatattgagaaccccaacagagtggcccagaccaccaagaaggtgacccagctggacctggatggccccaaggagctgagcagaagagagcgggaggagattgagaagcagaaggccaaggagcgctacatgaagatgcacctggccggcaagacagagcaggccaaggctgacctggcccggctggccatcatcaggaagcagcgggaggaggccgccaggaagaaggaggaggagaggaaggccaaggatgatgccaccctgagcggcaagaggatgcagagcctgagcctgaacaagtag

SEQ ID NO: 163400 - DNA, 1026 bp, synthetic construct
  misc_feature 1..1026: note = Description of Artificial Sequence: Synthetic coding sequence
  source 1..1026: mol_type = other DNA
atggtgagcagccagcccaagtatgacctgatccgggaggtgggccggggcagctatggagtggtgtatgaagctgtgatcaggaagaccagcgcccgggtggccgtgaagaagatccgctgccacgccccagaaaatgtggagctggccctgcgggagttctgggccctgagcagcatcaagagccagcaccccaacgtcatccacctggaggagtgcatcctgcagaaggatggcatggtgcagaagatgagccacggcagcaacagcagcctgtacctgcagctggtggagaccagcctgaagggggagatcgcctttgaccccaggtctgcctactacctgtggtttgtgatggacttctgtgatggaggagacatgaatgagtacctgctgagcaggaagcccaacaggaagaccaacaccagcttcatgctgcagctgagcagcgccctggccttcctgcacaagaaccagatcatccaccgggacctgaagccagacaacatcctgatcagccagacccggctggacaccagtgacctggagcccaccctgaaggtggccgactttggcctgagcaaggtgtgcagcgccagcggccagaaccctgaggagcctgtgtctgtgaacaagtgcttcctgagcacagcctgtggcacagacttctacatggcccctgaggtgtgggagggccactacacagccaaggctgacatctttgccctgggcatcatcatctgggccatgctggagcgcatcaccttcatcgacacagagaccaagaaggagctgctgggcagctatgtgaagcagggcacagagatcgtgcctgtgggggaggccctgctggagaaccccaagatggagctgctgatccctgtgaagaagaagtccatgaatggaaggatgaagcagctgatcaaggagatgctggccgccaacccccaggacagaccagatgcctttgagctggagctgcggctggtgcagatcgccttcaaggacagctcctgggagacctag

SEQ ID NO: 163401 - DNA, 1026 bp, synthetic construct; identical to SEQ ID NO: 163400
  misc_feature 1..1026: note = Description of Artificial Sequence: Synthetic coding sequence
  source 1..1026: mol_type = other DNA

SEQ ID NO: 163402 - DNA, 576 bp, synthetic construct
  misc_feature 1..576: note = Description of Artificial Sequence: Synthetic coding sequence
  source 1..576: mol_type = other DNA
atggtgagcagccagcccaagtatgacctgatccgggaggtgggccggggcagctatggagtggtgtatgaagctgtgatcaggaagaccagcgcccgggtggccgtgaagaagatccgctgccacgccccagaaaatgtggagctggccctgcgggagttctgggccctgagcagcatcaagagccagcaccccaacgtcatccacctggaggagtgcatcctgcagaaggatggcatggtgcagaagatgagccacggcagcaacagcagcctgtacctgcagctggtggagaccagcctgaagggggagatcgcctttgaccccaggtctgcctactacctgtggtttgtgatggacttctgtgatggaggagacatgaatgagtacctgctgagcaggaagcccaacaggaagaccaacaccagcttcatgctgcagctgagcagcgccctggccttcctgcacaagaaccagatcatccaccgggacctgaagccagacaacatcctgatcagccagacccggctggacaccagtgacctggagcccaccctgaaggtggccgacttctag

SEQ ID NO: 163403 - DNA, 4014 bp, synthetic construct
  misc_feature 1..4014: note = Description of Artificial Sequence: Synthetic coding sequence
  source 1..4014: mol_type = other DNA
atggacttcaccgcccagcccaagccagccacagccctgtgtggggtggtgtctgcagatggcaagatcgcctacccacctggggtgaaggagatcacagacaagatcaccacagatgagatgatcaagaggctgaagatggtggtgaagaccttcatggacatggaccaggacagtgaagatgagaagcagcagtacctgcccctggccctgcacctggccagcgagttcttcctgaggaaccccaacaaggatgtgcggctgctggtggcctgctgcctggccgacatcttccgcatctatgcccctgaggccccctacaccagccatgacaagctgaaggacatcttcctgttcatcacccggcagctgaagggcctggaggacaccaagagcccccagttcaaccgctacttctacctgctggagaacctggcctgggtgaagagctacaacatctgctttgagctggaggactgcaatgagatcttcatccagctgttccgcaccctcttcagcgtcatcaacaacagccacaacaagaaggtgcagatgcacatgctggacctgatgagcagcatcatcatggagggagatggagtgacccaggagctgctggacagcatcctgatcaacctgatcccagcccacaagaacctgaacaagcagagctttgacctggccaaggtgctgctgaagaggacagtgcagaccatcgaggcctgcatcgccaacttcttcaaccaggtgctggtgctgggccgcagctctgtgtctgacctgtctgagcacgtgtttgacctgatccaggagctgtttgccatcgacccccacctgctgctgtctgtgatgccccagctggagttcaagctgaagagcaatgatggagaggagcggctggccgtggtgcggctgctggccaagctgtttggcagcaaggacagcgacctggccacccagaaccggcccctgtggcagtgcttcctgggccgcttcaatgacatccacgtgcctgtgcggctggagagcgtgaagtttgccagccactgcctgatgaaccacccagacctggccaaggacctgacagagtacctgaaggtgcgcagccatgaccctgaggaggccatcagacatgatgtgattgtgaccatcatcacagctgccaagagggacctggccctggtgaatgaccagctgctgggctttgtgcgggagaggaccctggacaagcgctggagggtgaggaaggaggccatgatgggcctggcccagctgtacaagaagtactgcctgcacggggaggccggcaaggaggccgctgagaaggtgtcctggatcaaggacaagctgctgcacatctactaccagaacagcattgatgacaagctgctggtggagaagatctttgcccagtacctggtgccccacaacctggagacagaggagaggatgaagtgcctgtactacctgtatgccagcctggaccccaatgctgtgaaggccctgaatgagatgtggaagtgccagaacatgctgcggagccacgtgcgggagctgctggacctgcacaagcagcccaccagcgaggccaactgcagcgccatgtttgggaagctgatgaccatcgccaagaacctgcctgaccccgggaaggcccaggactttgtgaagaagttcaaccaggtgctgggagatgatgagaagctgcggagccagctggagctgctgatcagccccacctgcagctgcaagcaggccgacatctgtgtgcgggagatcgccaggaagctggccaaccccaagcagcccaccaaccccttcctggagatggtgaagttcctgctggagcgcatcgcccctgtgcacattgattctgaggccatcagcgccctggtgaagctgatgaacaagagcattgagggcacagcagatgatgaggaggagggcgtgtccccagacacagccatccgcagcggcctggagctgctgaaggtgctgtccttcacccaccccaccagcttccacagcgctgagacctatgagagcctgctgcagtgcctgaggatggaggatgacaaggtggccgaggccgccatccagatcttcaggaacacaggccacaagattgaaacagacctgccccagatccgcagcaccctcatccccatcctgcaccagaaggccaagaggggcaccccccaccaggccaagcaggccgtgcactgcatccacgccatcttcaccaacaaggaggtgcagctggcccagatctttgagcccctgagccgcagcctgaatgctgatgtgcctgagcagctgatcacccccctggtgtccctgggccacatctccatgctggccccagaccagtttgccagccccatgaagtctgtggtggccaacttcatcgtgaaggacctgctgatgaatgacaggagcactggagagaagaatggcaagctgtggagcccagatgaggaggtgtccccagaggtgctggccaaggtgcaggccatcaagctgctggtgcgctggctgctgggcatgaagaacaaccagagcaagagcgccaacagcaccctgcggctgctgagcgccatgctggtgtctgagggggacctgacagagcagaagaggatcagcaagagtgacatgagccggctgcggctggccgccggcagcgccatcatgaagctggcccaggagccctgctaccacgagatcatcaccccagagcagttccagctgtgtgccctggtgatcaatgatgagtgctaccaggtgcggcagatctttgcccagaagctgcacaaggccctggtgaagctgctgctgcccctggagtacatggccatctttgccctgtgtgccaaggaccctgtgaaggagcggcgggcccacgcccggcagtgcctgctgaagaacatcagcatcagaagagagtacatcaagcagaaccccatggccacagagaagctgctgagcctgctgcctgaatatgtggtgccctacatgatccacctgctggcccatgaccctgacttcaccaggagccaggatgtggaccagctgcgggacatcaaggaatgtctgtggttcatgctggaggtgctgatgaccaagaatgaaaacaacagccacgccttcatgaagaagatggccgagaacatcaagctgaccagagatgcccagagcccagatgagagcaagaccaatgagaagctgtacacagtgtgtgatgtggccctgtgtgtgatcaacagcaagagcgccctgtgcaatgctgacagccccaaggaccctgtgctgcccatgaagttcttcacccagcctgagaaggacttctgcaatgacaagagctacatcagcgaggagaccagggtgctgctgctgaccgggaagcccaagccagctggggtgctgggcgctgtgaacaagcccctgagcgccactggaaggaagccctacgtgcgcagcactggaacagagaccggcagcaacatcaacgtgaacagcgagctgaaccccagcacaggcaacagaagccgggagcagagcagcgaggccgctgagaccggggtgtctgaaaatgaagaaaatcctgtgcgcatcatctctgtgacccctgtgaagaacattgatcctgtgaagaacaaggagatcaacagcgaccaggccacccagggcaacatcagcagtgaccggggcaagaagaggacagtgacagctgctggagctgagaacatccagcagaagacagatgagaaggtggatgagagcggccccccagcccccagcaagccccggcggggccggcggcccaagtctgagagccagggcaatgccaccaagaatgatgacctgaacaagcccatcaacaagggcaggaagagagctgctgtgggccaggagagccctgggggcctggaggccggaaatgccaaggcccccaagctgcaggacctggccaagaaggccgccccagctgagcggcagattgacctgcagaggtag

SEQ ID NO: 163404 - DNA, 1803 bp, synthetic construct
  misc_feature 1..1803: note = Description of Artificial Sequence: Synthetic coding sequence
  source 1..1803: mol_type = other DNA
atggacttcaccgcccagcccaagccagccacagccctgtgtggggtggtgtctgcagatggcaagatcgcctacccacctggggtgaaggagatcacagacaagatcaccacagatgagatgatcaagaggctgaagatggtggtgaagaccttcatggacatggaccaggacagtgaagatgagaagcagcagtacctgcccctggccctgcacctggccagcgagttcttcctgaggaaccccaacaaggatgtgcggctgctggtggcctgctgcctggccgacatcttccgcatctatgcccctgaggccccctacaccagccatgacaagctgaaggacatcttcctgttcatcacccggcagctgaagggcctggaggacaccaagagcccccagttcaaccgctacttctacctgctggagaacctggcctgggtgaagagctacaacatctgctttgagctggaggactgcaatgagatcttcatccagctgttccgcaccctcttcagcgtcatcaacaacagccacaacaagaaggtgcagatgcacatgctggacctgatgagcagcatcatcatggagggagatggagtgacccaggagctgctggacagcatcctgatcaacctgatcccagcccacaagaacctgaacaagcagagctttgacctggccaaggtgctgctgaagaggacagtgcagaccatcgaggcctgcatcgccaacttcttcaaccaggtgctggtgctgggccgcagctctgtgtctgacctgtctgagcacgtgtttgacctgatccaggagctgtttgccatcgacccccacctgctgctgtctgtgatgccccagctggagttcaagctgaagagcaatgatggagaggagcggctggccgtggtgcggctgctggccaagctgtttggcagcaaggacagcgacctggccacccagaaccggcccctgtggcagtgcttcctgggccgcttcaatgacatccacgtgcctgtgcggctggagagcgtgaagtttgccagccactgcctgatgaaccacccagacctggccaaggacctgacagagtacctgaaggtgcgcagccatgaccctgaggaggccatcagacatgatgtgattgtgaccatcatcacagctgccaagagggacctggccctggtgaatgaccagctgctgggctttgtgcgggagaggaccctggacaagcgctggagggtgaggaaggaggccatgatgggcctggcccagctgtacaagaagtactgcctgcacggggaggccggcaaggaggccgctgagaaggtgtcctggatcaaggacaagctgctgcacatctactaccagaacagcattgatgacaagctgctggtggagaagatctttgcccagtacctggtgccccacaacctggagacagaggagaggatgaagtgcctgtactacctgtatgccagcctggaccccaatgctgtgaaggccctgaatgagatgtggaagtgccagaacatgctgcggagccacgtgcgggagctgctggacctgcacaagcagcccaccagcgaggccaactgcagcgccatgtttgggaagctgatgaccatcgccaagaacctgcctgaccccgggaaggcccaggactttgtgaagaagttcaaccaggtgctgggagatgatgagaagctgcggagccagctggagctgctgatcagccccacctgcagctgcaagcaggccgacatctgtgtggtgtccaagagctacttcaccctcttcctgtag

SEQ ID NO: 163405 - DNA, 990 bp, synthetic construct
  misc_feature 1..990: note = Description of Artificial Sequence: Synthetic coding sequence
  source 1..990: mol_type = other DNA
atgaccacccagcagattgacctgcagggccctggcccctggggcttccggctggtgggcggcaaggactttgagcagcccctggccatcagccgggtgaccccaggcagcaaggccgccctggccaacctgtgcattggagatgtgatcacagccattgatggagagaacaccagcaacatgacccacctggaggcccagaaccgcatcaagggctgcacagacaacctgaccctgactgtggcccggtctgagcacaaggtgtggagccccctggtgacagaggagggcaagaggcacccctacaagatgaacctggccagcgagccccaggaggtgctgcacatcggcagcgcccacaacagaagtgccatgcccttcaccgccagccctgccagcagcaccacagcccgggtcatcaccaaccagtacaacaacccagctggcctgtacagcagcgagaacatcagcaacttcaacaatgccctggagagcaagacagctgccagcggcgtggaggccaacagccggcccctggaccacgcccagccccccagcagcctggtgattgacaaggagagcgaggtgtacaagatgctgcaggagaagcaggagctgaatgaaccacccaagcagagcaccagcttcctggtgctgcaggagatcctggagagcgaggagaagggggaccccaacaagcccagcggcttccgctctgtgaaggcccctgtgaccaaggtggccgccagcattggaaatgcccagaagctgcccatgtgtgacaagtgtggcactggaattgtgggcgtgtttgtgaagctgcgggacagacaccgccaccctgagtgctacgtgtgcacagactgtggcaccaacctgaagcagaagggccacttctttgtggaggaccagatctactgtgagaagcacgcccgggagcgggtgaccccacctgagggctatgaggtggtgacagtgttccccaagtag

SEQ ID NO: 163406 - DNA, 1101 bp, synthetic construct
  misc_feature 1..1101: note = Description of Artificial Sequence: Synthetic coding sequence
  source 1..1101: mol_type = other DNA
atggccctgactgtggatgtggccggccctgccccctggggcttccgcatcaccggcggccgggacttccacacccccatcatggtgaccaaggtggccgagcggggcaaggccaaggatgctgacctgcggcctggggacatcatcgtggccatcaatggagagagcgctgagggcatgctgcatgctgaggcccagagcaagatccggcagagccccagccccctgcggctgcagctggacaggagccaggccaccagccctggccagaccaacggggacagcagcctggaggtgctggccacccgcttccagggctctgtgaggacctacacagagagccagagcagcctgcggagcagctacagcagccccaccagcctgagcccccgggccggcagccccttcagccccccacccagcagcagcagcctgaccggggaggccgccatcagccgctccttccagagcctggcctgcagccctggcctgcctgctgctgaccggctgagctacagcggccggcccggcagccggcaggccggcctgggccgggccggggacagcgctgtgctggtgctgccccccagccctggccccaggagcagccggcccagcatggattctgagggcggcagcctgctgctggatgaggacagcgaggtgttcaagatgctgcaggagaaccgggagggccgggccgccccccggcagagcagcagcttccggctgctgcaggaggccctggaggccgaggagcggggcggcaccccagccttcctgcccagcagcctgagcccccagagcagcctgcctgccagccgggccctggccaccccacccaagctgcacacctgtgagaagtgcagcaccagcatcgccaaccaggccgtgcgcatccaggagggccgctaccgccaccctggctgctacacctgtgccgactgtggcctgaacctgaagatgaggggccacttctgggaggatgcctgtgccatggagggcatgaggctgagcctggaggccctggagggcatggtggagggcgccaagaggcgggacaggaggaagacccggcggcccatccagcccagctggtag

SEQ ID NO: 163407 - DNA, 1809 bp, synthetic construct
  misc_feature 1..1809: note = Description of Artificial Sequence: Synthetic coding sequence
  source 1..1809: mol_type = other DNA
atgagaggaggccgggcccggcctgcctgggagagcttcatgggcctgcccccaagaagcagcgccaagtggggcgccggccagagcctggaccggctgtgctgtgcccctggcagccggggcctggccggggcccctggccgcatgagggcccccccagctggccgcagccagcctgctgggggccctggggacagcctgccccaccccccaggcggcctgggccctgggggcagcgcctgggccaggagagctgaggccgccgccagccgggcccggggcggcggccggggcggccctggcatcacctgggccgaggccggccctggggcccctgggggcctgagccctgagagcggccggcggcagcgggagcgctggaggctgcctgccttcccccccagccgggcctgggcccccagcaggactggagagcggcagcccggggagcgggcccacctgcggctgagcgcccggcctgccctgcctggagctggcctgctgagcgcccccctgagcgccagaaatcctggcctggtgcggggccctgccccctggagcctggccagcgctggggccccacccagggctgccctgagccctgctggggccctgctgctgcagcccccagcccggcgggtgctgtgccccaggtctgagggcggcagcaggacaggccgggccggccccagcggctgggccccacccaggggggcccggtctgctgagagcacagaccggctgaagggcatggccctgactgtggatgtggccggccctgccccctggggcttccgcatcaccggcggccgggacttccacacccccatcatggtgaccaaggtggccgagcggggcaaggccaaggatgctgacctgcggcctggggacatcatcgtggccatcaatggagagagcgctgagggcatgctgcatgctgaggcccagagcaagatccggcagagccccagccccctgcggctgcagctggacaggagccaggccaccagccctggccagaccaacggggacagcagcctggaggtgctggccacccgcttccagggctctgtgaggacctacacagagagccagagcagcctgcggagcagctacagcagccccaccagcctgagcccccgggccggcagccccttcagccccccacccagcagcagcagcctgaccggggaggccgccatcagccgctccttccagagcctggcctgcagccctggcctgcctgctgctgaccggctgagctacagcggccggcccggcagccggcaggccggcctgggccgggccggggacagcgctgtgctggtgctgccccccagccctggccccaggagcagccggcccagcatggattctgagggcggcagcctgctgctggatgaggacagcgaggtgttcaagatgctgcaggagaaccgggagggccgggccgccccccggcagagcagcagcttccggctgctgcaggaggccctggaggccgaggagcggggcggcaccccagccttcctgcccagcagcctgagcccccagagcagcctgcctgccagccgggccctggccaccccacccaagctgcacacctgtgagaagtgcagcaccagcatcgccaaccaggccgtgcgcatccaggagggccgctaccgccaccctggctgctacacctgtgccgactgtggcctgaacctgaagatgaggggccacttctgggtgggagatgagctgtactgtgagaagcacgcccggcagcgctacagcgccccagccaccctgagcagccgggcctag

SEQ ID NO: 163408 - DNA, 837 bp, synthetic construct
  misc_feature 1..837: note = Description of Artificial Sequence: Synthetic coding sequence
  source 1..837: mol_type = other DNA
atggccctgactgtggatgtggccggccctgccccctggggcttccgcatcaccggcggccgggacttccacacccccatcatggtgaccaaggtggccgagcggggcaaggccaaggatgctgacctgcggcctggggacatcatcgtggccatcaatggagagagcgctgagggcatgctgcatgctgaggcccagagcaagatccggcagagccccagccccctgcggctgcagctggacaggagccaggccaccagccctggccagaccaacggggacagcagcctggaggtgctggccacccgcttccagggctctgtgaggacctacacagagagccagagcagcctgcggagcagctacagcagccccaccagcctgagcccccgggccggcagccccttcagccccccacccagcagcagcagcctgaccggggaggccgccatcagccgctccttccagagcctggcctgcagccctggcctgcctgctgctgaccggctgagctacagcggccggcccggcagccggcaggccggcctgggccgggccggggacagcgctgtgctggtgctgccccccagccctggccccaggagcagccggcccagcatggattctgagggcggcagcctgctgctggatgaggacagcgaggtgttcaagatgctgcaggagaaccgggagggccgggccgccccccggcagagcagcagcttccggctgctgcaggaggccctggaggccgaggagcggggcacccggctgtgtgccagccggcgggccggcacagccaccccagctgccacccctgtgcccaccgtgggctag

SEQ ID NO: 163409 - DNA, 675 bp, synthetic construct
  misc_feature 1..675: note = Description of Artificial Sequence: Synthetic coding sequence
  source 1..675: mol_type = other DNA
atggccctgactgtggatgtggccggccctgccccctggggcttccgcatcaccggcggccgggacttccacacccccatcatggtgaccaaggtggccgagcggggcaaggccaaggatgctgacctgcggcctggggacatcatcgtggccatcaatggagagagcgctgagggcatgctgcatgctgaggcccagagcaagatccggcagagccccagccccctgcggctgcagctggacaggagccaggccaccagccctggccagaccaacggggacagcagcctggaggtgctggccacccgcttccagggctctgtgaggacctacacagagagccagagcagcctgcggagcagctacagcagccccaccagcctgagcccccgggccggcagccccttcagccccccacccagcagcagcagcctgaccggggaggccgccatcagccgcagccggccccggccccgctggaggctgggcggggccggggccgccgccttccctggccccagcttcctgcaggcccagcacggcctgggccggggcaagcccccacctggccggggcctgggcagcctgcaggatgctgctgggaagagccggggcaccggcggccccccaacagtgcagctgctgagcgccctggccggcagccctgggggctag

SEQ ID NO: 163410 - DNA, 1059 bp, synthetic construct
  misc_feature 1..1059: note = Description of Artificial Sequence: Synthetic coding sequence
  source 1..1059: mol_type = other DNA
atggccctgactgtggatgtggccggccctgccccctggggcttccgcatcaccggcggccgggacttccacacccccatcatggtgaccaaggtggccgagcggggcaaggccaaggatgctgacctgcggcctggggacatcatcgtggccatcaatggagagagcgctgagggcatgctgcatgctgaggcccagagcaagatccggcagagccccagccccctgcggctgcagctggacaggagccaggccaccagccctggccagaccaacggggacagcagcctggaggtgctggccacccgcttccagggctctgtgaggacctacacagagagccagagcagcctgcggagcagctacagcagccccaccagcctgagcccccgggccggcagccccttcagccccccacccagcagcagcagcctgaccggggaggccgccatcagccgctccttccagagcctggcctgcagccctggcctgcctgctgctgaccggctgagctacagcggccggcccggcagccggcaggccggcctgggccgggccggggacagcgctgtgctggtgctgccccccagccctggccccaggagcagccggcccagcatggattctgagggcggcagcctgctgctggatgaggacagcgaggtgttcaagatgctgcaggagaaccgggagggccgggccgccccccggcagagcagcagcttccggctgctgcaggaggccctggaggccgaggagcggggcggcaccccagccttcctgcccagcagcctgagcccccagagcagcctgcctgccagccgggccctggccaccccacccaagctgcacacctgtgagaagtgcagcaccagcatcgccaaccaggccgtgcgcatccaggagggccgctaccgccaccctggctgctacacctgtgccgactgtggcctgaacctgaagatgaggggccacttctgggtgggagatgagctgtactgtgagaagcacgcccggcagcgctacagcgccccagccaccctgagcagccgggcctag

SEQ ID NO: 163411 - DNA, 1059 bp, synthetic construct; identical to SEQ ID NO: 163410
  misc_feature 1..1059: note = Description of Artificial Sequence: Synthetic coding sequence
  source 1..1059: mol_type = other DNA

SEQ ID NO: 163412 - DNA, 837 bp, synthetic construct; identical to SEQ ID NO: 163408
  misc_feature 1..837: note = Description of Artificial Sequence: Synthetic coding sequence
  source 1..837: mol_type = other DNA

SEQ ID NO: 163413 - DNA, 1059 bp, synthetic construct; identical to SEQ ID NO: 163410
  misc_feature 1..1059: note = Description of Artificial Sequence: Synthetic coding sequence
  source 1..1059: mol_type = other DNA

SEQ ID NO: 163414 - DNA, 1560 bp, synthetic construct
  misc_feature 1..1560: note = Description of Artificial Sequence: Synthetic coding sequence
  source 1..1560: mol_type = other DNA
atgaccagcaccttcaacccccgggagtgcaagctgagcaagcaggagggccagaactacggcttcttcctgcgcatcgagaaggacacagagggccacctggtgcgggtggtggagaagtgcagccctgctgagaaggccggcctgcaggatggagacagagtgctgcgcatcaatggagtgtttgtggacaaggaggagcacatgcaggtggtggacctggtgaggaagagcggcaacagcgtgaccctgctggtgctggatggagacagctatgagaaggctgtgaagaccagggtggacctgaaggagctgggccagagccagaaggagcagggcctgagtgacaacatcctgagccctgtgatgaatggaggagtgcagacctggacccagccccggctgtgctacctggtgaaggagggcggcagctatggcttcagcctgaagacagtgcagggcaagaagggcgtgtacatgacagacatcaccccccagggcgtggccatgagagctggggtgctggctgatgaccacctgattgaggtgaatggagaaaatgtggaggatgccagccatgaggaggtggtggagaaggtgaagaagagcggcagccgggtgatgttcctgctggtggacaaggagacagacaagagacatgtggagcagaagatccagttcaagcgggagacagccagcctgaagctgctgccccaccagcccagaattgtggagatgaagaagggcagcaatggctacggcttctacctgcgggccggcagcgagcagaagggccagatcatcaaggacattgattctggcagccctgctgaggaggccggcctgaagaacaatgacctggtggtggccgtgaatggagagagcgtggagaccctggaccatgattctgtggtggagatgatcaggaagggcggggaccagaccagcctgctggtggtggacaaggagacagacaacatgtaccgcctggcccacttcagccccttcctgtactaccagagccaggagctgcccaacggctctgtgaaggaggccccagcccccacccccaccagcctggaggtgagcagccccccagacaccacagaggaggtggaccacaagcccaagctgtgccgcctggccaagggagaaaatggctacggcttccacctgaatgccatccggggcctgcccggcagcttcatcaaggaggtgcagaagggcggccctgctgacctggccggcctggaggatgaagatgtgatcatcgaggtgaatggagtgaatgtgctggatgagccctatgagaaggtggtggaccgcatccagagcagcggcaagaatgtgaccctgctggtgtgtgggaagaaggcctatgactacttccaggccaagaagatccccatcgtgagcagcctggccgaccccctggacaccccaccagacagcaaggagggcatcgtggtggagagcaaccacgacagccacatggccaaggagcgggcccacagcacagccagccacagcagcagcaacagcgaggacacagagatgtag

SEQ ID NO: 163415 - DNA, 1560 bp, synthetic construct; identical to SEQ ID NO: 163414
  misc_feature 1..1560: note = Description of Artificial Sequence: Synthetic coding sequence
  source 1..1560: mol_type = other DNA

SEQ ID NO: 163416 - DNA, 795 bp, synthetic construct
  misc_feature 1..795: note = Description of Artificial Sequence: Synthetic coding sequence
  source 1..795: mol_type = other DNA
atgaccagcaccttcaacccccgggagtgcaagctgagcaagcaggagggccagaactacggcttcttcctgcgcatcgagaaggacacagagggccacctggtgcgggtggtggagaagtgcagccctgctgagaaggccggcctgcaggatggagacagagtgctgcgcatcaatggagtgtttgtggacaaggaggagcacatgcaggtggtggacctggtgaggaagagcggcaacagcgtgaccctgctggtgctggatggagacagctatgagaaggctgtgaagaccagggtggacctgaaggagctgggccagagccagaaggagcagggcctgagtgacaacatcctgagccctgtgatgaatggaggagtgcagacctggacccagccccggctgtgctacctggtgaaggagggcggcagctatggcttcagcctgaagacagtgcagggcaagaagggcgtgtacatgacagacatcaccccccagggcgtggccatgagagctggggtgctggctgatgaccacctgattgaggtgaatggagaaaatgtggaggatgccagccatgaggaggtggtggagaaggtgaagaagagcggcagccgggtgatgttcctgctggtggacaaggagacagacaagagacatgtggagcagaagatccagttcaagcgggagacagccagcctgaagctgctgccccaccagcccagaattgtggagatgaagaagggcagcaatggctacggcttctacctgcgggccggcagcgagcagaagtag

SEQ ID NO: 163417 - DNA, 1227 bp, synthetic construct
  misc_feature 1..1227: note = Description of Artificial Sequence: Synthetic coding sequence
  source 1..1227: mol_type = other DNA
atgaccagcaccttcaacccccgggagtgcaagctgagcaagcaggagggccagaactacggcttcttcctgcgcatcgagaaggacacagagggccacctggtgcgggtggtggagaagtgcagccctgctgagaaggccggcctgcaggatggagacagagtgctgcgcatcaatggagtgtttgtggacaaggaggagcacatgcaggtggtggacctggtgaggaagagcggcaacagcgtgaccctgctggtgctggatggagacagctatgagaaggctgtgaagaccagggtggacctgaaggagctgggccagagccagaaggagcagggcctgagtgacaacatcctgagccctgtgatgaatggaggagtgcagacctggacccagccccggctgtgctacctggtgaaggagggcggcagctatggcttcagcctgaagacagtgcagggccagatcatcaaggacatcgacagcggcagccctgctgaggaggccggcctgaagaacaatgacctggtggtggccgtgaatggagagagcgtggagaccctggaccatgacagcgtggtggagatgatcagaaaaggaggagaccagaccagcctgctggtggtggacaaggagacagacaacatgtaccgcctggcccacttcagccccttcctgtactaccagagccaggagctgcccaatggatctgtgaaggaggccccagcccccacccccaccagcctggaggtgagcagccccccagacaccacagaggaggtggaccacaagcccaagctgtgccgcctggccaagggggagaatggctacggcttccacctgaatgccatccggggcctgcccggcagcttcatcaaggaggtgcagaagggcggccctgctgacctggccggcctggaggatgaagatgtgatcatcgaggtgaatggagtgaatgtgctggatgagccctatgagaaggtggtggaccgcatccagagcagcggcaagaatgtgaccctgctggtgtgtgggaagaaggcctatgactacttccaggccaagaagatccccatcgtgagcagcctggccgaccccctggacaccccaccagacagcaaggagggcatcgtggtggagagcaaccacgacagccacatggccaaggagcgggcccacagcacagccagccacagcagcagcaacagcgaggacacagagatgtag

SEQ ID NO: 163418 - DNA, 423 bp, synthetic construct
  misc_feature 1..423: note = Description of Artificial Sequence: Synthetic coding sequence
  source 1..423: mol_type = other DNA
atggacagccgcatcccctatgatgactaccctgtggtgttcctgcctgcctatgaaaatcctccagcctggatcccccctcatgagcgggtgcaccacccagactacaacaatgagctgacccagttcctgcccaggaccatcaccctgaagaagcccccaggggcccagctgggcttcaacatccggggcggcaaggccagccagctgggcatcttcatcagcaaggtgatcccagacagtgatgcccaccgggccggcctgcaggagggggaccaggtgctggccgtgaatgatgtggacttccaggacatcgagcacagcaaggctgtggagatcctgaagacagcccgggagatctccatgagggtgcgcttcttcccctacaactaccaccggcagaaggagaggacagtgcactag

SEQ ID NO: 163419 - DNA, 423 bp, synthetic construct; identical to SEQ ID NO: 163418
  misc_feature 1..423: note = Description of Artificial Sequence: Synthetic coding sequence
  source 1..423: mol_type = other DNA

SEQ ID NO: 163420 - DNA, 8520 bp, synthetic construct
  misc_feature 1..8520: note = Description of Artificial Sequence: Synthetic coding sequence
  source 1..8520: mol_type = other DNA
atgcccatcacccaggacaatgctgtgctgcacctgcccctgctgtaccagtggctgcagaacagcctgcaggagggcggagatggccctgagcagaggctgtgccaggccgccatccagaagctgcaggagtacatccagctgaactttgctgtggatgagagcacagtgcccccagaccacagccccccagagatggagatctgcaccgtgtacctgaccaaggagctgggggacacagagaccgtgggcctgagctttggaaacatccctgtgtttggagactatggagagaagaggcggggcggcaagaagaggaagacccaccagggccctgtgctggatgtgggctgcatctgggtgacagagctgaggaagaacagccctgctgggaagagcggcaaggtgcggctgagagatgagatcctgagcctgaatggccagctgatggtgggcgtggatgtgtctggggccagctacctggccgagcagtgctggaatggaggcttcatctacctgatcatgctgcggcgcttcaagcacaaggcccacagcacctacaacggcaacagcagcaacagcagcgagcctggagagacccccaccctggagctgggggacagaacagccaagaagggcaagaggaccaggaagtttggagtcatcagccggcccccagccaacaaggcccctgaggagagcaaaggatctgctggctgtgaggtgtccagtgaccccagcacagagctggagaatggaccagaccctgagctgggcaatggccacgtgttccagctggagaatggaccagacagcctgaaggaggtggccggcccccacctggagaggtctgaggtggaccggggcacagagcaccgcatccccaagacagatgcccccctgaccaccagcaatgacaagaggcgcttcagcaagggcggcaagacagacttccagagcagtgactgcctggcccgggaggaggtgggccgcatctggaagatggagctgctgaaggagagtgatggcctgggcatccaggtgtctgggggccggggcagcaagaggagcccccacgccatcgtggtgacccaggtgaaggagggcggggccgcccacagagatggccgcctgagcctgggagatgagctgctggtgatcaatggccacctgctggtgggcctgagccatgaggaggccgtggccatcctgcggagcgccaccggcatggtgcagctggtggtggccagcaaagaaaattctgctgaggacctgctgcggctgaccagcaagagcctgcctgacctgaccagctctgtggaggatgtgtcctcctggacagacaatgaagaccaggaggctgatggagaggaggatgagggcaccagcagctctgtgcagagggccatgcctggaacagatgagccccaggatgtgtgtggggctgaggagagcaagggcaacctggagagccccaagcagggcagcaacaagatcaagctgaagagccggctgagcggcggcgtgcaccggctggagagcgtggaggagtacaatgagctgatggtgagaaatggagacccccgcatccgcatgctggaggtgtccagagatggcaggaagcacagcctgccccagctgctggacagcagcagcgccagccaggagtaccacatcgtgaagaagagcaccaggagcctgagcaccacccaggtggagagcccctggaggctcatccggcccagcgtcatcagcatcatcggcctgtacaaggagaagggcaagggcctgggcttcagcattgctgggggccgggactgcatccggggccagatgggcatctttgtgaagaccatcttccccaacggcagcgctgctgaagatggccgcctgaaggagggagatgagatcctggatgtgaatggcatccccatcaagggcctgaccttccaggaggccatccacaccttcaagcagatccgcagcggcctgtttgtgctgactgtgaggaccaagctggtgagccccagcctgaccccctgcagcacccccacccacatgagccgcagcgccagccccaacttcaacaccagcggcggggccagcgctgggggcagtgatgagggcagcagcagcagcctgggcaggaagaccccaggccccaaggacagaattgtgatggaggtgaccctgaacaaggagccccgggtgggcctgggcattggagcctgctgcctggccctggagaacagccccccaggcatctacatccacagcctggcccctggctctgtggccaagatggagagcaacctgagcagaggagaccagatcctggaggtgaacagcgtgaatgtgagacatgctgccctgagcaaggtgcacgccatcctgagcaagtgccccccaggccctgtgcggctggtgattggccgccaccccaaccccaaggtgtctgagcaggagatggatgaggtgattgcccggagcacctaccaggagagcaaggaggccaacagcagccctggcctgggcacccccctgaagagccccagcctggccaagaaggacagcctcatcagcgagagcgagctgagccagtactttgcccatgatgtgcccggccccctgagtgacttcatggtggccggctctgaagatgaggaccaccctggcagcggctgcagcaccagcgaggagggcagcctgccccccagcaccagcacccacaaggagcccgggaagccccgggccaacagcctggtgaccctgggcagccaccgggccagcggcctcttccacaagcaggtgacagtggcccggcaggccagcctgcccggcagcccccaggccctgaggaaccccctgctgcggcagaggaaggtgggctgctatgatgccaatgatgccagtgatgaggaggagtttgaccgggagggggactgcatcagcctgcccggggccctgcccggccccatccggcccctgtctgaagatgacccccggcgggtgtccatcagcagcagcaagggcatggatgtgcacaaccaggaggagcggcccaggaagaccctggtgtccaaggccatcagcgcccccctgctgggcagctctgtggacctggaggagagcatccctgagggcatggtggatgctgccagctatgctgccaacctgacagacagcgctgaggcccccaagggcagccctggctcctggtggaagaaggagctgagcggcagcagcagcgcccccaagctggagtacacagtgaggacagacacccagagccccaccaacacaggcagccccagcagcccccagcagaagtctgagggcctgggcagccgccacaggcctgtggcccgggtgagcccccactgcaagaggtctgaggccgaggccaagcccagcggcagccagacagtgaacctgaccggccgggccaatgacccctgtgacctggacagccgggtgcaggccacctctgtgaaggtgacagtggccggcttccagcctggaggagctgtggagaaggagagcctgggcaagctgaccactggagatgcctgtgtgtccaccagctgtgagctggccagcgccctgagccacctggatgccagccacctgacagagaacctgcccaaggccgccagcgagctgggccagcagcccatgacagagctggacagcagcagtgacctgatcagcagccctgggaagaagggggccgcccacccagaccccagcaagacctctgtggacaccggccaggtgtccaggcctgagaaccccagccagcctgccagcccccgggtgaccaagtgcaaggcccggagccctgtgcggctgccccatgagggcagccccagccctggagagaaggctgctgcccccccagactacagcaagaccaggtctgccagcgagaccagcaccccccacaacacccggcgggtggccgccctgcggggggccggccctggagctgagggcatgaccccagctggagctgtgctgcccggggaccccctgaccagccaggagcagaggcagggcgcccctggcaaccacagcaaggccctggagatgacaggcatccacgcccctgagagcagccaggagcccagcctgctggagggcgctgacagcgtgagcagccgggccccccaggccagcctgtccatgctgcccagcacagacaacaccaaggaggcctgtggccacgtgtctggccactgctgccctgggggcagccgggagagccctgtgacagacatcgacagcttcatcaaggagctggatgccagcgctgcccggagccccagcagccagacaggagacagcggcagccaggagggcagcgcccagggccaccccccagctggggccggcggcggcagcagctgcagagctgagcctgtgcctgggggccagaccagcagcccccggcgggcctgggccgccggggccccagcctacccccagtgggccagccagcccagcgtgctggacagcatcaacccagacaagcacttcaccgtgaacaagaacttcctgagcaactacagcaggaacttcagcagcttccacgaggacagcaccagcctgagcggcctgggggacagcacagagcccagcctgagctccatgtatggagatgctgaggacagcagcagtgaccctgagagcctgacagaggccccccgggccagcgccagagatggctggagccccccaagaagccgggtgtccctgcacaaggaggaccccagcgagagcgaggaggagcagatcgagatctgcagcacccggggctgccccaacccccccagcagccctgcccacctgcccacccaggccgccatctgcccagccagcgccaaggtgctgagcctgaagtacagcaccccccgggagagcgtggccagcccccgggagaaggccgcctgcctgcccggcagctacaccagcggccctgacagcagccagcccagcagcctgctggagatgagcagccaggagcacgagacccacgccgacatcagcaccagccagaaccaccggcccagctgtgccgaggagaccacagaggtgaccagcgccagcagcgccatggagaacagccccctgagcaaggtggcccggcacttccacagcccccccatcatcctgagcagccccaacatggtgaatggcctggagcatgacctgctggatgatgagaccctgaaccagtatgagaccagcatcaatgctgctgccagcctgagcagcttctctgtggatgtgcccaagaatggagagagcgtgctggagaacctgcacatcagcgagagccaggacctggatgacctgctgcagaagcccaagatgattgcccggcggcccatcatggcctggttcaaggagatcaacaagcacaaccagggcacccacctgcggagcaagacagagaaggagcagcccctgatgcctgcccggagcccagacagcaagatccagatggtgagcagcagccagaagaagggcgtgacagtgccccacagccccccccagcccaagaccaacctggagaacaaggacctgagcaagaagagccctgctgagatgctgctgaccaacggccagaaggccaagtgtggccccaagctgaagaggctgagcctgaagggcaaggccaaggtgaacagcgaggccccagctgccaatgctgtgaaggccggcggcacagaccacaggaagcccctcatcagcccccagaccagccacaagaccctgagcaaggctgtgtcccagaggctgcacgtggccgaccatgaagatcctgacaggaacaccacagctgcccccaggagcccccagtgtgtgctggagagcaagccacccctggccaccagcggccccctgaagcccagcgtgtctgacaccagcatccgcacctttgtgagccccctgaccagccccaagcctgtgcctgagcagggcatgtggagccgcttccacatggctgtgctgtctgagccagaccggggctgccccaccacccccaagagccccaagtgcagagctgagggccgggcccccagggctgacagcggccctgtgtccccagctgccagcagaaatggcatgtctgtggccggcaaccggcagagcgagccccggctggccagccacgtggccgctgacacagcccagccccggcccactggagagaagggcggcaacatcatggccagtgaccggctggagaggaccaaccagctgaagatcgtggagatctctgctgaggccgtgtctgaaacagtgtgtggcaacaagccagctgagagtgaccggcggggcggctgcctggcccagggcaactgccaggagaagtctgagatccggctgtaccggcaggtggccgagagcagcaccagccaccccagcagcctgcccagccacgccagccaggccgagcaggagatgagccgctccttctccatggccaagctggccagcagcagcagcagcctgcagacagccatcaggaaggccgagtacagccagggcaagagcagcctgatgtctgacagccggggcgtgcccagaaattccatccctgggggccccagcggggaggaccacctgtacttcacccccaggcctgccaccaggacctacagcatgcctgcccagttcagcagccacttcggccgggagggccaccccccccacagcctgggccgcagccgggacagccaggtgcctgtgaccagctctgtggtgcctgaggccaaggccagccggggcggcctgcccagcctggccaacggccagggcatctacagcgtgaagcccctgctggacaccagcaggaacctgcctgccacagatgaaggagacatcatctctgtgcaggagaccagctgcctggtgacagacaagatcaaggtgacccggcggcactactgctatgagcagaactggccccatgagagcaccagcttcttctctgtgaagcagaggatcaagagctttgagaacctggccaatgctgacaggcctgtggccaagagcggggccagccccttcctgtctgtgagcagcaagccacccatcggcagaagaagcagcggcagcatcgtgtctggcagcctgggccaccctggagatgctgctgcccggctgctgcggcgcagcctgagcagctgcagcgagaaccagagcgaggccggcaccctgctgccccagatggccaagagccccagcatcatgaccctgaccatcagccggcagaaccccccagagaccagcagcaagggcagtgacagcgagctgaagaagagcctgggccccctgggcatccccacccccaccatgaccctggccagccctgtgaagaggaacaagagctctgtgcgccacacccagcccagccctgtgagccgcagcaagctgcaggagctgcgggccctgtccatgccagacctggacaagctgtgcagcgaggactacagcgctggccccagcgctgtgctcttcaagacagagctggagatcaccccaagaagaagccctggccccccagctgggggcgtgtcctgcccagagaagggcggcaacagagcctgccctgggggcagcggccccaagaccagcgctgctgagacccccagcagcgccagtgacaccggggaggccgcccaggacctgcccttccgccgctcctggagcgtgaacctggaccagctgctggtgtctgctggggaccagcagaggctgcagagcgtgctgagctctgtgggcagcaagagcaccatcctgaccctcatccaggaggccaaggcccagagtgaaaatgaggaggatgtgtgcttcatcgtgctgaacaggaaggagggcagcggcctgggcttctctgtggccggcggcacagatgtggagcccaagagcatcaccgtgcacagggtcttcagccagggcgccgccagccaggagggcaccatgaacagaggagacttcctgctgtctgtgaatggagccagcctggccggcctggcccacggcaatgtgctgaaggtgctgcaccaggcccagctgcacaaggatgccctggtggtgatcaagaagggcatggaccagccccggcccagcgcccggcaggagcccccaacagccaacgggaagggcctgctgagcaggaagaccatccccctggagcccggcatcggccgctctgtggccgtgcatgatgccctgtgtgtggaggtgctgaagaccagcgctggcctgggcctgagcctggatggcggcaagagctctgtgactggagatggccccctggtgatcaagagggtgtacaagggcggcgctgctgagcaggccggcatcatcgaggccggagatgagatcctggccatcaacgggaagcccctggtgggcctgatgcactttgatgcctggaacatcatgaagtctgtgcctgagggccctgtgcagctgctgatcaggaagcacaggaacagcagctag

SEQ ID NO: 163421 - DNA, 7923 bp, synthetic construct
  misc_feature 1..7923: note = Description of Artificial Sequence: Synthetic coding sequence
  source 1..7923: mol_type = other DNA
atgcccatcacccaggacaatgctgtgctgcacctgcccctgctgtaccagtggctgcagaacagcctgcaggagggcggagatggccctgagcagaggctgtgccaggccgccatccagaagctgcaggagtacatccagctgaactttgctgtggatgagagcacagtgcccccagaccacagccccccagagatggagatctgcaccgtgtacctgaccaaggagctgggggacacagagaccgtgggcctgagctttggaaacatccctgtgtttggagactatggagagaagaggcggggcggcaagaagaggaagacccaccagggccctgtgctggatgtgggctgcatctgggtgacagagctgaggaagaacagccctgctgggaagagcggcaaggtgcggctgagagatgagatcctgagcctgaatggccagctgatggtgggcgtggatgtgtctggggccagctacctggccgagcagtgctggaatggaggcttcatctacctgatcatgctgcggcgcttcaagcacaaggcccacagcacctacaacggcaacagcagcaacagcagcgagcctggagagacccccaccctggagctgggggacagaacagccaagaagggcaagaggaccaggaagtttggagtcatcagccggcccccagccaacaaggcccctgaggagagcaaaggatctgctggctgtgaggtgtccagtgaccccagcacagagctggagaatggaccagaccctgagctgggcaatggccacgtgttccagctggagaatggaccagacagcctgaaggaggtggccggcccccacctggagaggtctgaggtggaccggggcacagagcaccgcatccccaagacagatgcccccctgaccaccagcaatgacaagaggcgcttcagcaagggcggcaagacagacttccagagcagtgactgcctggcccgggaggaggtgggccgcatctggaagatggagctgctgaaggagagtgatggcctgggcatccaggtgtctgggggccggggcagcaagaggagcccccacgccatcgtggtgacccaggtgaaggagggcggggccgcccaccgggagtaccacatcgtgaagaagagcaccaggagcctgagcaccacccaggtggagagcccctggaggctcatccggcccagcgtcatcagcatcatcggcctgtacaaggagaagggcaagggcctgggcttcagcattgctgggggccgggactgcatccggggccagatgggcatctttgtgaagaccatcttccccaatggatctgctgctgaagatggccgcctgaaggagggagatgagatcctggatgtgaatggcatccccatcaagggcctgaccttccaggaggccatccacaccttcaagcagatccgcagcggcctgtttgtgctgactgtgaggaccaagctggtgagccccagcctgaccccctgcagcacccccacccacatgagccgcagcgccagccccaacttcaacaccagcggcggggccagcgctgggggcagtgatgagggcagcagcagcagcctgggcaggaagaccccaggccccaaggaccgcatcgtgatggaggtgaccctgaacaaggagccccgggtgggcctgggcatcggggcctgctgcctggccctggagaacagccccccaggcatctacatccacagcctggcccctggctctgtggccaagatggagagcaacctgagcagaggagaccagatcctggaggtgaacagcgtgaatgtgagacatgctgccctgagcaaggtgcacgccatcctgagcaaatgtcctgtgtctgagcaggagatggatgaggtgattgcccggagcacctaccaggagagcaaggaggccaacagcagccctggcctgggcacccccctgaagagccccagcctggccaagaaggacagcctcatcagcgagagcgagctgagccagtactttgcccatgatgtgcccggccccctgagtgacttcatggtggccggctctgaagatgaggaccaccctggcagcggctgcagcaccagcgaggagggcagcctgccccccagcaccagcaaggagcccgggaagccccgggccaacagcctggtgaccctgggcagccaccgggccagcggcctcttccacaagcaggtgacagtggcccggcaggccagcctgcccggcagcccccaggccctgaggaaccccctgctgcggcagaggaaggtgggctgctatgatgccaatgatgccagtgatgaggaggagtttgaccgggagggggactgcatcagcctgcccggggccctgcccggccccatccggcccctgtctgaagatgacccccggcgggtgtccatcagcagcagcaagggcatggatgtgcacaaccaggaggagcggcccaggaagaccctggtgtccaaggccatcagcgcccccctgctgggcagctctgtggacctggaggagagcatccctgagggcatggtggatgctgccagctatgctgccaacctgacagacagcgctgaggcccccaagggcagccctggctcctggtggaagaaggagctgagcggcagcagcagcgcccccaagctggagtacacagtgaggacagacacccagagccccaccaacacaggcagccccagcagcccccagcagaagtctgagggcctgggcagccgccacaggcctgtggcccgggtgagcccccactgcaagaggtctgaggccgaggccaagcccagcggcagccagacagtgaacctgaccggccgggccaatgacccctgtgacctggacagccgggtgcaggccacctctgtgaaggtgacagtggccggcttccagcctggaggagctgtggagaagctgtgccaggagagcctgggcaagctgaccactggagatgcctgtgtgtccaccagctgtgagctggccagcgccctgagccacctggatgccagccacctgacagagaacctgcccaaggccgccagcgagctgggccagcagcccatgacagccagtgacctgatcagcagccctgggaagaagggagctgcccacccagaccccagcaagacctctgtggacaccggccaggtgtccaggcctgagaaccccagccagcctgccagcccccgggtgaccaagtgcaaggcccggagccctgtgcggctgccccatgagggcagccccagccctggagagaaggccgccgcccccccagactacagcaagaccaggtctgccagcgagaccagcaccccccacaacaccaggagagtggccgccctgcggggagctggccctggagctgagggcatgaccccagctggagctgtgctgcccggggaccccctgaccagccaggagcagaggcagggcgcccctggcaaccacagcaaggccctggagatgacaggcatccacgcccctgagagcagccaggagcccagcctgctggagggcgctgacagcgtgagcagccgggccccccaggccagcctgtccatgctgcccagcacagacaacaccaaggaggcctgtggccacgtgtctggccactgctgccctgggggcagccgggagagccctgtgacagacatcgacagcttcatcaaggagctggatgccagcgctgcccggagccccagcagccagacaggagacagcggcagccaggagggcagcgcccagggccaccccccagctggagctgggggcggcagcagctgcagagctgagcctgtgcctgggggccagaccagcagcccccggcgggcctgggccgccggggccccagcctacccccagtgggccagccagcccagcgtgctggacagcatcaacccagacaagcacttcaccgtgaacaagaacttcctgagcaactacagcaggaacttcagcagcttccacgaggacagcaccagcctgagcggcctgggggacagcacagagcccagcctgagctccatgtatggagatgctgaggacagcagcagtgaccctgagagcctgacagaggccccccgggccagcgccagagatggctggagcccccccaggagccgggtgtccctgcacaaggaggaccccagcgagagcgaggaggagcagatcgagatctgcagcacccggggctgccccaacccccccagcagccctgcccacctgcccacccaggccgccatctgcccagccagcgccaaggtgctgagcctgaagtacagcaccccccgggagagcgtggccagcccccgggagaaggccgcctgcctgcccggcagctacaccagcggccctgacagcagccagcccagcagcctgctggagatgagcagccaggagcacgagacccatgctgacatcagcaccagccagaaccaccggcccagctgtgccgaggagaccacagaggtgaccagcgccagcagcgccatggagaacagccccctgagcaaggtggcccggcacttccacagcccccccatcatcctgagcagccccaacatggtgaatggcctggagcatgacctgctggatgatgagaccctgaaccagtatgagaccagcatcaatgctgctgccagcctgagcagcttctctgtggatgtgcccaagaatggagagagcgtgctggagaacctgcacatcagcgagagccaggacctggatgacctgctgcagaagcccaagatgattgcccggcggcccatcatggcctggttcaaggagatcaacaagcacaaccagggcacccacctgcggagcaagacagagaaggagcagcccctgatgcctgcccggagcccagacagcaagatccagatggtgagcagcagccagaagaagggcgtgacagtgccccacagccccccccagcccaagaccaacctggagaacaaggacctgagcaagaagagccctgctgagatgctgctgaccaacggccagaaggccaagtgtggccccaagctgaagaggctgagcctgaagggcaaggccaaggtgaacagcgaggccccagctgccaatgctgtgaaggccggcggcacagaccacaggaagcccctcatcagcccccagaccagccacaagaccctgagcaaggctgtgtcccagaggctgcacgtggccgaccacgaggaccctgacaggaacaccacagctgcccccaggagcccccagtgtgtgctggagagcaagccacccctggccaccagcggccccctgaagcccagcgtgtctgacaccagcatccgcacctttgtgagccccctgaccagccccaagcctgtgcctgagcagggcatgtggagccgcttccacatggctgtgctgtctgagccagaccggggctgccccaccacccccaagagccccaagtgcagagctgagggccgggcccccagggctgacagcggccctgtgtccccagctgccagcagaaatggcatgtctgtggccggcaaccggcagagcgagccccggctggccagccacgtggccgctgacacagcccagccccggcccaccggggagaagggcggcaacatcatggccagtgaccggctggagaggaccaaccagctgaagatcgtggagatctctgctgaggccgtgtctgagaccgtgtgtggcaacaagccagctgagagtgacagaagaggaggctgcctggcccagggcaactgccaggagaagtctgagatccggctgtaccggcaggtggccgagagcagcaccagccaccccagcagcctgcccagccacgccagccaggccgagcaggagatgagccgctccttctccatggccaagctggccagcagcagcagcagcctgcagacagccatcaggaaggccgagtacagccagggcaagagcagcctgatgtctgacagcagaggagtgcccaggaacagcatccctgggggccccagcggggaggaccacctgtacttcacccccaggcctgccaccaggacctacagcatgcctgcccagttcagcagccacttcggccgggagggccaccccccccacagcctgggccgcagccgggacagccaggtgcctgtgaccagctctgtggtgcctgaggccaaggccagcagaggaggcctgcccagcctggccaacggccagggcatctacagcgtgaagcccctgctggacaccagcaggaacctgcctgccacagatgaaggagacatcatctctgtgcaggagaccagctgcctggtgacagacaagatcaaggtgaccaggaggcactactgctatgagcagaactggccccatgagagcaccagcttcttctctgtgaagcagaggatcaagagctttgagaacctggccaatgctgacaggcctgtggccaagagcggggccagccccttcctgtctgtgagcagcaagccacccatcggccgccgcagcagcggcagcatcgtgtctggcagcctgggccaccctggagatgctgctgcccggctgctgcggcgcagcctgagcagctgcagcgagaaccagagcgaggccggcaccctgctgccccagatggccaagagccccagcatcatgaccctgaccatcagccggcagaaccccccagagaccagcagcaaaggaagtgacagcgagctgaagaagagcctgggccccctgggcatccccacccccaccatgaccctggccagccctgtgaagaggaacaagagctctgtgcgccacacccagcccagccctgtgagccgcagcaagctgcaggagctgcgggccctgtccatgccagacctggacaagctgtgcagcgaggactacagcgctggccccagcgctgtgctcttcaagacagagctggagatcaccccccggcgcagccctggccccccagctggaggagtgtcctgcccagagaagggcggcaacagagcctgccctgggggcagcggccccaagaccagcgctgctgagacccccagcagcgccagtgacacaggagaggccgcccaggacctgcccttcagaagatcctggagcgtgaacctggaccagctgctggtgtctgctggggaccagcagaggctgcagagcgtgctgagctctgtgggcagcaagagcaccatcctgaccctcatccaggaggccaaggcccagagtgaaaatgaagaagatgtgtgcttcatcgtgctgaacaggaaggagggcagcggcctgggcttctctgtggccggcggcacagatgtggagcccaagagcatcaccgtgcacagggtcttcagccagggcgccgccagccaggagggcaccatgaacagaggagacttcctgctgtctgtgaatggagccagcctggccggcctggcccatggaaatgtgctgaaggtgctgcaccaggcccagctgcacaaggatgccctggtggtgatcaagaagggcatggaccagccccggcccagcgcccggcaggagcccccaacagccaacgggaagggcctgctgagcaggaagaccatccccctggagcccggcatcggccgctctgtggccgtgcatgatgccctgtgtgtggaggtgctgaagaccagcgctggcctgggcctgagcctggatggcggcaagagctctgtgactggagatggccccctggtgatcaagagggtgtacaagggcggcgctgctgagcaggccggcatcattgaagctggagatgagatcctggccatcaatggcaagcccctggtgggcctgatgcactttgatgcctggaacatcatgaagtctgtgcctgagggccctgtgcagctgctgatcaggaagcacaggaacagcagctag

SEQ ID NO: 163422 - DNA, 8520 bp, synthetic construct; identical to SEQ ID NO: 163420
  misc_feature 1..8520: note = Description of Artificial Sequence: Synthetic coding sequence
  source 1..8520: mol_type = other DNA

SEQ ID NO: 163423 - DNA, 45 bp, synthetic construct
  misc_feature 1..45: note = Description of Artificial Sequence: Synthetic coding sequence
  source 1..45: mol_type = other DNA
atgcccatcacccaggacaatgctgtgctgcacctgcccctgtag

SEQ ID NO: 163424 - DNA, 1476 bp, synthetic construct
  misc_feature 1..1476: note = Description of Artificial Sequence: Synthetic coding sequence
  source 1..1476: mol_type = other DNA
atggagaaggctgctgacctgcaggacacagccagcctgaccctgaagttcaagttcaaccccaagctgggcatcgacaaccctgtgctgagcctggccgaggaccatgacccctatgacccctggagcctggagcggccccgcttctgcctgctgagcaaggaggagggcaagagctttggcttccacctgcagcaggagctgggccgggccggccacgtggtgtgccgggtggaccccggcaccagcgcccagaggcagggcctgcaggagggggaccgcatcctggccgtgaacaatgatgtggtggagcacgaggactatgctgtggtggtgcggcgcatccgggccagcagcccccgggtgctgctgactgtgctggcccggcatgcccatgatgtggcccgggcccagctgggagaagatgcccacctgtgccccaccctgggccctggggtgcggccccggctgtgccacatcgtgaaggatgaaggaggcttcggcttctctgtgacccacggcaaccagggccccttctggctggtgctgagcactggaggagctgctgagcgggccggcgtgcccccaggggcccggctgctggaggtgaatggcctgtggcagagcggccagcaggtgaccctgctggtggccggccctgaggtggaggagcagtgccggcagctgggcctgcccctggccgcccccctggccgagggctgggccctgcccaccaagccccgctgcctgcacctggagaagggcccccagggcttcggcttcctgctgcgggaggagaagggcctggatggccggcccggccagttcctgtgggaggtggaccccggcctgcctgccaagaaggccggcatgcaggccggggaccggctggtggccgtggccggggagagcgtggagggcctgggccacgaggagaccgtgagccgcatccagggccagggcagctgtgtgtccctgactgtggtggaccctgaggccgaccgcttcttctccatggtgcggctgagccccctgctcttcctggagaacacagaggccccagccagcccccggggcagcagcagcgccagcctggtggagacagaggaccccagcctggaggacacctctgtgcccagcgtgcccctgggcagccggcagtgcttcctgtacccaggccctgggggcagctatggcttccggctgagctgtgtggccagcggccccaggctcttcatcagccaggtgacccctgggggcagcgctgcccgggccggcctgcaggtgggagatgtgatcctggaggtgaatggctaccctgtgggcggccagaatgacctggagcggctgcagcagctgcctgaggccgagccccccctgtgcctgaagctggccgcccggagcctgcggggcctggaggcctggatccccccaggagctgctgaggactgggccctggccagtgacctgctgtag

SEQ ID NO: 163425 - DNA, 1518 bp, synthetic construct
  misc_feature 1..1518: note = Description of Artificial Sequence: Synthetic coding sequence
  source 1..1518: mol_type = other DNA
atggagaaggctgctgacctgcaggacacagccagcctgaccctgaagttcaagttcaaccccaagctgggcatcgacaaccctgtgctgagcctggccgaggaccatgacccctatgacccctggagcctggagcggccccgcttctgcctgctgagcaaggaggagggcaagagctttggcttccacctgcagcaggagctgggccgggccggccacgtggtgtgccgggtggaccccggcaccagcgcccagaggcagggcctgcaggagggggaccgcatcctggccgtgaacaatgatgtggtggagcacgaggactatgctgtggtggtgcggcgcatccgggccagcagcccccgggtgctgctgactgtgctggcccggcatgcccatgatgtggcccgggcccagctgggagaagatgcccacctgtgccccaccctgggccctggggtgcggccccggctgtgccacatcgtgaaggatgaaggaggcttcggcttctctgtgacccacggcaaccagggccccttctggctggtgctgagcactggaggagctgctgagcgggccggcgtgcccccaggggcccggctgctggaggtgaatggagtgtctgtggagaagttcacccacaaccagctgaccaggaagctgtggcagagcggccagcaggtgaccctgctggtggccggccctgaggtggaggagcagtgccggcagctgggcctgcccctggccgcccccctggccgagggctgggccctgcccaccaagccccgctgcctgcacctggagaagggcccccagggcttcggcttcctgctgcgggaggagaagggcctggatggccggcccggccagttcctgtgggaggtggaccccggcctgcctgccaagaaggccggcatgcaggccggggaccggctggtggccgtggccggggagagcgtggagggcctgggccacgaggagaccgtgagccgcatccagggccagggcagctgtgtgtccctgactgtggtggaccctgaggccgaccgcttcttctccatggtgcggctgagccccctgctcttcctggagaacacagaggccccagccagcccccggggcagcagcagcgccagcctggtggagacagaggaccccagcctggaggacacctctgtgcccagcgtgcccctgggcagccggcagtgcttcctgtacccaggccctgggggcagctatggcttccggctgagctgtgtggccagcggccccaggctcttcatcagccaggtgacccctgggggcagcgctgcccgggccggcctgcaggtgggagatgtgatcctggaggtgaatggctaccctgtgggcggccagaatgacctggagcggctgcagcagctgcctgaggccgagccccccctgtgcctgaagctggccgcccggagcctgcggggcctggaggcctggatccccccaggagctgctgaggactgggccctggccagtgacctgctgtag

SEQ ID NO: 163426 - DNA, 1716 bp, synthetic construct
  misc_feature 1..1716: note = Description of Artificial Sequence: Synthetic coding sequence
  source 1..1716: mol_type = other DNA
atggtgacccccagccccccaggcaaccacagcctgagcctggaggccccccggctgcacacagccagtgacctgctgggcaaccacagcctgggcctgcccctcatcacagccctggtgggcagccgggacagaagaggccgggtcttcagccctgtgcctgtgcccctgcccaccaaccccaccacccagcaccccacccggcagaagctgcccagcaccctgagcggccaccgggtgtgccaggcccacggggagcctgtgctgggcctgtgccccctgctgcccctcttctgctgccccccccaccccccagacccctggagcctggagcggccccgcttctgcctgctgagcaaggaggagggcaagagctttggcttccacctgcagcaggagctgggccgggccggccacgtggtgtgccgggtggaccccggcaccagcgcccagaggcagggcctgcaggagggggaccgcatcctggccgtgaacaatgatgtggtggagcacgaggactatgctgtggtggtgcggcgcatccgggccagcagcccccgggtgctgctgactgtgctggcccggcatgcccatgatgtggcccgggcccagctgggagaagatgcccacctgtgccccaccctgggccctggggtgcggccccggctgtgccacatcgtgaaggatgaaggaggcttcggcttctctgtgacccacggcaaccagggccccttctggctggtgctgagcactggaggagctgctgagcgggccggcgtgcccccaggggcccggctgctggaggtgaatggagtgtctgtggagaagttcacccacaaccagctgaccaggaagctgtggcagagcggccagcaggtgaccctgctggtggccggccctgaggtggaggagcagtgccggcagctgggcctgcccctggccgcccccctggccgagggctgggccctgcccaccaagccccgctgcctgcacctggagaagggcccccagggcttcggcttcctgctgcgggaggagaagggcctggatggccggcccggccagttcctgtgggaggtggaccccggcctgcctgccaagaaggccggcatgcaggccggggaccggctggtggccgtggccggggagagcgtggagggcctgggccacgaggagaccgtgagccgcatccagggccagggcagctgtgtgtccctgactgtggtggaccctgaggccgaccgcttcttctccatggtgcggctgagccccctgctcttcctggagaacacagaggccccagccagcccccggggcagcagcagcgccagcctggtggagacagaggaccccagcctggaggacacctctgtgcccagcgtgcccctgggcagccggcagtgcttcctgtacccaggccctgggggcagctatggcttccggctgagctgtgtggccagcggccccaggctcttcatcagccaggtgacccctgggggcagcgctgcccgggccggcctgcaggtgggagatgtgatcctggaggtgaatggctaccctgtgggcggccagaatgacctggagcggctgcagcagctgcctgaggccgagccccccctgtgcctgaagctggccgcccggagcctgcggggcctggaggcctggatccccccaggagctgctgaggactgggccctggccagtgacctgctgtag

SEQ ID NO: 163427 - DNA, 1518 bp, synthetic construct
  misc_feature 1..1518: note = Description of Artificial Sequence: Synthetic coding sequence
  source 1..1518: mol_type = other DNA
atggaggaggccctggacctgcaggacacagccagcctgaccctgaagttcaagttcaaccccaagctgggcatcgacaaccctgtgctgagcctggccgaggaccatgacccctatgacccctggagcctggagcggccccgcttctgcctgctgagcaaggaggagggcaagagctttggcttccacctgcagcaggagctgggccgggccggccacgtggtgtgccgggtggaccccggcaccagcgcccagaggcagggcctgcaggagggggaccgcatcctggccgtgaacaatgatgtggtggagcacgaggactatgctgtggtggtgcggcgcatccgggccagcagcccccgggtgctgctgactgtgctggcccggcatgcccatgatgtggcccgggcccagctgggagaagatgcccacctgtgccccaccctgggccctggggtgcggccccggctgtgccacatcgtgaaggatgaaggaggcttcggcttctctgtgacccacggcaaccagggccccttctggctggtgctgagcactggaggagctgctgagcgggccggcgtgcccccaggggcccggctgctggaggtgaatggagtgtctgtggagaagttcacccacaaccagctgaccaggaagctgtggcagagcggccagcaggtgaccctgctggtggccggccctgaggtggaggagcagtgccggcagctgggcctgcccctggccgcccccctggccgagggctgggccctgcccaccaagccccgctgcctgcacctggagaagggcccccagggcttcggcttcctgctgcgggaggagaagggcctggatggccggcccggccagttcctgtgggaggtggaccccggcctgcctgccaagaaggccggcatgcaggccggggaccggctggtggccgtggccggggagagcgtggagggcctgggccacgaggagaccgtgagccgcatccagggccagggcagctgtgtgtccctgactgtggtggaccctgaggccgaccgcttcttctccatggtgcggctgagccccctgctcttcctggagaacacagaggccccagccagcccccggggcagcagcagcgccagcctggtggagacagaggaccccagcctggaggacacctctgtgcccagcgtgcccctgggcagccggcagtgcttcctgtacccaggccctgggggcagctatggcttccggctgagctgtgtggccagcggccccaggctcttcatcagccaggtgacccctgggggcagcgctgcccgggccggcctgcaggtgggagatgtgatcctggaggtgaatggctaccctgtgggcggccagaatgacctggagcggctgcagcagctgcctgaggccgagccccccctgtgcctgaagctggccgcccggagcctgcggggcctggaggcctggatccccccaggagctgctgaggactgggccctggccagtgacctgctgtag

SEQ ID NO: 163428 - DNA, 1716 bp, synthetic construct; identical to SEQ ID NO: 163426
  misc_feature 1..1716: note = Description of Artificial Sequence: Synthetic coding sequence
  source 1..1716: mol_type = other DNA

SEQ ID NO: 163429 - DNA, 2310 bp, synthetic construct
  misc_feature 1..2310: note = Description of Artificial Sequence: Synthetic coding sequence
  source 1..2310: mol_type = other DNA
atgggctgcaacatgtgtgtggtgcagaagccagaggagcagtacaaggtgatgctgcaggtgaatggcaaggagctgagcaagctgagccaggagcagaccctgcaggccctgcggagcagcaaggagcccctggtgatccaggtgctgcggcgcagcccccggctgcggggggacagcagctgccacgacctgcagctggtggacagcggcacccagacagacatcacctttgagcacatcatggccctgggcaagctgcggccccccaccccacccatggtgatcctggagcccccacccatcagccatgagtactatgaccctgctgagttcatggagggcggcccccaggaggccgaccggctggatgagctggagtatgaggaggtggagctgtacaagagcagccaccgggacaagctgggcctgatggtgtgctacagaacagatgatgaggaggacctgggcatctacgtgggggaggtgaaccccaacagcattgctgccaaggatggccgcatccgggagggggaccgcatcatccagatcaatggagtggatgtgcagaaccgggaggaggccgtggccatcctgagccaggaggagaacaccaacatcagcctgctggtggcccggcctgagagccagctggccaagcgctggaaggacagcgacagagatgacttcctggatgactttggaagtgaaaatgaaggagagctgcgggccaggaagctgaagagccccccagcccagcagcctggaaatgaggaggagaagggggccccagatgctggccctggcctgagcaacagccaggagctggacagcggcgtgggccgcacagatgagagcaccagaaatgaggagagcagcgagcatgacctgctgggagatgagccccccagcagcaccaacaccccaggcagcctgaggaagtttggcctgcagggagatgccctgcagagccgggacttccacttctccatggacagcctgctggccgagggcgccggcctgggcggcggagatgtgcccggcctgacagatgaggagtatgaaagataccgggagctgctggagatcaagtgccacctggagaatggaaaccagctgggcctgctcttcccccgggccagcggcggcaacagcgccctggatgtgaacagaaatgaaagcctgggccacgagatggccatgctggaggaggagctgcggcacctggagttcaagtgcaggaacatcctgcgggcccagaagatgcagcagctgcgggagcgctgcatgaaggcctggctgctggaggaggagagcctgtatgacctggccgccagcgagcccaagaagcatgagctgagtgacatcagcgagctgcctgagaagagtgacaaggacagcaccagcgcctacaacacaggagagagctgccgcagcacccccctgctggtggagcccctgcctgagagccccctgcggcgggccatggccggcaacagcaacctgaacagaacacctcctggccctgctgtggccaccccagccaaggccgcccctcctcctggcagccctgccaagttccgcagcctgagccgggaccctgaggccggccggcggcagcacgccgaggagcggggcagaagaaaccccaagacaggcctgaccctggagcgggtgggccctgagagcagcccctacctgagcagaagacaccggggccagggccaggagggggagcactaccacagctgtgtgcagctggcccccacccggggcctggaggagctgggccacggccccctgagcctggccggcggcccccgggtgggcggcgtggccgctgctgccacagaggcccccaggatggagtggaaggtgaaggtgcggagtgatggcaccaggtatgtggccaagaggcctgtgcgggaccggctgctgaaggcccgggccctgaagatccgggaggagaggagcggcatgaccacagatgatgatgctgtgtctgagatgaagatgggccgctactggagcaaggaggagaggaagcagcacctgatccgggcccgggagcagaggaagaggcgggagttcatgatgcagagccggctggagtgcctgcgggagcagcagaatggagacagcaagccagagctgaacatcatcgccctgagccacaggaagaccatgaagaagaggaacaagaagatcctggacaactggatcaccatccaggagatgctggcccatggagcccggtctgcagatggcaagagggtgtacaaccccctgctgtctgtgaccaccgtgtag

SEQ ID NO: 163430 - DNA, 2085 bp, synthetic construct
  misc_feature 1..2085: note = Description of Artificial Sequence: Synthetic coding sequence
  source 1..2085: mol_type = other DNA
atggccctgggcaagctgcggccccccaccccacccatggtgatcctggagccctacgtgctgtctgagctgccccccatcagccatgagtactatgaccctgctgagttcatggagggcggcccccaggaggccgaccggctggatgagctggagtatgaggaggtggagctgtacaagagcagccaccgggacaagctgggcctgatggtgtgctacagaacagatgatgaggaggacctgggcatctacgtgggggaggtgaaccccaacagcattgctgccaaggatggccgcatccgggagggggaccgcatcatccagatcaacggggtggatgtgcagaaccgggaggaggccgtggccatcctgagccaggaggagaacaccaacatcagcctgctggtggcccggcctgagagccagctggccaagcgctggaaggacagcgacagagatgacttcctggatgactttggaagtgaaaatgaaggagagctgcgggccaggaagctgaagagccccccagcccagcagcctggaaatgaggaggagaagggggccccagatgctggccctggcctgagcaacagccaggagctggacagcggcgtgggccgcacagatgagagcaccagaaatgaggagagcagcgagcatgacctgctgggagatgagccccccagcagcaccaacaccccaggcagcctgaggaagtttggcctgcagggagatgccctgcagagccgggacttccacttctccatggacagcctgctggccgagggcgccggcctgggcggcggagatgtgcccggcctgacagatgaggagtatgagcgctaccgggagctgctggagatcaagtgccacctggagaatggaaaccagctgggcctgctcttcccccgggccagcggcggcaacagcgccctggatgtgaacagaaatgaaagcctgggccacgagatggccatgctggaggaggagctgcggcacctggagttcaagtgcaggaacatcctgcgggcccagaagatgcagcagctgcgggagcgctgcatgaaggcctggctgctggaggaggagagcctgtatgacctggccgccagcgagcccaagaagcatgagctgagtgacatcagcgagctgcctgagaagagtgacaaggacagcaccagcgcctacaacacaggagagagctgccgcagcacccccctgctggtggagcccctgcctgagagccccctgcggcgggccatggccggcaacagcaacctgaacagaacacctcctggccctgctgtggccaccccagccaaggccgcccctcctcctggcagccctgccaagttccgcagcctgagccgggaccctgaggccggccggcggcagcacgccgaggagcggggcagaagaaaccccaagacaggcctgaccctggagcgggtgggccctgagagcagcccctacctgagccgccgccaccggggccagggccaggagggggagcactaccacagctgtgtgcagctggcccccacccggggcctggaggagctgggccacggccccctgagcctggccggcggcccccgggtgggcggcgtggccgccgccgccacagaggcccccaggatggagtggaaggtgaaggtgcggagtgatggcacccgctacgtggccaagaggcctgtgcgggaccggctgctgaaggcccgggccctgaagatccgggaggagaggagcggcatgaccacagatgatgatgctgtgtctgagatgaagatgggccgctactggagcaaggaggagaggaagcagcacctgatccgggcccgggagcagaggaagagaagagagttcatgatgcagagccggctggagtgcctgcgggagcagcagaatggagacagcaagccagagctgaacatcatcgccctgagccacaggaagaccatgaagaagaggaacaagaagatcctggacaactggatcaccatccaggagatgctggcccacggggcccggtctgcagatggcaagagggtgtacaaccccctgctgtctgtgaccaccgtgtag

SEQ ID NO: 163431 - DNA, 2022 bp, synthetic construct
  misc_feature 1..2022: note = Description of Artificial Sequence: Synthetic coding sequence
  source 1..2022: mol_type = other DNA
atgacagccccacccatcagccatgagtactatgaccctgctgagttcatggagggcggcccccaggaggccgaccggctggatgagctggagtatgaggaggtggagctgtacaagagcagccaccgggacaagctgggcctgatggtgtgctacagaacagatgatgaggaggacctgggcatctacgtgggggaggtgaaccccaacagcattgctgccaaggatggccgcatccgggagggggaccgcatcatccagatcaatggagtggatgtgcagaaccgggaggaggccgtggccatcctgagccaggaggagaacaccaacatcagcctgctggtggcccggcctgagagccagctggccaagcgctggaaggacagcgacagagatgacttcctggatgactttggaagtgaaaatgaaggagagctgcgggccaggaagctgaagagccccccagcccagcagcctggaaatgaggaggagaagggggccccagatgctggccctggcctgagcaacagccaggagctggacagcggcgtgggccgcacagatgagagcaccagaaatgaggagagcagcgagcatgacctgctgggagatgagccccccagcagcaccaacaccccaggcagcctgaggaagtttggcctgcagggagatgccctgcagagccgggacttccacttctccatggacagcctgctggccgagggcgccggcctgggcggcggagatgtgcccggcctgacagatgaggagtatgaaagataccgggagctgctggagatcaagtgccacctggagaatggaaaccagctgggcctgctcttcccccgggccagcggcggcaacagcgccctggatgtgaacagaaatgaaagcctgggccacgagatggccatgctggaggaggagctgcggcacctggagttcaagtgcaggaacatcctgcgggcccagaagatgcagcagctgcgggagcgctgcatgaaggcctggctgctggaggaggagagcctgtatgacctggccgccagcgagcccaagaagcatgagctgagtgacatcagcgagctgcctgagaagagtgacaaggacagcaccagcgcctacaacacaggagagagctgccgcagcacccccctgctggtggagcccctgcctgagagccccctgcggcgggccatggccggcaacagcaacctgaacagaacacctcctggccctgctgtggccaccccagccaaggccgcccctcctcctggcagccctgccaagttccgcagcctgagccgggaccctgaggccggccggcggcagcacgccgaggagcggggcagaagaaaccccaagacaggcctgaccctggagcgggtgggccctgagagcagcccctacctgagcagaagacaccggggccagggccaggagggggagcactaccacagctgtgtgcagctggcccccacccggggcctggaggagctgggccacggccccctgagcctggccggcggcccccgggtgggcggcgtggccgctgctgccacagaggcccccaggatggagtggaaggtgaaggtgcggagtgatggcaccaggtatgtggccaagaggcctgtgcgggaccggctgctgaaggcccgggccctgaagatccgggaggagaggagcggcatgaccacagatgatgatgctgtgtctgagatgaagatgggccgctactggagcaaggaggagaggaagcagcacctgatccgggcccgggagcagaggaagaggcgggagttcatgatgcagagccggctggagtgcctgcgggagcagcagaatggagacagcaagccagagctgaacatcatcgccctgagccacaggaagaccatgaagaagaggaacaagaagatcctggacaactggatcaccatccaggagatgctggcccatggagcccggtctgcagatggcaagagggtgtacaaccccctgctgtctgtgaccaccgtgtag

SEQ ID NO: 163432 - DNA, 1983 bp, synthetic construct
  misc_feature 1..1983: note = Description of Artificial Sequence: Synthetic coding sequence
  source 1..1983: mol_type = other DNA
atgggctgcaacatgtgtgtggtgcagaagccagaggagcagtacaaggtgatgctgcaggaggtggagctgtacaagagcagccaccgggacaagctgggcctgatggtgtgctacagaacagatgatgaggaggacctgggcatctacgtgggggaggtgaaccccaacagcattgctgccaaggatggccgcatccgggagggggaccgcatcatccagatcaacggggtggatgtgcagaaccgggaggaggccgtggccatcctgagccaggaggagaacaccaacatcagcctgctggtggcccggcctgagagccagctggccaagcgctggaaggacagcgacagagatgacttcctggatgactttggaagtgaaaatgaaggagagctgcgggccaggaagctgaagagccccccagcccagcagcctggaaatgaggaggagaagggggccccagatgctggccctggcctgagcaacagccaggagctggacagcggcgtgggccgcacagatgagagcaccagaaatgaggagagcagcgagcatgacctgctgggagatgagccccccagcagcaccaacaccccaggcagcctgaggaagtttggcctgcagggagatgccctgcagagccgggacttccacttctccatggacagcctgctggccgagggcgccggcctgggcggcggagatgtgcccggcctgacagatgaggagtatgagcgctaccgggagctgctggagatcaagtgccacctggagaatggaaaccagctgggcctgctcttcccccgggccagcggcggcaacagcgccctggatgtgaacagaaatgaaagcctgggccacgagatggccatgctggaggaggagctgcggcacctggagttcaagtgcaggaacatcctgcgggcccagaagatgcagcagctgcgggagcgctgcatgaaggcctggctgctggaggaggagagcctgtatgacctggccgccagcgagcccaagaagcatgagctgagtgacatcagcgagctgcctgagaagagtgacaaggacagcaccagcgcctacaacacaggagagagctgccgcagcacccccctgctggtggagcccctgcctgagagccccctgcggcgggccatggccggcaacagcaacctgaacagaacacctcctggccctgctgtggccaccccagccaaggccgcccctcctcctggcagccctgccaagttccgcagcctgagccgggaccctgaggccggccggcggcagcacgccgaggagcggggcagaagaaaccccaagacaggcctgaccctggagcgggtgggccctgagagcagcccctacctgagccgccgccaccggggccagggccaggagggggagcactaccacagctgtgtgcagctggcccccacccggggcctggaggagctgggccacggccccctgagcctggccggcggcccccgggtgggcggcgtggccgccgccgccacagaggcccccaggatggagtggaaggtgaaggtgcggagtgatggcacccgctacgtggccaagaggcctgtgcgggaccggctgctgaaggcccgggccctgaagatccgggaggagaggagcggcatgaccacagatgatgatgctgtgtctgagatgaagatgggccgctactggagcaaggaggagaggaagcagcacctgatccgggcccgggagcagaggaagagaagagagttcatgatgcagagccggctggagtgcctgcgggagcagcagaatggagacagcaagccagagctgaacatcatcgccctgagccacaggaagaccatgaagaagaggaacaagaagatcctggacaactggatcaccatccaggagatgctggcccacggggcccggtctgcagatggcaagagggtgtacaaccccctgctgtctgtgaccaccgtgtag

SEQ ID NO: 163433 - DNA, 1554 bp, synthetic construct
  misc_feature 1..1554: note = Description of Artificial Sequence: Synthetic coding sequence
  source 1..1554: mol_type = other DNA
atggcccagggctttgctgtgggctttgaccccctgggcctgggggacctgagcagcggcagcctgagcagcctgagcagccggggccacctgggcagtgacagcggcagcacagccacccgctacctgctgaggaagcagcagaggctgctgaatggccccccccggggcatccgggccagcagccccatgggccgggtcatcctgatcaacagccccatcgaggccaacagtgatgaaagtgacatcatccacagcgtgcgggtggagaagagccctgctggccgcctgggcttctctgtgcggggcggcagcgagcacggcctgggcatctttgtgtccaaggtggaggagggcagcagcgctgagagagctggcctgtgtgtgggggacaagatcacagaggtgaatggcctgagcctggagagcaccaccatgggcagcgctgtgaaggtgctgaccagcagcagccggctgcacatgatggtgcggaggatgggccgggtgcccggcatcaagttcagcaaggagaagaccacctgggtggatgtggtgaacagaaggctggtggtggagaagtgtggcagcacccccagcgacaccagcagtgaagatggagtgcggcgcatcgtgcacctgtacaccaccagtgatgacttctgcctgggcttcaacatccggggcggcaaggagtttggcctgggcatctacgtgtccaaggtggaccatggaggcctggccgaggagaatggcatcaaggtgggggaccaggtgctggccgccaacggggtgcgctttgatgacatcagccacagccaggccgtggaggtgctgaagggccagacccacatcatgctgaccatcaaggagaccggccgctacccagcctacaaggagatggtgtctgagtactgctggctggaccggctgagcaatggagtgctgcagcagctgagccctgccagcgagagcagcagctctgtgagcagctgtgccagcagcgccccctacagcagcggcagcctgcccagcgacaggatggacatctgcctgggccaggaggagcccggcagccggggccctggctggggccgggctgacacagccatgcagacagagccagatgctgggggccgggtggagacctggtgcagcgtgcggcccaccgtcatcctgcgggacacagccatccgcagtgatggcccccaccctggccggcggctggacagcgccctgtctgagagccccaagacagccctgctgctggccctgagccggcccaggcctcccatcaccaggagccagagctacctgaccctgtgggaggagaagcagcagaggaagaaggagaagagcggcagccctggagagaagggggccctgcagaggagcaagaccctgatgaacctcttcttcaagggcggccggcagggccgcctggccagagatggaagaagagaggcctggaccctggacagcggcagcctggccaagacctacccccggctggacatcgagaaggagatgggcgtgagcccctgctgccccggctag

SEQ ID NO: 163434 - DNA, 3102 bp, synthetic construct
  misc_feature 1..3102: note = Description of Artificial Sequence: Synthetic coding sequence
  source 1..3102: mol_type = other DNA
atggcccagggctttgctgtgggctttgaccccctgggcctgggggacctgagcagcggcagcctgagcagcctgagcagccggggccacctgggcagtgacagcggcagcacagccacccgctacctgctgaggaagcagcagaggctgctgaatggccccccccggggcatccgggccagcagccccatgggccgggtcatcctgatcaacagccccatcgaggccaacagtgatgaaagtgacatcatccacagcgtgcgggtggagaagagccctgctggccgcctgggcttctctgtgcggggcggcagcgagcacggcctgggcatctttgtgtccaaggtggaggagggcagcagcgctgagagagctggcctgtgtgtgggggacaagatcacagaggtgaatggcctgagcctggagagcaccaccatgggcagcgctgtgaaggtgctgaccagcagcagccggctgcacatgatggtgcggaggatgggccgggtgcccggcatcaagttcagcaaggagaagaccacctgggtggatgtggtgaacagaaggctggtggtggagaagtgtggcagcacccccagcgacaccagcagtgaagatggagtgcggcgcatcgtgcacctgtacaccaccagtgatgacttctgcctgggcttcaacatccggggcggcaaggagtttggcctgggcatctacgtgtccaaggtggaccatggaggcctggccgaggagaatggcatcaaggtgggggaccaggtgctggccgccaacggggtgcgctttgatgacatcagccacagccaggccgtggaggtgctgaagggccagacccacatcatgctgaccatcaaggagaccggccgctacccagcctacaaggagatggtgtctgagtactgctggctggaccggctgagcaatggagtgctgcagcagctgagccctgccagcgagagcagcagctctgtgagcagctgtgccagcagcgccccctacagcagcggcagcctgcccagcgacaggatggacatctgcctgggccaggaggagcccggcagccggggccctggctggggccgggctgacacagccatgcagacagagccagatgctgggggccgggtggagacctggtgcagcgtgcggcccaccgtcatcctgcgggacacagccatccgcagtgatggcccccaccctggccggcggctggacagcgccctgtctgagagccccaagacagccctgctgctggccctgagccggcccaggcctcccatcaccaggagccagagctacctgaccctgtgggaggagaagcagcagaggaagaaggagaagagcggcagccctggagagaagggggccctgcagaggagcaagaccctgatgaacctcttcttcaagggcggccggcagggccgcctggccagagatggaagaagagaggcctggaccctggacagcggcagcctggccaagacctacccccggctggacatcgagaaggccggcggcgtgggccctgtgcagaagtttgtgacctggaggctgcggcgggaccaggagcggggccgggccctgctgagcgcccggagcggcagccccagcagccagctgcccaacgtggatgagcaggtgcaggcctgggagagcagaagacccctcatccaggacctggcccagaggctgctgacagatgatgaggtgctggccgtgaccaggcactgcagccgctacgtgcatgagggcggcatcgaggacctggtgcggcccctgctggccatcctggacaggcctgagaagctgctgctgctgcaggacatccgctctgtggtggcccccacagacctgggccgctttgacagcatggtgatgctggtggagctggaggcctttgaggccctgaagagcagagctgtgcggcccccagccctgcggcctgcccggcaggacaccccacccaagaggcacctgatcacccctgtgcctgacagccggggcggcttctacctgctgcctgtgaatggcttccctgaggaggaggacaacggggagctgcgggagcggctgggcgccctgaaggtgagccccagcgccagcgcccccaggcacccccacaagggcatcccccccctgcaggatgtgcctgtggatgccttcacccccctgcgcatcgcctgcaccccaccaccccagctgccccctgtggccccccggcccctgcggcccaactggctgctgacagagcccctgagccgggagcaccccccccagagccagatccggggccgggcccagagccgcagccgcagccgcagccgcagccgcagccgcagcagccggggccagggcaagagccctggccgccgcagccccagccctgtgcccaccccagcccccagcatgaccaacggccgctaccacaagcccaggaaggcccggccccccctgccccggcccctggatggagaggccgccaaggtgggcgccaagcagggccccagcgagagcggcacagagggcacagccaaggaggccgccatgaagaaccccagcggggagctgaagacagtgaccctgagcaagatgaagcagagcctgggcatcagcatcagcggcggcatcgagagcaaggtgcagcccatggtgaagattgagaagatcttccctggaggagctgccttcctgagcggggccctgcaggccggctttgagctggtggccgtggatggagagaacctggagcaggtgacccaccagagagctgtggacaccatccggcgggcctacagaaacaaggcccgggagcccatggagctggtggtgcgggtgcccggccccagcccccggcccagccccagcgacagcagcgccctgacagatggcggcctgcctgctgaccacctgcctgcccaccagcccctggatgctgcccctgtgcctgcccactggctgcctgagccccccaccaacccccagaccccacccacagatgcccggctgctgcagcccacccccagccctgcccccagccctgccctgcagaccccagacagcaagccagcccccagcccccgcatcccctag

SEQ ID NO: 163435 - DNA, 627 bp, synthetic construct
  misc_feature 1..627: note = Description of Artificial Sequence: Synthetic coding sequence
  source 1..627: mol_type = other DNA
tgaccccggccccccatcaccaggagccagagctacctgaccctgtgggaggagaagcagcagaggaagaaggagaagagcggcagccctggagagaagggggccctgcagaggagcaagaccctgatgaacctcttcttcaagggcggccggcagggccgcctggccagagatggccggcgggaggcctggaccctggacagcggcagcctggccaagacctacccccggctggacatcgagaaggccggcggcgtgggccctgtgcagaagtttgtgacctggaggctgcggcgggaccaggagcggggccgggccctgctgagcgcccggagcggcagccccagcagccagctgcccaacgtggatgagcaggtgcaggcctgggagagccggcggcccctcatccaggacctggcccagaggctgctgacagatgatgaggtgctggccgtgaccaggcactgcagccgctacgtgcatgaaggaggcatcgaggacctggtgcggcccctgctggccatcctggacaggcctgagaagctgctgctgctgcaggacatccgctctgtggtggcccccacagacctgggccgctttgacagcatggtgatgctggtggagtag

SEQ ID NO: 163436 - DNA, 3465 bp, synthetic construct
  misc_feature 1..3465: note = Description of Artificial Sequence: Synthetic coding sequence
  source 1..3465: mol_type = other DNA
atgggcctgctgctgatgatcctggccagcgctgtgctgggcagcttcctgaccctgctggcccagttcttcctgctgtaccgccggcagcctgagcccccagcagatgaggccgcccgggccggggagggcttccgctacatcaagcctgtgcccggcctgctgctgcgggagtacctgtatggaggcggcagagatgaggagcccagcggggccgcccctgagggcggggccacccccacagctgcccctgagaccccagccccacccacccgggagacctgctacttcctgaatgccaccatcctcttcctgttccgggagctgcgggacacagccctgacccggcgctgggtgaccaagaagatcaaggtggagtttgaggagctgctgcagaccaagacagctggccgcctgctggagggcctgagcctgagagatgtgttcctgggggagaccgtgcccttcatcaagaccatccggctggtgcggcctgtggtgcccagcgccactggagagccagatggccctgagggggaggccctgcctgctgcctgcccagaggagctggcctttgaggccgaggtggagtacaatggaggcttccacctggccattgatgtggacctggtgtttgggaagagcgcctacctgtttgtgaagctgagccgggtggtgggccgcctgcggctggtgttcaccagggtgcccttcacccactggttcttctcctttgtggaggaccccctgattgactttgaggtgcgcagccagtttgagggccggcccatgccccagctgaccagcatcatcgtgaaccagctgaagaagatcatcaagaggaagcacaccctgcccaactacaagatccgcttcaagcccttcttcccctaccagaccctgcagggctttgaggaggatgaggagcacatccacatccagcagtgggccctgacagagggccgcctgaaggtgaccctgctggagtgcagccggctgctgatcttcggcagctatgaccgggaggccaacgtgcactgcaccctggagctgagcagctctgtgtgggaggagaagcagaggagcagcatcaagacagtggagctgatcaagggcaacctgcagagcgtgggcctgaccctgcggctggtgcagagcacagatggctacgccggccacgtgatcatcgagaccgtggcccccaacagccctgctgccatcgctgacctgcagagaggagaccggctgattgccatcggcggcgtgaagatcaccagcaccctgcaggtgctgaagctgatcaagcaggccggggacagagtgctggtgtactatgaaagacctgtgggccagagcaaccagggcgctgtgctgcaggacaactttggccagctggaggagaacttcctgagcagcagctgccagagcggctatgaggaggaggccgccggcctgactgtggacacagagagccgggagctggacagcgagtttgaggacctggccagtgatgtgcgggcccagaatgagttcaaggatgaggcccagagcctgagccacagccccaagagggtgcccaccaccctgagcatcaagcccctgggcgccatcagccctgtgctgaacaggaagctggccgtgggcagccaccccctgccccccaagatccagagcaaggatggcaacaagcccccacccctgaagaccagcgagatcacagatcctgcccaggtgtccaagcccacccagggcagcgccttcaagccccctgtgcccccccggccccaggccaaggtgcccctgcccagcgcagatgcccccaaccaggccgagccagatgtgctggtggagaagccagagaaggtggtgcccccacccctggtggacaagtctgctgagaagcaggccaagaatgtggatgccattgatgatgctgctgcccccaagcagttcctggccaagcaggaggtggccaaggatgtgaccagcgagaccagctgccccaccaaggacagcagtgatgaccggcagacctgggagagcagcgagatcctgtacagaaacaagctgggcaagtggaccaggacccgggccagctgcctgtttgacatcgaggcctgccaccgctacctgaacatcgccctgtggtgccgggaccccttcaagctgggcggcctcatctgcctgggccacgtgtccctgaagctggaggatgtggccctgggctgcctggccaccagcaacacagagtacctgagcaagctgcggctggaggcccccagccccaaggccatcgtgaccaggacagccctgaggaacctgtccatgcagaagggcttcaatgacaagttctgctacggggacatcaccatccacttcaagtacctgaaggagggggagagtgaccaccacgtggtgaccaacgtggagaaggagaaggagccccacctggtggaggaggtgtctgtgctgcccaaggaggagcagtttgtgggccagatgggcctgacagagaacaagcacagcttccaggacacccagttccagaaccccacctggtgtgactactgcaagaagaaggtgtggaccaaggccgccagccagtgcatgttctgtgcctacgtgtgccacaagaagtgccaggagaagtgcctggccgagacctctgtgtgtggggccacagacagaagaattgacaggaccctgaagaacctgcggctggagggccaggagaccctgctgggcctgcccccccgggtggatgctgaggccagcaagtctgtgaacaagaccaccggcctgaccaggcacatcatcaacaccagcagccggctgctgaacctgcggcaggtgtccaagacccggctgtctgagcctggaacagacctggtggagcccagccccaagcacacccccaacaccagtgacaatgaaggaagtgacacagaggtgtgtggccccaacagccccagcaagaggggcaacagcacaggcatcaagctggtgaggaaggagggcggcctggatgattctgtgttcatcgctgtgaaggagatcggccgggacctgtaccggggcctgcccacagaggagcgcatccagaagctggagttcatgctggacaagctgcagaatgaaattgaccaggagctggagcacaacaacagcctggtgcgggaggagaaggagaccacagacaccaggaagaagagcctgctgtctgctgccctggccaagagcggggagcggctgcaggccctgaccctgctgatgatccactaccgggccggcattgaagatattgagaccctggagagcctgagcctggaccagcacagcaagaagatcagcaagtacacagatgacacagaggaggacctggacaatgagatcagccagctgattgacagccagcccttcagcagcatcagtgatgacctgtttggccccagcgagagcgtgtag

SEQ ID NO: 163437 - DNA, 3201 bp, synthetic construct
  misc_feature 1..3201: note = Description of Artificial Sequence: Synthetic coding sequence
  source 1..3201: mol_type = other DNA
atgggctttgagctggacagatttgatggagatgtggaccctgacctgaagtgtgccctgtgccacaaggtgctggaggaccccctgaccaccccctgtggccacgtgttctgtgccggctgtgtgctgccctgggtggtgcaggagggcagctgcccagcccgctgccggggccgcctgagcgccaaggagctgaaccacgtgctgcccctgaagaggctcatcctgaagctggacatcaagtgtgcctatgccacccggggctgcggccgggtggtgaagctgcagcagctgcctgagcacctggagcgctgtgactttgccccagcccgctgcagacatgctggctgcggccaggtgctgctgcggagagatgtggaggcccacatgagagatgcctgtgatgcccggcctgtgggccgctgccaggagggctgcggcctgcccctgacccacggggagcagagagctgggggccactgctgtgcccgggccctgcgggcccacaacggggccctgcaggcccggctgggcgccctgcacaaggccctgaagaaggaggccctgcgggccggcaagcgggagaagagcctggtggcccagctggccgccgcccagctggagctgcagatgacagccctgcgctaccagaagaagttcacagagtacagcgcccggctggacagcctgagccgctgtgtggccgcccctcctgggggcaaaggagaggagaccaagagcctgaccctggtgctgcaccgggacagcggcagcctgggcttcaacatcatcggcggccggcccagcgtggacaaccatgatggcagcagcagcgagggcatctttgtgtccaagatcgtggacagcggccctgctgccaaggagggcggcctgcagatccatgaccgcatcatcgaggtgaatggccgggacctgagccgggccacccatgaccaggccgtggaggccttcaagacagccaaggagcccatcgtggtgcaggtgctgcggaggacccccaggaccaagatgttcaccccaccttctgagagccagctggtggacaccggcacccagacagacatcacctttgagcacatcatggccctgaccaagatgagcagccccagcccccctgtgctggacccctacctgctgcctgaggagcaccccagcgcccacgagtactatgaccccaatgactacatcggggacatccaccaggagatggaccgggaggagctggagctggaggaggtggacctgtacaggatgaacagccaggacaagctgggcctgactgtgtgctacagaacagatgatgaagatgacatcggcatctacatcagcgagattgaccccaacagcattgctgccaaggatggccgcatccgggagggggaccgcatcatccagatcaatggcatcgaggtgcagaaccgggaggaggccgtggccctgctgaccagcgaggagaacaagaacttcagcctgctgattgcccggcctgagctgcagctggatgagggctggatggatgatgacagaaatgacttcctggatgacctgcacatggacatgctggaggagcagcaccaccaggccatgcagttcaccgcctctgtgctgcagcagaagaagcatgatgaagatggcggcaccacagacacagccaccatcctgagcaaccagcacgagaaggacagcggcgtgggccgcacagatgagagcaccagaaatgatgagagcagcgagcaggagaacaatggagatgatgccacagccagcagcaaccccctggccggccagaggaagctgacctgcagccaggacaccctgggcagcggggacctgcccttcagcaatgaaagcttcatctctgctgactgcacagatgctgactacctgggcatccctgtggatgaatgtgagcgcttccgggagctgctggagctgaagtgccaggtgaagagcgccaccccctacggcctgtactaccccagcggccccctggatgctgggaagagtgaccctgagagcgtggacaaggagctggagctgctgaatgaggagctgcggagcattgagctggagtgcctgagcatcgtgcgggcccacaagatgcagcagctgaaggagcagtaccgggagagctggatgctgcacaacagcggcttcaggaactacaacaccagcattgatgtgagaagacatgagctgagtgacatcacagagctgcctgagaagagtgacaaggacagcagcagcgcctacaacacaggagagagctgccgcagcacccccctgaccctggagatcagcccagacaacagcctgcggcgggctgctgagggcatcagctgccccagcagcgagggcgctgtgggcaccacagaggcctacggccctgccagcaagaacctgctgagcatcacagaagatcctgaggtgggcacccccacctacagccccagcctgaaggagctggaccccaaccagcccctggagagcaaggagcggcgggccagtgatggcagccgcagccccacccccagccagaagctgggcagcgcctacctgcccagctaccaccacagcccctacaagcacgcccacatcccagcccacgcccagcactaccagagctacatgcagctgatccagcagaagtctgctgtggagtatgcccagagccagatgagcctggtgtccatgtgcaaggacctgagcagccccaccccatctgagcccaggatggagtggaaggtgaagatccgcagtgatggcacccgctacatcaccaagaggcctgtgcgggaccggctgctgcgggagcgggccctgaagatccgggaggagaggagcggcatgaccacagatgatgatgctgtgtctgagatgaagatgggccgctactggagcaaggaggagaggaagcagcacctggtgaaggccaaggagcagaggagaagaagagagttcatgatgcagagccggctggactgcctgaaggagcagcaggccgcagatgacaggaaggagatgaacatcctggagctgagccacaagaagatgatgaagaagaggaacaagaagatctttgacaactggatgaccatccaggagctgctgacccacggcaccaagagcccagatggcaccagggtgtacaacagcttcctgtctgtgaccaccgtgtag

SEQ ID NO: 163438 - DNA, 2190 bp, synthetic construct
  misc_feature 1..2190: note = Description of Artificial Sequence: Synthetic coding sequence
  source 1..2190: mol_type = other DNA
atgggctttgagctggacagatttgatggagatgtggaccctgacctgaagtgtgccctgtgccacaaggtgctggaggaccccctgaccaccccctgtggccacgtgttctgtgccggctgtgtgctgccctgggtggtgcaggagggcagctgcccagcccgctgccggggccgcctgagcgccaaggagctgaaccacgtgctgcccctgaagaggctcatcctgaagctggacatcaagtgtgcctatgccacccggggctgcggccgggtggtgaagctgcagcagctgcctgagcacctggagcgctgtgactttgccccagcccgctgcagacatgctggctgcggccaggtgctgctgcggagagatgtggaggcccacatgagagatgcctgtgatgcccggcctgtgggccgctgccaggagggctgcggcctgcccctgacccacggggagcagagagctgggggccactgctgtgcccgggccctgcgggcccacaacggggccctgcaggcccggctgggcgccctgcacaaggccctgaagaaggaggccctgcgggccggcaagcgggagaagagcctggtggcccagctggccgccgcccagctggagctgcagatgacagccctgcgctaccagaagaagttcacagagtacagcgcccggctggacagcctgagccgctgtgtggccgcccctcctgggggcaaaggagaggagaccaagagcctgaccctggtgctgcaccgggacagcggcagcctgggcttcaacatcatcggcggccggcccagcgtggacaaccatgatggcagcagcagcgagggcatctttgtgtccaagatcgtggacagcggccctgctgccaaggagggcggcctgcagatccatgaccgcatcatcgaggtgaatggccgggacctgagccgggccacccatgaccaggccgtggaggccttcaagacagccaaggagcccatcgtggtgcaggtgctgcggaggacccccaggaccaagatgttcaccccaccttctgagagccagctggtggacaccggcacccagacagacatcacctttgagcacatcatggccctgaccaagatgagcagccccagcccccctgtgctggacccctacctgctgcctgaggagcaccccagcgcccacgagtactatgaccccaatgactacatcggggacatccaccaggagatggaccgggaggagctggagctggaggaggtggacctgtacaggatgaacagccaggacaagctgggcctgactgtgtgctacagaacagatgatgaagatgacatcggcatctacatcagcgagattgaccccaacagcattgctgccaaggatggccgcatccgggagggggaccgcatcatccagatcaatggcatcgaggtgcagaaccgggaggaggccgtggccctgctgaccagcgaggagaacaagaacttcagcctgctgattgcccggcctgagctgcagctggatgagggctggatggatgatgacagaaatgacttcctggatgacctgcacatggacatgctggaggagcagcaccaccaggccatgcagttcaccgcctctgtgctgcagcagaagaagcatgatgaagatggcggcaccacagacacagccaccatcctgagcaaccagcacgagaaggacagcggcgtgggccgcacagatgagagcaccagaaatgatgagagcagcgagcaggagaacaatggagatgatgccacagccagcagcaaccccctggccggccagaggaagctgacctgcagccaggacaccctgggcagcggggacctgcccttcagcaatgaaagcttcatctctgctgactgcacagatgctgactacctgggcatccctgtggagggggaggacccccagaggagagatgccctgcaccaccaggaggcccgggccggccccccagctgctggggcccggcctgaggaccccggccgggcccagagacatgaccacagaagaagaagaggagagagagatgaagatggagccctgctggagcagggcggggaggaggccgcccctggagagggccagggcgctgctgctgctgcccgggtgcatgatgctgagcaggtgggcctgagccagggcgccgccagcagcaggtag

SEQ ID NO: 163439 - DNA, 2352 bp, synthetic construct
  misc_feature 1..2352: note = Description of Artificial Sequence: Synthetic coding sequence
  source 1..2352: mol_type = other DNA
atgggctgcagcctgtgcagcctgcagaagcaggaggagcagtacaagctgctgtatgaggtgtgccaggtgaatggccgggacctgagccgggccacccatgaccaggccgtggaggccttcaagacagccaaggagcccatcgtggtgcaggtgctgcggaggacccccaggaccaagatgttcaccccacccagcgagagccagctggtggacaccggcacccagacagacatcacctttgagcacatcatggccctgaccaagatgagcagccccagcccccctgtgctggacccctacctgctgcctgaggagcaccccagcgcccacgagtactatgaccccaatgactacatcggggacatccaccaggagatggaccgggaggagctggagctggaggaggtggacctgtacaggatgaacagccaggacaagctgggcctgactgtgtgctacagaacagatgatgaagatgacatcggcatctacatcagcgagattgaccccaacagcattgctgccaaggatggccgcatccgggagggggaccgcatcatccagatcaatggaattgaggtgcagaaccgggaggaggccgtggccctgctgaccagcgaggagaacaagaacttcagcctgctgattgcccggcctgagctgcagctggatgagggctggatggatgatgacagaaatgacttcctggatgacctgcacatggacatgctggaggagcagcaccaccaggccatgcagttcaccgcctctgtgctgcagcagaagaagcatgatgaagatggcggcaccacagacacagccaccatcctgagcaaccagcacgagaaggacagcggcgtgggccgcacagatgagagcaccagaaatgatgagagcagcgagcaggagaacaatggagatgatgccacagccagcagcaaccccctggccggccagaggaagctgacctgcagccaggacaccctgggcagcggggacctgcccttcagcaatgaaagcttcatctctgctgactgcacagatgctgactacctgggcatccctgtggatgaatgtgagcgcttccgggagctgctggagctgaagtgccaggtgaagagcgccaccccctacggcctgtactaccccagcggccccctggatgctgggaagagtgaccctgagagcgtggacaaggagctggagctgctgaatgaggagctgcggagcattgagctggagtgcctgagcatcgtgcgggcccacaagatgcagcagctgaaggagcagtaccgggagagctggatgctgcacaacagcggcttcaggaactacaacaccagcattgatgtgagaagacatgagctgagtgacatcacagagctgcctgagaagagtgacaaggacagcagcagcgcctacaacacaggagagagctgccgcagcacccccctgaccctggagatcagcccagacaacagcctgcggcgggctgctgagggcatcagctgccccagcagcgagggcgctgtgggcaccacagaggcctacggccctgccagcaagaacctgctgagcatcacagaggaccctgaggtgggcacccccacctacagccccagcctgaaggagctggaccccaaccagcccctggagagcaaggagcggcgggccagtgatggcagccgcagccccacccccagccagaagctgggcagcgcctacctgcccagctaccaccacagcccctacaagcacgcccacatcccagcccacgcccagcactaccagagctacatgcagctgatccagcagaagtctgctgtggagtatgcccagagccagatgagcctggtgtccatgtgcaaggacctgagcagccccacccccagcgagcccaggatggagtggaaggtgaagatccgcagtgatggcacccgctacatcaccaagaggcctgtgcgggaccggctgctgcgggagcgggccctgaagatccgggaggagaggagcggcatgaccacagatgatgatgctgtgtctgagatgaagatgggccgctactggagcaaggaggagaggaagcagcacctggtgaaggccaaggagcagaggagaagaagagagttcatgatgcagagccggctggactgcctgaaggagcagcaggccgcagatgacaggaaggagatgaacatcctggagctgagccacaagaagatgatgaagaagaggaacaagaagatctttgacaactggatgaccatccaggagctgctgacccacggcaccaagagcccagatggcaccagggtgtacaacagcttcctgtctgtgaccaccgtgtag

SEQ ID NO: 163440 - DNA, 2367 bp, synthetic construct
  misc_feature 1..2367: note = Description of Artificial Sequence: Synthetic coding sequence
  source 1..2367: mol_type = other DNA
atgaagatggagcacaagaggatgatcctgctcttcagcaagttcaccctcatccacaagccccacggcggccgctggtacctggtgaatggccgggacctgagccgggccacccatgaccaggccgtggaggccttcaagacagccaaggagcccatcgtggtgcaggtgctgcggaggacccccaggaccaagatgttcaccccaccttctgagagccagctggtggacaccggcacccagacagacatcacctttgagcacatcatggccctgaccaagatgagcagccccagcccccctgtgctggacccctacctgctgcctgaggagcaccccagcgcccacgagtactatgaccccaatgactacatcggggacatccaccaggagatggaccgggaggagctggagctggaggaggtggacctgtacaggatgaacagccaggacaagctgggcctgactgtgtgctacagaacagatgatgaagatgacatcggcatctacatcagcgagattgaccccaacagcattgctgccaaggatggccgcatccgggagggggaccgcatcatccagatcaatggcatcgaggtgcagaaccgggaggaggccgtggccctgctgaccagcgaggagaacaagaacttcagcctgctgattgcccggcctgagctgcagctggatgagggctggatggatgatgacagaaatgacttcctggatgacctgcacatggacatgctggaggagcagcaccaccaggccatgcagttcaccgcctctgtgctgcagcagaagaagcatgatgaagatggcggcaccacagacacagccaccatcctgagcaaccagcacgagaaggacagcggcgtgggccgcacagatgagagcaccagaaatgatgagagcagcgagcaggagaacaatggagatgatgccacagccagcagcaaccccctggccggccagaggaagctgacctgcagccaggacaccctgggcagcggggacctgcccttcagcaatgaaagcttcatctctgctgactgcacagatgctgactacctgggcatccctgtggatgaatgtgagcgcttccgggagctgctggagctgaagtgccaggtgaagagcgccaccccctacggcctgtactaccccagcggccccctggatgctgggaagagtgaccctgagagcgtggacaaggagctggagctgctgaatgaggagctgcggagcattgagctggagtgcctgagcatcgtgcgggcccacaagatgcagcagctgaaggagcagtaccgggagagctggatgctgcacaacagcggcttcaggaactacaacaccagcattgatgtgagaagacatgagctgagtgacatcacagagctgcctgagaagagtgacaaggacagcagcagcgcctacaacacaggagagagctgccgcagcacccccctgaccctggagatcagcccagacaacagcctgcggcgggctgctgagggcatcagctgccccagcagcgagggcgctgtgggcaccacagaggcctacggccctgccagcaagaacctgctgagcatcacagaagatcctgaggtgggcacccccacctacagccccagcctgaaggagctggaccccaaccagcccctggagagcaaggagcggcgggccagtgatggcagccgcagccccacccccagccagaagctgggcagcgcctacctgcccagctaccaccacagcccctacaagcacgcccacatcccagcccacgcccagcactaccagagctacatgcagctgatccagcagaagtctgctgtggagtatgcccagagccagatgagcctggtgtccatgtgcaaggacctgagcagccccaccccatctgagcccaggatggagtggaaggtgaagatccgcagtgatggcacccgctacatcaccaagaggcctgtgcgggaccggctgctgcgggagcgggccctgaagatccgggaggagaggagcggcatgaccacagatgatgatgctgtgtctgagatgaagatgggccgctactggagcaaggaggagaggaagcagcacctggtgaaggccaaggagcagaggagaagaagagagttcatgatgcagagccggctggactgcctgaaggagcagcaggccgcagatgacaggaaggagatgaacatcctggagctgagccacaagaagatgatgaagaagaggaacaagaagatctttgacaactggatgaccatccaggagctgctgacccacggcaccaagagcccagatggcaccagggtgtacaacagcttcctgtctgtgaccaccgtgtag

SEQ ID NO: 163441 - DNA, 2331 bp, synthetic construct
  misc_feature 1..2331: note = Description of Artificial Sequence: Synthetic coding sequence
  source 1..2331: mol_type = other DNA
atgtctgggaagaggcagttcttcctgaagcccctggccctgctgacctgctggcccagcacagtgaatggcaaggacctgagcaaggccacccatgaggaggccgtggaggccttcagaaatgccaaggagcccatcgtggtgcaggtgctgcggaggacccccctgagcaggcctgcctacggcatggccagcgaggtgcagctgatgaatgccagcacccagacagacatcacctttgagcacatcatggccctggccaagctgcggccccccaccccacctgtgcctgacatctgccccttcctgctgagtgacagctgccacagcctgcaccccatggagcacgagttctatgaggacaatgagtacatcagcagcctgcctgcagatgctgacagaacagaggactttgaatatgaggaggtggagctgtgccgggtgagcagccaggagaagctgggcctgactgtgtgctacagaacagatgatgaggaggacaccggcatctacgtgtctgaggtggaccccaacagcattgctgccaaggatggccgcatccgggagggggaccgcatcctgcagatcaatggagaagatgtgcagaaccgggaggaggccgtggccctgctgagcaatgatgagtgcaagagaattgtgctgctggtggcccggcctgagatccagctggatgagggctggctggaggatgaaagaaatgagttcctggaggagctgaacctggagatgctggaggaggagcacaatgaggccatgcagcccacagccaatgaggtggagcagcccaagaagcaggaggaggaggagggcaccacagacacagccaccagcagcagcaacaaccacgagaaggacagcggcgtgggccgcacagatgagagcctgagaaatgatgagagcagcgagcaggagaatgctgctgaggaccccaacagcaccagcctgaagagcaagagggacctgggccagagccaggacaccctgggctctgtggagctgcagtacaatgaaagcctggtgtctggagagtacatcgacagcgactgcatcggcaacccagatgaggactgtgagcgcttccggcagctgctggagctgaagtgcaagatccggaaccacggggagtatgacctgtactacagcagcagcaccatcgagtgcaaccagggcgagcaggagggcgtggagcacgagctgcagctgctgaatgaggagctgaggaacatcgagctggagtgccagaacatcatgcaggcccaccggctgcagaaggtgacagaccagtacggggacatctggaccctgcatgatggcggcttcaggaactacaacaccagcattgacatgcagaggggcaagctggatgacatcatggagcaccctgagaagagtgacaaggacagcagcagcgcctacaacacagctgagagctgccgcagcacccccctgactgtggacaggagcccagacagcagcctgcccagggtcatcaacctgaccaacaagaagaacctgcggagcaccatggccgccacccagagcagcagcggccagagcagcaaggagagcaccagcaccaaggccaagaccacagagcagggctgcagcgctgagagcaaggagaaggtgctggagggcagcaagctgcctgaccaggagaaggctgtgtctgagcacatcccctacctgagcccctaccacagcagcagctaccgctatgccaacatcccagcccacgcccggcactaccagagctacatgcagctgatccagcagaagtctgctgtggagtatgcccagagccagctgagcctggtgtccatgtgcaaggagagccagaagtgcagcgagcccaagatggagtggaaggtgaagatccgcagtgatggcacccgctacatcaccaagaggcctgtgcgggaccgcatcctgaaggagcgggccctgaagatcaaggaggagaggagcggcatgaccacagatgatgacaccatgtctgagatgaagatgggccgctactggagcaaggaggagaggaagcagcacctggtgcgggccaaggagcagaggagaagaagagagttcatgatgaggagccggctggagtgcctgaaggagagcccccagagcggcagcgagggcaagaaggagatcaacatcatcgagctgagccacaagaagatgatgaagaagaggaacaagaagatcctggacaactggatgaccatccaggagctgatgacccacggggccaagagcccagatggcaccagggtgcacaatgccttcctgtctgtgaccaccgtgtag

SEQ ID NO: 163442 - DNA, 3111 bp, synthetic construct
  misc_feature 1..3111: note = Description of Artificial Sequence: Synthetic coding sequence
  source 1..3111: mol_type = other DNA
atgggctttgccctggagagatttgctgaggccgtggaccctgccctggagtgcaagctgtgtggccaggtgctggaggagcccctgtgcaccccctgtggccacgtgttctgtgccagctgcctgctgccctgggccgtgagaagaagacgctgccccctgcagtgccagcccctggcccctggagagctgtacagagtgctgcccctgcggagcctcatccagaagctgcgggtgcagtgtgactaccgggcccggggctgcggccacagcgtgcggctgcacgagctggaggcccacgtggagcactgtgactttggacctgcccggcggctgcggagccggggcggctgtgccagcggcctgggcggcggggaggtgcctgcccggggcggctgcggccccacccccagggctggccggggcggcggggcccggggcggccccccaggcggccgctggggccggggccggggccctggcccccgggtgctggcctggaggagaagagagaaggccctgctggcccagctgtgggccctgcagggcgaggtgcagctgacagcccggcgctaccaggagaagttcacccagtacatggcccacgtgaggaactttgtgggggacctgggcggcggccacagaagagatggagagcacaagcccttcaccatcgtgctggagcgggagaatgacaccctgggcttcaacatcattggaggccggcccaaccagaacaaccaggagggcaccagcacagagggcatctacgtgtccaagatcctggagaatggacctgctgacagagcagatggcctggagatccatgacaagatcatggaggtgaatggcaaggacctgagcaaggccacccatgaggaggccgtggaggccttcagaaatgccaaggagcccatcgtggtgcaggtgctgcggaggacccccctgagcaggcctgcctacggcatggccagcgaggtgcagctgatgaatgccagcacccagacagacatcacctttgagcacatcatggccctggccaagctgcggccccccaccccacctgtgcctgacatctgccccttcctgctgagtgacagctgccacagcctgcaccccatggagcacgagttctatgaggacaatgagtacatcagcagcctgcctgcagatgctgacagaacagaggactttgaatatgaggaggtggagctgtgccgggtgagcagccaggagaagctgggcctgactgtgtgctacagaacagatgatgaggaggacaccggcatctacgtgtctgaggtggaccccaacagcattgctgccaaggatggccgcatccgggagggggaccgcatcctgcagatcaatggagaagatgtgcagaaccgggaggaggccgtggccctgctgagcaatgatgagtgcaagagaattgtgctgctggtggcccggcctgagatccagctggatgagggctggctggaggatgaaagaaatgagttcctggaggagctgaacctggagatgctggaggaggagcacaatgaggccatgcagcccacagccaatgaggtggagcagcccaagaagcaggaggaggaggagggcaccacagacacagccaccagcagcagcaacaaccacgagaaggacagcggcgtgggccgcacagatgagagcctgagaaatgatgagagcagcgagcaggagaatgctgctgaggaccccaacagcaccagcctgaagagcaagagggacctgggccagagccaggacaccctgggctctgtggagctgcagtacaatgaaagcctggtgtctggagagtacatcgacagcgactgcatcggcaacccagatgaggactgtgagcgcttccggcagctgctggagctgaagtgcaagatccggaaccacggggagtatgacctgtactacagcagcagcaccatcgagtgcaaccagggcgagcaggagggcgtggagcacgagctgcagctgctgaatgaggagctgaggaacatcgagctggagtgccagaacatcatgcaggcccaccggctgcagaaggtgacagaccagtacggggacatctggaccctgcatgatggcggcttcaggaactacaacaccagcattgacatgcagaggggcaagctggatgacatcatggagcaccctgagaagagtgacaaggacagcagcagcgcctacaacacagctgagagctgccgcagcacccccctgactgtggacaggagcccagacagcagcctgcccagggtcatcaacctgaccaacaagaagaacctgcggagcaccatggccgccacccagagcagcagcggccagagcagcaaggagagcaccagcaccaaggccaagaccacagagcagggctgcagcgctgagagcaaggagaaggtgctggagggcagcaagctgcctgaccaggagaaggctgtgtctgagcacatcccctacctgagcccctaccacagcagcagctaccgctatgccaacatcccagcccacgcccggcactaccagagctacatgcagctgatccagcagaagtctgctgtggagtatgcccagagccagctgagcctggtgtccatgtgcaaggagagccagaagtgcagcgagcccaagatggagtggaaggtgaagatccgcagtgatggcacccgctacatcaccaagaggcctgtgcgggaccgcatcctgaaggagcgggccctgaagatcaaggaggagaggagcggcatgaccacagatgatgacaccatgtctgagatgaagatgggccgctactggagcaaggaggagaggaagcagcacctggtgcgggccaaggagcagaggagaagaagagagttcatgatgaggagccggctggagtgcctgaaggagagcccccagagcggcagcgagggcaagaaggagatcaacatcatcgagctgagccacaagaagatgatgaagaagaggaacaagaagatcctggacaactggatgaccatccaggagctgatgacccacggggccaagagcccagatggcaccagggtgcacaatgccttcctgtctgtgaccaccgtgtag

SEQ ID NO: 163443 - DNA, 2337 bp, synthetic construct
  misc_feature 1..2337: note = Description of Artificial Sequence: Synthetic coding sequence
  source 1..2337: mol_type = other DNA
atgggctgcaacctgtgcaccttccagaagcgggaggagcactacaagctgctgtatgaggtgtcccaggtgaatggcaaggacctgagcaaggccacccatgaggaggccgtggaggccttcagaaatgccaaggagcccatcgtggtgcaggtgctgcggaggacccccctgagcaggcctgcctacggcatggccagcgaggtgcagctgatgaatgccagcacccagacagacatcacctttgagcacatcatggccctggccaagctgcggccccccaccccacctgtgcctgacatctgccccttcctgctgagtgacagctgccacagcctgcaccccatggagcacgagttctatgaggacaatgagtacatcagcagcctgcctgcagatgctgacagaacagaggactttgaatatgaggaggtggagctgtgccgggtgagcagccaggagaagctgggcctgactgtgtgctacagaacagatgatgaggaggacaccggcatctacgtgtctgaggtggaccccaacagcattgctgccaaggatggccgcatccgggagggggaccgcatcctgcagatcaatggagaagatgtgcagaaccgggaggaggccgtggccctgctgagcaatgatgagtgcaagagaattgtgctgctggtggcccggcctgagatccagctggatgagggctggctggaggatgaaagaaatgagttcctggaggagctgaacctggagatgctggaggaggagcacaatgaggccatgcagcccacagccaatgaggtggagcagcccaagaagcaggaggaggaggagggcaccacagacacagccaccagcagcagcaacaaccacgagaaggacagcggcgtgggccgcacagatgagagcctgagaaatgatgagagcagcgagcaggagaatgctgctgaggaccccaacagcaccagcctgaagagcaagagggacctgggccagagccaggacaccctgggctctgtggagctgcagtacaatgaaagcctggtgtctggagagtacatcgacagcgactgcatcggcaacccagatgaggactgtgagcgcttccggcagctgctggagctgaagtgcaagatccggaaccacggggagtatgacctgtactacagcagcagcaccatcgagtgcaaccagggcgagcaggagggcgtggagcacgagctgcagctgctgaatgaggagctgaggaacatcgagctggagtgccagaacatcatgcaggcccaccggctgcagaaggtgacagaccagtacggggacatctggaccctgcatgatggcggcttcaggaactacaacaccagcattgacatgcagaggggcaagctggatgacatcatggagcaccctgagaagagtgacaaggacagcagcagcgcctacaacacagctgagagctgccgcagcacccccctgactgtggacaggagcccagacagcagcctgcccagggtcatcaacctgaccaacaagaagaacctgcggagcaccatggccgccacccagagcagcagcggccagagcagcaaggagagcaccagcaccaaggccaagaccacagagcagggctgcagcgctgagagcaaggagaaggtgctggagggcagcaagctgcctgaccaggagaaggctgtgtctgagcacatcccctacctgagcccctaccacagcagcagctaccgctatgccaacatcccagcccacgcccggcactaccagagctacatgcagctgatccagcagaagtctgctgtggagtatgcccagagccagctgagcctggtgtccatgtgcaaggagagccagaagtgcagcgagcccaagatggagtggaaggtgaagatccgcagtgatggcacccgctacatcaccaagaggcctgtgcgggaccgcatcctgaaggagcgggccctgaagatcaaggaggagaggagcggcatgaccacagatgatgacaccatgtctgagatgaagatgggccgctactggagcaaggaggagaggaagcagcacctggtgcgggccaaggagcagaggagaagaagagagttcatgatgaggagccggctggagtgcctgaaggagagcccccagagcggcagcgagggcaagaaggagatcaacatcatcgagctgagccacaagaagatgatgaagaagaggaacaagaagatcctggacaactggatgaccatccaggagctgatgacccacggggccaagagcccagatggcaccagggtgcacaatgccttcctgtctgtgaccaccgtgtag

SEQ ID NO: 163444 - DNA, 1158 bp, synthetic construct
  misc_feature 1..1158: note = Description of Artificial Sequence: Synthetic coding sequence
  source 1..1158: mol_type = other DNA
atgaagctggtgaggaagaacatcgagaaggacaatgccggccaggtgaccctggtgcctgaggagcctgaggacatgtggcacacctacaacctggtgcaggtgggggacagcctgcgggccagcaccatcaggaaggtgcagacagagagcagcactggatctgtgggcagcaacagagtgaggaccaccctgaccctgtgtgtggaggccatcgactttgacagccaggcctgccagctgcgggtgaagggcaccaacatccaggagaatgaatatgtgaagatgggcgcctaccacaccatcgagctggagcccaaccggcagttcaccctggccaagaagcagtgggacagcgtggtgctggagagaattgagcaggcctgtgaccctgcctggagcgcagatgtggccgctgtggtgatgcaggagggcctggcccacatctgcctggtgacccccagcatgaccctgacccgggccaaggtggaggtgaacatccccaggaagaggaagggcaactgcagccagcacgaccgggccctggagcgcttctatgagcaggtggtgcaggccatccagaggcacatccactttgatgtggtgaagtgcatcctggtggccagccctggctttgtgcgggagcagttctgtgactacctgttccagcaggccgtgaagacagacaacaagctgctgctggagaacagaagcaagttcctgcaggtgcacgccagcagcggccacaagtacagcctgaaggaggccctgtgtgaccccaccgtggccagccggctgagtgacaccaaggccgccggggaggtgaaggccctggatgacttctacaagatgctgcagcacgagccagaccgggccttctacggcctgaagcaggtggagaaggccaatgaggccatggccatcgacaccctgctgatcagtgatgagctgttccgccaccaggatgtggccaccaggagccgctacgtgcggctggtggacagcgtgaaggaaaatgccggcaccgtgcgcatcttcagcagcctgcacgtgtctggagagcagctgagccagctgactggagtggccgccatcctgcgcttccctgtgcctgagctgagtgaccaggagggggacagcagcagcgaggaggactag

SEQ ID NO: 163445 - DNA, 855 bp, synthetic construct
  misc_feature 1..855: note = Description of Artificial Sequence: Synthetic coding sequence
  source 1..855: mol_type = other DNA
atggccagctacccctaccggcagggctgccctggagctgctggccaggcccctggggcccctcctggcagctactacccaggcccccccaacagcggcggccagtatggcagcggcctgcccccaggcggcggctacggcggccctgcccctgggggcccctacggccccccagctgggggcggcccctacggccaccccaaccctggcatgttccccagcggcaccccaggcggcccctatggaggagctgcccctgggggcccctacggccagcccccacccagcagctatggagcccagcagcccggcctgtatggccagggcggggccccacccaacgtggaccctgaggcctacagctggttccagagcgtggacagcgaccacagcggctacatctccatgaaggagctgaagcaggccctggtgaactgcaactggagcagcttcaatgatgagacctgcctgatgatgatcaacatgtttgacaagaccaagagcggcagaattgatgtgtatggcttcagcgccctgtggaagttcatccagcagtggaagaacctcttccagcagtatgaccgggacaggagcggcagcatctcctacacagagctgcagcaggccctgagccagatgggctacaacctgagcccccagttcacccagctgctggtgagccgctactgccccaggtctgccaacccagccatgcagctggaccgcttcatccaggtgtgcacccagctgcaggtgctgacagaggccttccgggagaaggacacagctgtgcagggcaacatccggctgagctttgaagattttgtgaccatgacagccagcaggatgctgtag

SEQ ID NO: 163446 - DNA, 423 bp, synthetic construct
  misc_feature 1..423: note = Description of Artificial Sequence: Synthetic coding sequence
  source 1..423: mol_type = other DNA
atggccagctacccctaccggcagggctgccctggagctgctggccaggcccctggggcccctcctggcagctactacccaggcccccccaacagcggcggccagtatggcagcggcctgcccccaggcggcggctacggcggccctgcccctgggggcccctacggccccccagctgggggcggcccctacggccaccccaaccctggcatgttccccagcggcaccccaggcggcccctatggaggagctgcccctgggggcccctacggccagcccccacccagcagctatggagcccagcagcccggcctgtatggccagggcatccacgccgagggcgccgcccctgtgtgggacatgctgagcctgtggcagcgggagggcgctggggagctggccaggatgcacaatgccagctag

SEQ ID NO: 163447 - DNA, 1146 bp, synthetic construct
  misc_feature 1..1146: note = Description of Artificial Sequence: Synthetic coding sequence
  source 1..1146: mol_type = other DNA
atgcacctgctggccatcctcttctgtgccctgtggagcgctgtgctggccgagaacagtgatgattatgacctgatgtatgtgaacctggacaatgaaattgacaatggcctgcaccccacagaggaccccaccccctgtgcctgtggccaggagcacagcgagtgggacaagctgttcatcatgctggagaacagccagatgagggagaggatgctgctgcaggccacagatgatgtgctgcggggggagctgcagaggctgcgggaggagctgggccgcctggccgagagcctggcccggccctgtgcccctggggccccagctgaggcccggctgaccagcgccctggatgagctgctgcaggccaccagagatgctggaagaaggctggccaggatggagggcgctgaggcccagaggcctgaggaggccggccgggccctggccgctgtgctggaggagctgcggcagaccagggctgacctgcatgctgtgcagggctgggccgcccgctcctggctgcctgctggctgtgaaacagccatcctcttccccatgaggagcaagaagatctttggatctgtgcaccctgtgcggcccatgaggctggagagcttcagcgcctgcatctgggtgaaggccacagatgtgctgaacaagaccatcctcttctcctatggcaccaagaggaacccctatgagatccagctgtacctgagctaccagagcatcgtgtttgtggtgggcggggaggagaacaagctggtggccgaggccatggtgtccctgggccgctggacccacctgtgtggcacctggaacagcgaggagggcctgaccagcctgtgggtgaatggagagctggccgccaccaccgtggagatggccaccggccacatcgtgcctgagggcggcatcctgcagatcggccaggagaagaatggctgctgcgtgggcggcggctttgatgagaccctggccttcagcggccgcctgaccggcttcaacatctgggacagcgtgctgagcaatgaggagatccgggagactggaggagctgagagctgccacatccggggcaacatcgtgggctggggcgtgacagagatccagccccacggcggggcccagtatgtgtcctag

SEQ ID NO: 163448 - DNA, 1422 bp, synthetic construct
  misc_feature 1..1422: note = Description of Artificial Sequence: Synthetic coding sequence
  source 1..1422: mol_type = other DNA
atgggcagcggcaactgggaggtgactggaccaccctgtggcagccgctgtgagcggcccccaggcctgccccggggcgtgcacggccagttccgctctgctgtgggcctgagcggcctgcgctggttccgccgcttccaggaggtgacctggacccacctgcagaacatcgccagcaactacaacgtgtcctacaacgtggatgtgcgcttccgcagcctggccgaggagagccaggccgtggcccaggccgtgaacagaagccaggcctctgtgcagggcgagctggcccagctgaaggcctgggtgaggaagctgcagaggcggggcaggaaggtggacacccggctgcgggccctggacctgaccctgggggagaggagccagcagagggcccgggagaggaaggcccacaaggcccagagagatgccctgcaggacagcctggcccggctggagggcctggtgcacagccagggcgcccggctggccgccctggagggccgcctgcctgtggcccaccctggaacagctgccctgggccctgccctggtgcccacccccacccagcctgaggagctgggccccaccagcctgaagctgcagagggaccggcaggagctgcgggccgccagcgagcaccggggccccccccaggacagcagcgcccccctgcagggccggcgggagcccccagccagcggcagccaccgggtgctgtctggaacagcccccaaggacccccggcagcaggcctggagcccccaggtgcctggagagatctgtggggtgggccccaccctggtgttccccaatgccagcaccagaaatgtggtgttcctgagccctggctttgtgacagccctgcgggccctgtccttctgctcctgggtgaggacagccagcggccgcctgggcaccctgctgtcctatgccacagaggacaatgacaacaagctggtgctgcacggccgggacagcctgctgcccggcagcatccactttgtgattggagaccctgccttccgggagctgcccctgcagctgctgctggatggccagtggcaccacatctgtgtgatctggaccagcacccagggccgctactggctgcacgtggaccggcggctggtggccaccggcagccgcttccgggagggctatgagatccccccaggcggcagcctggtgctgggccaggagcaggacagcgtgggcggcggctttgacagcagcgaggcctttgtgggctccatgagcggcctggccatctgggaccgggccctggtgcctggagaggtggccaacctggccatcggcaaggagttccccactggagccatcctgaccctggccaatgctgccctggccggcggctttgtgcagggcgccaactgcacctgcctggagcgctgcccctag

SEQ ID NO: 163449 - DNA, 1437 bp, synthetic construct
  misc_feature 1..1437: note = Description of Artificial Sequence: Synthetic coding sequence
  source 1..1437: mol_type = other DNA
atgggctgctcctggaggaagaccctgtccttcttcctggtgtttgtgcccatctacctgcatggagccagcagccaggaggccgcccctgtgggccccaggaagcccttctttgagcggctgcggcggctggaggagcagttccgccgcttccaggaggtgacctggacccacctgcagaacatcgccagcaactacaacgtgtcctacaacgtggatgtgcgcttccgcagcctggccgaggagagccaggccgtggcccaggccgtgaacagaagccaggcctctgtgcagggcgagctggcccagctgaaggcctgggtgaggaagctgcagaggcggggcaggaaggtggacacccggctgcgggccctggacctgaccctgggggagaggagccagcagagggcccgggagaggaaggcccacaaggcccagagagatgccctgcaggacagcctggcccggctggagggcctggtgcacagccagggcgcccggctggccgccctggagggccgcctgcctgtggcccaccctggaacagctgccctgggccctgccctggtgcccacccccacccagcctgaggagctgggccccaccagcctgaagctgcagagggaccggcaggagctgcgggccgccagcgagcaccggggccccccccaggacagcagcgcccccctgcagggcagaagagagcccccagccagcggcagccaccgggtgctgagcggcacagcccccaaggacccccggcagcaggcctggagcccccaggtgcctggagagatctgtggggtgggccccaccctggtgttccccaatgccagcaccagaaatgtggtgttcctgagccctggctttgtgacagccctgcgggccctgtccttctgctcctgggtgaggacagccagcggccgcctgggcaccctgctgtcctatgccacagaagataatgacaacaagctggtgctgcacggccgggacagcctgctgcccggcagcatccacttcgtcatcggggaccctgccttccgggagctgcccctgcagctgctgctggatggccagtggcaccacatctgtgtgatctggaccagcacccagggccgctactggctgcacgtggaccggcggctggtggccaccggcagccgcttccgggagggctatgagatccccccaggcggcagcctggtgctgggccaggagcaggacagcgtgggcggcggctttgacagcagcgaggcctttgtgggctccatgagcggcctggccatctgggaccgggccctggtgcctggagaggtggccaacctggccatcggcaaggagttccccaccggggccatcctgaccctggccaatgctgccctggccggcggctttgtgcagggcgccaactgcacctgcctggagcgctgcccctag

SEQ ID NO: 163450 - DNA, 1167 bp, synthetic construct
  misc_feature 1..1167: note = Description of Artificial Sequence: Synthetic coding sequence
  source 1..1167: mol_type = other DNA
atgaagtggctgctgctgctgggcctggtggccctgtctgagtgcatcatgtacaaggtgcccctcatcaggaagaagagcctgcggaggaccctgtctgagcggggcctgctgaaggacttcctgaagaagcacaacctgaacccagccaggaagtacttcccccagtggaaggcccccaccctggtggatgagcagcccctggagaactacctggacatggagtacttcggcaccatcggcatcggcaccccagcccaggacttcaccgtggtgtttgacaccggcagcagcaacctgtgggtgcccagcgtgtactgcagcagcctggcctgcaccaaccacaaccgcttcaaccctgaggacagcagcacctaccagagcaccagcgagaccgtgtccatcacctatggaacaggctccatgacaggcatcctgggctatgacacagtgcaggtgggcggcatcagtgacaccaaccagatcttcggcctgtctgaaacagagcccggcagcttcctgtactatgccccctttgatggcatcctgggcctggcctaccccagcatcagcagcagcggggccacccctgtgtttgacaacatctggaaccagggcctggtgtcccaggacctcttctctgtgtacctgtctgcagatgaccagagcggctctgtggtgatctttggaggcatcgacagcagctactacacaggcagcctgaactgggtgcctgtgacagtggagggctactggcagatcaccgtggacagcatcaccatgaatggagaggccatcgcctgtgccgagggctgccaggccatcgtggacaccggcaccagcctgctgaccggccccaccagccccatcgccaacatccagagcgacattggagcctctgaaaattctgatggagacatggtggtgtcctgcagcgccatcagcagcctgcctgacatcgtgttcaccatcaatggagtgcagtaccctgtgccccccagcgcctacatcctgcagagcgagggcagctgcatcagcggcttccagggcatgaacctgcccacagaaagtggagagctgtggatcctgggagatgtgttcatccggcagtacttcaccgtgtttgaccgggccaacaaccaggtgggcctggcccctgtggcctag

SEQ ID NO: 163451 - DNA, 849 bp, synthetic construct
  misc_feature 1..849: note = Description of Artificial Sequence: Synthetic coding sequence
  source 1..849: mol_type = other DNA
atgaagtggctgctgctgctgggcctggtggccctgtctgagtgcatcatgtacaaggtgcccctcatcaggaagaagagcctgcggaggaccctgtctgagcggggcctgctgaaggacttcctgaagaagcacaacctgaacccagccaggaagtacttcccccagtggaaggcccccaccctggtggatgagcagcccctggagaactacctggacatggagtacttcggcaccatcggcatcggcaccccagcccaggacttcaccgtggtgtttgacaccggcagcagcaacctgtgggtgcccagcgtgtactgcagcagcctggcctgcaccaaccacaaccgcttcaaccctgaggacagcagcacctaccagagcaccagcgagaccgtgtccatcacctatggaacaggctccatgacaggcatcctgggctatgacacagtgcagacagtggccatctggaggtctgctgccatgggcctggtgtcccaggacctcttctctgtgtacctgtctgcagatgaccagagcggctctgtggtgatctttggaggcatcgacagcagctactacacaggcagcctgaactgggtgcctgtgacagtggagggctactggcagatcaccgtggacagcatcaccatgaatggagaggccatcgcctgtgccgagggctgccaggccatcgtggacaccggcaccagcctgctgaccggccccaccagccccatcgccaacatccagagcgacatcggggccagcgagaacagtgatggagacatggtggtgtcctgcagcgccatcagcagcctgcctgacatcgtgttcaccatcaactag

SEQ ID NO: 163452 - DNA, 750 bp, synthetic construct
  misc_feature 1..750: note = Description of Artificial Sequence: Synthetic coding sequence
  source 1..750: mol_type = other DNA
atgacaggcatcctgggctatgacacagtgcaggtgggcggcatcagtgacaccaaccagatcttcggcctgtctgaaacagagcccggcagcttcctgtactatgccccctttgatggcatcctgggcctggcctaccccagcatcagcagcagcggggccacccctgtgtttgacaacatctggaaccagggcctggtgtcccaggacctcttctctgtgtacctgtctgcagatgaccagagcggctctgtggtgatctttggaggcatcgacagcagctactacacaggcagcctgaactgggtgcctgtgacagtggagggctactggcagatcaccgtggacagcatcaccatgaatggagaggccatcgcctgtgccgagggctgccaggccatcgtggacaccggcaccagcctgctgaccggccccaccagccccatcgccaacatccagagcgacatcggggccagcgagaacagtgatggagacatggtggtgtcctgcagcgccatcagcagcctgcctgacatcgtgttcaccatcaacggggtgcagtaccctgtgcccccatctgcctacatcctgcagctgcccagcgagggcagctgcatcagcggcttccagggcatgaacctgcccacagagagcggggagctgtggatcctgggagatgtgttcatccggcagtacttcaccgtgtttgaccgggccaacaaccaggtgggcctggcccctgtggcctag

SEQ ID NO: 163453 - DNA, 1167 bp, synthetic construct
  misc_feature 1..1167: note = Description of Artificial Sequence: Synthetic coding sequence
  source 1..1167: mol_type = other DNA
atgaagtggctgctgctgctgggcctggtggccctgtctgagtgcatcatgtacaaggtgcccctcatcaggaagaagagcctgcggaggaccctgtctgagcggggcctgctgaaggacttcctgaagaagcacaacctgaacccagccaggaagtacttcccccagtgggaggcccccaccctggtggatgagcagcccctggagaactacctggacatggagtacttcggcaccatcggcatcggcaccccagcccaggacttcaccgtggtgtttgacaccggcagcagcaacctgtgggtgcccagcgtgtactgcagcagcctggcctgcaccaaccacaaccgcttcaaccctgaggacagcagcacctaccagagcaccagcgagaccgtgtccatcacctatggaacaggctccatgacaggcatcctgggctatgacacagtgcaggtgggcggcatcagtgacaccaaccagatcttcggcctgtctgaaacagagcccggcagcttcctgtactatgccccctttgatggcatcctgggcctggcctaccccagcatcagcagcagcggggccacccctgtgtttgacaacatctggaaccagggcctggtgtcccaggacctcttctctgtgtacctgtctgcagatgaccagagcggctctgtggtgatctttggaggcatcgacagcagctactacacaggcagcctgaactgggtgcctgtgacagtggagggctactggcagatcaccgtggacagcatcaccatgaatggagaggccatcgcctgtgccgagggctgccaggccatcgtggacaccggcaccagcctgctgaccggccccaccagccccatcgccaacatccagagcgacattggagcctctgaaaattctgatggagacatggtggtgtcctgcagcgccatcagcagcctgcctgacatcgtgttcaccatcaatggagtgcagtaccctgtgccccccagcgcctacatcctgcagagcgagggcagctgcatcagcggcttccagggcatgaacctgcccacagaaagtggagagctgtggatcctgggagatgtgttcatccggcagtacttcaccgtgtttgaccgggccaacaaccaggtgggcctggcccctgtggcctag

SEQ ID NO: 163454 - DNA, 1167 bp, synthetic construct
  misc_feature 1..1167: note = Description of Artificial Sequence: Synthetic coding sequence
  source 1..1167: mol_type = other DNA
atgaagtggctgctgctgctgggcctggtggccctgtctgagtgcatcatgtacaaggtgcccctcatcaggaagaagagcctgcggaggaccctgtctgagcggggcctgctgaaggacttcctgaagaagcacaacctgaacccagccaggaagtacttcccccagtgggaggcccccaccctggtggatgagcagcccctggagaactacctggacatggagtacttcggcaccatcggcatcggcaccccagcccaggacttcaccgtggtgtttgacaccggcagcagcaacctgtgggtgcccagcgtgtactgcagcagcctggcctgcaccaaccacaaccgcttcaaccctgaggacagcagcacctaccagagcaccagcgagaccgtgtccatcacctatggaacaggctccatgacaggcatcctgggctatgacacagtgcaggtgggcggcatcagtgacaccaaccagatcttcggcctgtctgaaacagagcccggcagcttcctgtactatgccccctttgatggcatcctgggcctggcctaccccagcatcagcagcagcggggccacccctgtgtttgacaacatctggaaccagggcctggtgtcccaggacctcttctctgtgtacctgtctgcagatgacaagagcggctctgtggtgatctttggaggcatcgacagcagctactacacaggcagcctgaactgggtgcctgtgacagtggagggctactggcagatcaccgtggacagcatcaccatgaatggagagaccatcgcctgtgccgagggctgccaggccatcgtggacaccggcaccagcctgctgaccggccccaccagccccatcgccaacatccagagcgacattggagcctctgaaaattctgatggagacatggtggtgtcctgcagcgccatcagcagcctgcctgacatcgtgttcaccatcaatggagtgcagtaccctgtgccccccagcgcctacatcctgcagagcgagggcagctgcatcagcggcttccagggcatgaatgtgcccacagaaagtggagagctgtggatcctgggagatgtgttcatccggcagtacttcaccgtgtttgaccgggccaacaaccaggtgggcctggcccctgtggcctag

SEQ ID NO: 163455 - DNA, 849 bp, synthetic construct
  misc_feature 1..849: note = Description of Artificial Sequence: Synthetic coding sequence
  source 1..849: mol_type = other DNA
atgaagtggctgctgctgctgggcctggtggccctgtctgagtgcatcatgtacaaggtgcccctcatcaggaagaagagcctgcggaggaccctgtctgagcggggcctgctgaaggacttcctgaagaagcacaacctgaacccagccaggaagtacttcccccagtgggaggcccccaccctggtggatgagcagcccctggagaactacctggacatggagtacttcggcaccatcggcatcggcaccccagcccaggacttcaccgtggtgtttgacaccggcagcagcaacctgtgggtgcccagcgtgtactgcagcagcctggcctgcaccaaccacaaccgcttcaaccctgaggacagcagcacctaccagagcaccagcgagaccgtgtccatcacctatggaacaggctccatgacaggcatcctgggctatgacacagtgcagacagtggccatctggaggtctgctgccatgggcctggtgtcccaggacctcttctctgtgtacctgtctgcagatgaccagagcggctctgtggtgatctttggaggcatcgacagcagctactacacaggcagcctgaactgggtgcctgtgacagtggagggctactggcagatcaccgtggacagcatcaccatgaatggagaggccatcgcctgtgccgagggctgccaggccatcgtggacaccggcaccagcctgctgaccggccccaccagccccatcgccaacatccagagcgacatcggggccagcgagaacagtgatggagacatggtggtgtcctgcagcgccatcagcagcctgcctgacatcgtgttcaccatcaactag

SEQ ID NO: 163456 - DNA, 750 bp, synthetic construct; identical to SEQ ID NO: 163452
  misc_feature 1..750: note = Description of Artificial Sequence: Synthetic coding sequence
  source 1..750: mol_type = other DNA

SEQ ID NO: 163457 - DNA, 1167 bp, synthetic construct; identical to SEQ ID NO: 163454
  misc_feature 1..1167: note = Description of Artificial Sequence: Synthetic coding sequence
  source 1..1167: mol_type = other DNA

SEQ ID NO: 163458 - DNA, 849 bp, synthetic construct
  misc_feature 1..849: note = Description of Artificial Sequence: Synthetic coding sequence
  source 1..849: mol_type = other DNA
atgaagtggctgctgctgctgggcctggtggccctgtctgagtgcatcatgtacaaggtgcccctcatcaggaagaagagcctgcggaggaccctgtctgagcggggcctgctgaaggacttcctgaagaagcacaacctgaacccagccaggaagtacttcccccagtgggaggcccccaccctggtggatgagcagcccctggagaactacctggacatggagtacttcggcaccatcggcatcggcaccccagcccaggacttcaccgtggtgtttgacaccggcagcagcaacctgtgggtgcccagcgtgtactgcagcagcctggcctgcaccaaccacaaccgcttcaaccctgaggacagcagcacctaccagagcaccagcgagaccgtgtccatcacctatggaacaggctccatgacaggcatcctgggctatgacacagtgcagacagtggccatctggaggtctgctgccatgggcctggtgtcccaggacctcttctctgtgtacctgtctgcagatgacaagagcggctctgtggtgatctttggaggcatcgacagcagctactacacaggcagcctgaactgggtgcctgtgacagtggagggctactggcagatcaccgtggacagcatcaccatgaatggagagaccatcgcctgtgccgagggctgccaggccatcgtggacaccggcaccagcctgctgaccggccccaccagccccatcgccaacatccagagcgacatcggggccagcgagaacagtgatggagacatggtggtgtcctgcagcgccatcagcagcctgcctgacatcgtgttcaccatcaactag

SEQ ID NO: 163459 - DNA, 750 bp, synthetic construct
  misc_feature 1..750: note = Description of Artificial Sequence: Synthetic coding sequence
  source 1..750: mol_type = other DNA
atgacaggcatcctgggctatgacacagtgcaggtgggcggcatcagtgacaccaaccagatcttcggcctgtctgaaacagagcccggcagcttcctgtactatgccccctttgatggcatcctgggcctggcctaccccagcatcagcagcagcggggccacccctgtgtttgacaacatctggaaccagggcctggtgtcccaggacctcttctctgtgtacctgtctgcagatgacaagagcggctctgtggtgatctttggaggcatcgacagcagctactacacaggcagcctgaactgggtgcctgtgacagtggagggctactggcagatcaccgtggacagcatcaccatgaatggagagaccatcgcctgtgccgagggctgccaggccatcgtggacaccggcaccagcctgctgaccggccccaccagccccatcgccaacatccagagcgacatcggggccagcgagaacagtgatggagacatggtggtgtcctgcagcgccatcagcagcctgcctgacatcgtgttcaccatcaacggggtgcagtaccctgtgcccccatctgcctacatcctgcagctgcccagcgagggcagctgcatcagcggcttccagggcatgaatgtgcccacagagagcggggagctgtggatcctgggagatgtgttcatccggcagtacttcaccgtgtttgaccgggccaacaaccaggtgggcctggcccctgtggcctag

SEQ ID NO: 163460 - DNA, 1578 bp, synthetic construct
  misc_feature 1..1578: note = Description of Artificial Sequence: Synthetic coding sequence
  source 1..1578: mol_type = other DNA
atggctgctgtggtgctggccgccacccggctgctgcggggcagcggctcctggggctgcagccggctgcgctttggacctccagcctaccgccgcttcagcagtggaggagcctaccccaacatccccctgagcagccccctgcccggggtgcccaagcctgtgtttgccaccgtggatggccaggagaagtttgagaccaaggtgaccaccctggacaatggcctgcgggtggccagccagaacaagtttggccagttctgcaccgtgggcatcctgatcaacagcggcagccgctatgaggccaagtacctgagcggcatcgcccacttcctggagaagctggccttcagcagcacagccaggtttgacagcaaggatgagatcctgctgaccctggagaagcacggcggcatctgtgactgccagaccagccgggacaccaccatgtatgctgtgtctgctgacagcaagggcctggacacagtggtggccctgctggctgatgtggtgctgcagccccggctgacagatgaggaggtggagatgaccaggatggctgtgcagtttgagctggaggacctgaacctgcggccagaccctgagcccctgctgacagagatgatccacgaggccgcctaccgggagaacacagtgggcctgcaccgcttctgccccacagaaaatgtggccaagatcaaccgggaggtgctgcacagctacctgaggaactactacaccccagacaggatggtgctggccggcgtgggcgtggagcacgagcacctggtggactgtgccaggaagtacctgctgggcgtgcagcctgcctggggcagcgctgaggccgtggacatcgacagatctgtggcccagtacacaggaggcatcgccaagctggagcgggacatgagcaatgtgtccctgggccccacccccatccctgagctgacccacatcatggtgggcctggagagctgcagcttcctggaggaggacttcatcccctttgctgtgctgaacatgatgatgggcggcggcggcagcttctctgctgggggccctgggaagggcatgttcagccggctgtacctgaatgtgctgaacagacaccactggatgtacaatgccaccagctaccaccacagctatgaggacaccggcctgctgtgcatccacgccagcgctgacccccggcaggtgcgggagatggtggagatcatcaccaaggagttcatcctgatgggcggcaccgtggacacagtggagctggagcgggccaagacccagctgacctccatgctgatgatgaacctggagagcaggcctgtgatctttgaagatgtgggccggcaggtgctggccaccaggagcaggaagctgccccatgagctgtgcaccctcatcagaaatgtgaagccagaagatgtgaagagggtggccagcaagatgctgcggggcaagccagctgtggccgccctgggggacctgacagacctgcccacctatgagcacatccagacagccctgagcagcaaggatggccgcctgcccaggacctaccgcctcttcagatag

SEQ ID NO: 163461 - DNA, 441 bp, synthetic construct
  misc_feature 1..441: note = Description of Artificial Sequence: Synthetic coding sequence
  source 1..441: mol_type = other DNA
atggctgctgtggtgctggccgccacccggctgctgcggggcagcggctcctggggctgcagccggctgcgctttggacctccagcctaccgccgcttcagcagtggaggagcctaccccaacatccccctgagcagccccctgcccggggtgcccaagcctgtgtttgccaccgtggatggccaggagaagtttgagaccaaggtgaccaccctggacaatggcctgcgggtggccagccagaacaagtttggccagttctgcaccgtgggcatcctgatcaacagcggcagccgctatgaggccaagtacctgagcggcatcgcccacttcctggagaagctggccttcagcagcacagccaggtttgacagcaaggatgagatcctgctgaccctggagaagcacggcggcatctgtgactgccagaccagcaggtag

SEQ ID NO: 163462 - DNA, 1185 bp, synthetic construct
  misc_feature 1..1185: note = Description of Artificial Sequence: Synthetic coding sequence
  source 1..1185: mol_type = other DNA
atgaagaggaacaccctggtggagctgctgaccttctggaagaactggcacttccggctgctgctggacctgacagccaagatgaagttctgcctgcgctggaagtccatgggcgtgtctgtgacagcccggcaccaggatgaggaggtggagatgaccaggatggctgtgcagtttgagctggaggacctgaacctgcggccagaccctgagcccctgctgacagagatgattcatgaagctgcctacagagaaaatacagtgggcctgcaccgcttctgccccacagaaaatgtggccaagatcaaccgggaggtgctgcacagctacctgaggaactactacaccccagacaggatggtgctggccggcgtgggcgtggagcacgagcacctggtggactgtgccaggaagtacctgctgggcgtgcagcctgcctggggcagcgctgaggccgtggacatcgacagatctgtggcccagtacacaggaggcatcgccaagctggagcgggacatgagcaatgtgtccctgggccccacccccatccctgagctgacccacatcatggtgggcctggagagctgcagcttcctggaggaggacttcatcccctttgctgtgctgaacatgatgatgggcggcggcggcagcttctctgctgggggccctgggaagggcatgttcagccggctgtacctgaatgtgctgaacagacaccactggatgtacaatgccaccagctaccaccacagctatgaggacaccggcctgctgtgcatccacgccagcgctgacccccggcaggtgcgggagatggtggagatcatcaccaaggagttcatcctgatgggcggcaccgtggacacagtggagctggagcgggccaagacccagctgacctccatgctgatgatgaacctggagagcaggcctgtgatctttgaagatgtgggccggcaggtgctggccaccaggagcaggaagctgccccatgagctgtgcaccctcatcagaaatgtgaagccagaagatgtgaagagggtggccagcaagatgctgcggggcaagccagctgtggccgccctgggggacctgacagacctgcccacctatgagcacatccagacagccctgagcagcaaggatggccgcctgcccaggacctaccgcctcttcagatag

SEQ ID NO: 163463 - DNA, 816 bp, synthetic construct
  misc_feature 1..816: note = Description of Artificial Sequence: Synthetic coding sequence
  source 1..816: mol_type = other DNA
tacacaggaggcatcgccaagctggagcgggacatgagcaatgtgtccctgggccccacccccatccctgagctgacccacatcatggtgggcctggagagctgcagcttcctggaggaggacttcatcccctttgctgtgctgaacatgatgatgggcggcggcggcagcttctctgctgggggccctgggaagggcatgttcagccggctgtacctgaatgtgctgaacagacaccactggatgtacaatgccaccagctaccaccacagctatgaggacaccggcctgctgtgcatccacgccagcgctgacccccggcaggtgcgggagatggtggagatcatcaccaaggagttcatcctgatgggcggcaccgtggacacagtggagctggagcgggccaagacccagctgacctccatgctgatgatgaacctggagagcaggcctgtgatctttgaagatgtgggccggcaggtgctggccaccaggagcaggaagctgccccatgagctgtgcaccctcatccgggagtacagaagaggcagcgagggcctgccccaggccagcgcccggctgcggggcggccgcctggccctgccccaggccgtggtgggcctgtggtacgtgcaccacacccagaacctgggccccagccctgtggtgctgagcagaggaggccagggccagggccggggcgtggccgacctggtgtccctgcccggccccaccatgcacctgctgcccccctggcaggtgaccccacccagcgcccccctgggcggcgctgtgaccacagcccagagctgctag

SEQ ID NO: 163464 - DNA, 1482 bp, synthetic construct
  misc_feature 1..1482: note = Description of Artificial Sequence: Synthetic coding sequence
  source 1..1482: mol_type = other DNA
atggctgctgccaccggccccagcttctggctgggcaatgagaccctgaaggtgcccctggccctgtttgccctgaaccggcagaggctgtgtgagcggctgaggaagaacccagctgtgcaggccggcagcatcgtggtgctgcagggcggggaggagacccagcgctactgcacagacacaggagtgctcttccggcaggagagcttcttccactgggcctttggagtgacagagcccggctgctatggagtgattgatgtggacaccgggaagagcaccctgtttgtgccccggctgcctgccagccacgccacctggatgggcaagatccacagcaaggagcacttcaaggagaagtatgctgtggatgatgtgcagtatgtggatgagatcgcctctgtgctgaccagccagaagcccagcgtgctgctgaccctgcggggcgtgaacacagacagcggctctgtgtgccgggaggccagctttgatggcatcagcaagtttgaggtgaacaacaccatcctgcaccctgagatcgtggagtgcagggtcttcaagacagacatggagctggaggtgctgcgctacaccaacaagatcagcagcgaggcccaccgggaggtgatgaaggctgtgaaggtgggcatgaaggagtatgagctggagagcctgtttgagcactactgctacagccggggcggcatgaggcacagcagctacacctgcatctgtggcagcggagaaaattctgctgtgctgcactacggccatgctggggccccaaatgacaggaccatccagaatggagacatgtgcctgtttgacatgggcggggagtactactgctttgccagtgacatcacctgcagcttccctgccaacgggaagttcaccgctgaccagaaggctgtgtatgaggccgtgctgcggagcagcagagctgtgatgggcgccatgaagccaggagtgtggtggccagacatgcaccggctggccgaccgcatccacctggaggagctggcccacatgggcatcctgagcggctctgtggatgccatggtgcaggcccacctgggcgctgtgttcatgccccacggcctgggccacttcctgggcattgatgtgcatgatgtgggcggctacccagagggcgtggagagaattgatgagcccggcctgcggagcctgaggacagcccggcacctgcagcccggcatggtgctgactgtggagcccggcatctacttcatcgaccacctgctggatgaggccctggccgaccctgcccgggccagcttcctgaaccgggaggtgctgcagcgcttccggggctttggaggagtgagaattgaagaagatgtggtggtgacagacagcggcatcgagctgctgacctgtgtgcccaggacagtggaggagattgaggcctgcatggccggctgtgacaaggccttcacccccttcagcggccccaagtag

SEQ ID NO: 163465 - DNA, 1359 bp, synthetic construct
  misc_feature 1..1359: note = Description of Artificial Sequence: Synthetic coding sequence
  source 1..1359: mol_type = other DNA
atggctgctgccaccggccccagcttctggctgggcaatgagaccctgaaggtgcccctggccctgtttgccctgaaccggcagaggctgtgtgagcggctgaggaagaacccagctgtgcaggccggcagcatcgtggtgctgcagggcggggaggagacccagcgctactgcacagacacaggagtgctcttccggcaggagagcttcttccactgggcctttggagtgacagagcccggctgctatggagtgattgatgtggacaccgggaagagcaccctgtttgtgccccggctgcctgccagccacgccacctggatgggcaagatccacagcaaggagcacttcaaggagaagtatgctgtggatgatgtgcagtatgtggatgagatcgcctctgtgctgaccagccagaagcccagcgtgctgctgaccctgcggggcgtgaacacagacagcggctctgtgtgccgggaggccagctttgatggcatcagcaagtttgaggtgaacaacaccatcctgcaccctgagatcgtggagtgcctgtttgagcactactgctacagcagaggaggcatgaggcacagcagctacacctgcatctgtggcagcggggagaacagcgctgtgctgcactacggccacgccggggccccaaatgacaggaccatccagaatggagacatgtgcctgtttgacatgggcggggagtactactgctttgccagtgacatcacctgcagcttccctgccaacgggaagttcaccgctgaccagaaggctgtgtatgaagctgtgctgcggagcagcagagctgtgatgggcgccatgaagccaggagtgtggtggccagacatgcaccggctggccgaccgcatccacctggaggagctggcccacatgggcatcctgagcggctctgtggatgccatggtgcaggcccacctgggcgctgtgttcatgcctcatggcctgggccacttcctgggcattgatgtgcatgatgtgggcggctacccagagggcgtggagagaattgatgagcccggcctgcggagcctgaggacagcccggcacctgcagcccggcatggtgctgactgtggagcccggcatctacttcatcgaccacctgctggatgaggccctggccgaccctgcccgggccagcttcctgaaccgggaggtgctgcagcgcttccggggctttggaggagtgcgcatcgaggaggatgtggtggtgacagattctggaattgagctgctgacctgtgtgcccaggacagtggaggagattgaggcctgcatggccggctgtgacaaggccttcacccccttcagcggccccaagtag

SEQ ID NO: 163466 - DNA, 1290 bp, synthetic construct
  misc_feature 1..1290: note = Description of Artificial Sequence: Synthetic coding sequence
  source 1..1290: mol_type = other DNA
atggctgctgccaccggccccagcttctggctgggcaatgagaccctgaaggtgcccctggccctgtttgccctgaaccggcagaggctgtgtgagcggctgaggaagaacccagctgtgcaggccggcagcatcgtggtgctgcagggcggggaggagacccagcgctactgcacagacacaggagtgctcttccggcagatcgcctctgtgctgaccagccagaagcccagcgtgctgctgaccctgcggggcgtgaacacagacagcggctctgtgtgccgggaggccagctttgatggcatcagcaagtttgaggtgaacaacaccatcctgcaccctgagatcgtggagtgcagggtcttcaagacagacatggagctggaggtgctgcgctacaccaacaagatcagcagcgaggcccaccgggaggtgatgaaggctgtgaaggtgggcatgaaggagtatgagctggagagcctgtttgagcactactgctacagccggggcggcatgaggcacagcagctacacctgcatctgtggcagcggagaaaattctgctgtgctgcactacggccatgctggggccccaaatgacaggaccatccagaatggagacatgtgcctgtttgacatgggcggggagtactactgctttgccagtgacatcacctgcagcttccctgccaacgggaagttcaccgctgaccagaaggctgtgtatgaggccgtgctgcggagcagcagagctgtgatgggcgccatgaagccaggagtgtggtggccagacatgcaccggctggccgaccgcatccacctggaggagctggcccacatgggcatcctgagcggctctgtggatgccatggtgcaggcccacctgggcgctgtgttcatgccccacggcctgggccacttcctgggcattgatgtgcatgatgtgggcggctacccagagggcgtggagagaattgatgagcccggcctgcggagcctgaggacagcccggcacctgcagcccggcatggtgctgactgtggagcccggcatctacttcatcgaccacctgctggatgaggccctggccgaccctgcccgggccagcttcctgaaccgggaggtgctgcagcgcttccggggctttggaggagtgagaattgaagaagatgtggtggtgacagacagcggcatcgagctgctgacctgtgtgcccaggacagtggaggagattgaggcctgcatggccggctgtgacaaggccttcacccccttcagcggccccaagtag

SEQ ID NO: 163467 - DNA, 354 bp, synthetic construct
  misc_feature 1..354: note = Description of Artificial Sequence: Synthetic coding sequence
  source 1..354: mol_type = other DNA
atgagggccagcagcttcctgattgtggtggtgttcctgattgctggcaccctggtgctggaggccgctgtgactggagtgcctgtgaagggccaggacacagtgaagggccgggtgcccttcaacggccaggaccctgtgaagggccaggtgtctgtgaagggccaggacaaggtgaaggcccaggagcctgtgaagggccctgtgtccaccaagccaggcagctgccccatcatcctgatccgctgtgccatgctgaacccccccaaccgctgcctgaaggacacagactgccccggcatcaagaagtgctgtgagggcagctgtggcatggcctgctttgtgccccagtag

SEQ ID NO: 163468 - DNA, 732 bp, synthetic construct
  misc_feature 1..732: note = Description of Artificial Sequence: Synthetic coding sequence
  source 1..732: mol_type = other DNA
atggcccggctgtggggcgccctgagcctgtggcccctgtgggccgctgtgccctggggcggcgctgctgctgtgggcgtgcgggcctgcagcagcacagctgccccagatggagtggagggccctgccctgcggcgcagctactggaggcacctgcggcggctggtgctgggccccccagagccccccttcagccacgtgtgccaggtgggggaccctgtgctgcggggcgtggccgcccctgtggagcgggcccagctgggcggccctgagctgcagaggctgacccagaggctggtgcaggtgatgagaagaagaagatgtgtgggcctgagcgccccccagctgggcgtgccccggcaggtgctggccctggagctgcctgaggccctgtgccgggagtgccccccccggcagagggccctgcggcagatggagcccttccccctgcgggtgtttgtgaaccccagcctgcgggtgctggacagccggctggtgaccttccctgagggctgtgagagcgtggccggcttcctggcctgtgtgccccgcttccaggccgtgcagatcagcggcctggaccccaacggggagcaggtggtgtggcaggccagcggctgggccgcccgcatcatccagcacgagatggaccacctgcagggctgcctcttcatcgacaagatggacagcaggaccttcaccaacgtgtactggatgaaggtgaatgactag

SEQ ID NO: 163469 - DNA, 294 bp, synthetic construct
  misc_feature 1..294: note = Description of Artificial Sequence: Synthetic coding sequence
  source 1..294: mol_type = other DNA
atggtgtttgtgagaagaccctggccagccctgaccaccgtgctgctggccctgctggtgtgcctgggcgccctggtggatgcctaccccatcaagccagaggccccccgggaggatgccagccctgaggagctgaaccgctactatgccagcctgcggcactacctgaacctggtgacccggcagagatatggcaagagagatggccctgacaccctgctgagcaagaccttcttcccagatggagaagatagacctgtgcgcagccgctctgagggccctgacctgtggtag

SEQ ID NO: 163470 - DNA, 1992 bp, synthetic construct
  misc_feature 1..1992: note = Description of Artificial Sequence: Synthetic coding sequence
  source 1..1992: mol_type = other DNA
atggcccccaagagggtggtgcagctgagcctgaagatgcccacccatgctgtgtgtgtggtgggcgtggaggcccacgtggacatccacagtgatgtgcccaagggggccaacagcttccgggtgtctggcagcagcggcgtggaggtgttcatggtgtacaacagaaccagggtgaaggagcccatcggcaaggcccgctggcccctggacacagatgctgacatggtggtgtctgtgggcacagccagcaaggagctgaaggacttcaaggtgcgggtgtcctactttggagagcaggaggaccaggccctgggccgctctgtgctgtacctgactggagtggacatcagcctggaggtggacaccggccgcacaggcaaggtgaagaggagccagggcgacaagaagacctggcgctggggccctgagggctacggggccatcctgctggtgaactgtgaccgggacaaccacaggtctgctgagccagacctgacccacagctggctgatgagcctggccgacctgcaggacatgagccccatgctgctgagctgcaatggaccagacaagctgtttgacagccacaagctggtgctgaatgtgcccttcagtgacagcaagagggtgcgggtcttctgtgcccggggcggcaacagcctgagtgactacaagcaggtgctgggcccccagtgcctgtcctatgaggtggagcggcagcccggggagcaggagatcaagttctacgtggagggcctgaccttcccagatgctgacttcctgggcctggtgtccctgtctgtgtccctggtggaccccggcaccctgcctgaggtgaccctcttcacagacacagtgggcttcaggatggccccctggatcatgacccccaacacccagcccccagaggagctgtatgtgtgccgggtgatggacacccacggcagcaatgagaagttcctggaggacatgagctacctgaccctgaaggccaactgcaagctgaccatctgcccccaggtggagaacagaaatgaccgctggatccaggatgagatggagtttggctacatcgaggccccccacaagagcttccctgtggtgtttgacagccccaggaacagaggcctgaaggacttcccctacaagaggatcctgggccctgactttggctacgtgacccgggagatccccctgcccggccccagcagcctggacagctttggaaacctggatgtgagcccccctgtgacagtgggcggcacagagtaccccctgggccgcatcctgattggcagcagcttccccaagagcggcggccggcagatggcccgggctgtgaggaacttcctgaaggcccagcaggtgcaggcccctgtggagctgtacagcgactggctgtctgtgggccacgtggatgagttcctgacctttgtgcccaccagtgaccagaagggcttccggctgctgctggccagccccagcgcctgcctgaagctgttccaggagaagaaggaggagggctacggggaggccgcccagtttgatggcctgaagcaccaggccaagaggagcatcaatgagatgctggccgacagacacctgcagagggacaacctgcacgcccagaagtgcatcgactggaacagaaatgtgctgaagcgggagctgggcctggccgagagtgacatcgtggacatcccccagctgttcttcctgaagaacttctatgcagaggccttcttcccagacatggtgaacatggtggtgctgggcaagtacctgggcatccccaagccctacggccccatcatcaatggccgctgctgcctggaggagaaggtgcagagcctgctggagcccctgggcctgcactgcatcttcattgatgactacctgagctaccacgagctgcagggcgagatccactgcggcaccaacgtgcggaggaagcccttccccttcaagtggtggaacatggtgccctag

SEQ ID NO: 163471 - DNA, 537 bp, synthetic construct
  misc_feature 1..537: note = Description of Artificial Sequence: Synthetic coding sequence
  source 1..537: mol_type = other DNA
atggcccgggctgtgaggaacttcctgaaggcccagcaggtgcaggcccctgtggagctgtacagcgactggctgtctgtgggccacgtggatgagttcctgacctttgtgcccaccagtgaccagaagggcttccggctgctgctggccagccccagcgcctgcctgaagctgttccaggagaagaaggaggagggctatggagaggccgcccagtttgatggcctgaagcaccaggccaagaggagcatcaatgagatgctggccgacagacacctgcagagggacaacctgcacgcccaggtgaacatggtggtgctgggcaagtacctgggcatccccaagccctacggccccatcatcaatggccgctgctgcctggaggagaaggtgcagagcctgctggagcccctgggcctgcactgcatcttcattgatgactacctgagctaccacgagctgcagggcgagatccactgcggcaccaacgtgcggaggaagcccttccccttcaagtggtggaacatggtgccctag

SEQ ID NO: 163472 - DNA, 405 bp, synthetic construct
  misc_feature 1..405: note = Description of Artificial Sequence: Synthetic coding sequence
  source 1..405: mol_type = other DNA
atgctggccgacagacacctgcagagggacaacctgcacgcccagaagtgcatcgactggaacagaaatgtgctgaagcgggagctgggcctggccgagagtgacatcgtggacatcccccagctgttcttcctgaagaacttctacgccgaggccttcttcccagacatggtgaacatggtggtgctgggcaagtacctgggcatccccaagccctacggccccatcatcaatggccgctgctgcctggaggagaaggtgcagagcctgctggagcccctgggcctgcactgcatcttcattgatgactacctgagctaccacgagctgcagggcgagatccactgcggcaccaacgtgcggaggaagcccttccccttcaagtggtggaacatggtgccctag

SEQ ID NO: 163473 - DNA, 663 bp, synthetic construct
  misc_feature 1..663: note = Description of Artificial Sequence: Synthetic coding sequence
  source 1..663: mol_type = other DNA
atggcccgggctgtgaggaacttcctgaaggcccagcaggtgcaggcccctgtggagctgtacagcgactggctgtctgtgggccacgtggatgagttcctgacctttgtgcccaccagtgaccagaagggcttccggctgctgctggccagccccagcgcctgcctgaagctgttccaggagaagaaggaggagggctatggagaggccgcccagtttgatggcctgaagcaccaggccaagaggagcatcaatgagatgctggccgacagacacctgcagagggacaacctgcacgcccagaagtgcatcgactggaacagaaatgtgctgaagcgggagctgggcctggccgagagtgacatcgtggacatcccccagctgttcttcctgaagaacttctacgccgaggccttcttcccagacatggtgaacatggtggtgctgggcaagtacctgggcatccccaagccctacggccccatcatcaatggccgctgctgcctggaggagaaggtgcagagcctgctggagcccctgggcctgcactgcatcttcattgatgactacctgagctaccacgagctgcagggcgagatccactgcggcaccaacgtgcggaggaagcccttccccttcaagtggtggaacatggtgccctag

SEQ ID NO: 163474 - DNA, 1314 bp, synthetic construct
  misc_feature 1..1314: note = Description of Artificial Sequence: Synthetic coding sequence
  source 1..1314: mol_type = other DNA
atgctgcgggagaggacagtgcggctgcagtatggcagccgggtggaggccgtgtatgtgctgggcacctacctgtggacagatgtgtacagcgctgccccagctggggcccagaccttcagcctgaagcacagcgagcacgtgtgggtggaggtggtgagagatggagaggccgaggaggtggccaccaacgggaagcagcgctggctgctgagccccagcaccaccctgcgggtgaccatgagccaggccagcacagaggccagcagtgacaaggtgacagtgaactactatgatgaggagggcagcatccccatcgaccaggccggcctcttcctgacagccatcgagatcagcctggatgtggatgctgacagagatggagtggtggagaagaacaaccccaagaaggcctcctggacctggggccctgagggccagggcgccatcctgctggtgaactgtgaccgggagaccccctggctgcccaaggaggactgcagagatgagaaggtgtacagcaaggaggacctgaaggacatgagccagatgatcctgcggaccaagggccctgaccggctgcctgctggctatgagatcgtgctgtacatctccatgtctgacagcgacaaggtgggcgtcttctacgtggagaaccccttcttcggccagcgctacatccacatcctgggccgcaggaagctgtaccacgtggtgaagtacacaggaggcagcgctgagctgctcttctttgtggagggcctgtgcttcccagatgagggcttcagcggcctggtgtccatccacgtgtccctgctggagtacatggcccaggacatccccctgacccccatcttcacagacaccgtcatcttccgcatcgccccctggatcatgacccccaacatcctgccccctgtgtctgtgtttgtgtgctgcatgaaggacaactacctgttcctgaaggaggtgaagaacctggtggagaagaccaactgtgagctgaaggtgtgcttccagtacctgaacagaggagaccgctggatccaggatgaaattgaatttggctacatcgaggccccccacaagggcttccctgtggtgctggacagccccagagatggcaacctgaaggacttccctgtgaaggagctgctgggccctgactttggctacgtgacccgggagcccctgtttgaatctgtgaccagcctggacagctttggaaacctggaggtgtccccacctgtgacagtgaatggcaagacctaccccctgggccgcatcctgattggcagcagcttccccctgtag

SEQ ID NO: 163475 - DNA, 1998 bp, synthetic construct
  misc_feature 1..1998: note = Description of Artificial Sequence: Synthetic coding sequence
  source 1..1998: mol_type = other DNA
atgctgcgggagaggacagtgcggctgcagtatggcagccgggtggaggccgtgtatgtgctgggcacctacctgtggacagatgtgtacagcgctgccccagctggggcccagaccttcagcctgaagcacagcgagcacgtgtgggtggaggtggtgagagatggagaggccgaggaggtggccaccaacgggaagcagcgctggctgctgagccccagcaccaccctgcgggtgaccatgagccaggccagcacagaggccagcagtgacaaggtgacagtgaactactatgatgaggagggcagcatccccatcgaccaggccggcctcttcctgacagccatcgagatcagcctggatgtggatgctgacagagatggagtggtggagaagaacaaccccaagaaggcctcctggacctggggccctgagggccagggcgccatcctgctggtgaactgtgaccgggagaccccctggctgcccaaggaggactgcagagatgagaaggtgtacagcaaggaggacctgaaggacatgagccagatgatcctgcggaccaagggccctgaccggctgcctgctggctatgagatcgtgctgtacatctccatgtctgacagcgacaaggtgggcgtcttctacgtggagaaccccttcttcggccagcgctacatccacatcctgggccgcaggaagctgtaccacgtggtgaagtacacaggaggcagcgctgagctgctcttctttgtggagggcctgtgcttcccagatgagggcttcagcggcctggtgtccatccacgtgtccctgctggagtacatggcccaggacatccccctgacccccatcttcacagacaccgtcatcttccgcatcgccccctggatcatgacccccaacatcctgccccctgtgtctgtgtttgtgtgctgcatgaaggacaactacctgttcctgaaggaggtgaagaacctggtggagaagaccaactgtgagctgaaggtgtgcttccagtacctgaacagaggagaccgctggatccaggatgaaattgaatttggctacatcgaggccccccacaagggcttccctgtggtgctggacagccccagagatggcaacctgaaggacttccctgtgaaggagctgctgggccctgactttggctacgtgacccgggagcccctgtttgaatctgtgaccagcctggacagctttggaaacctggaggtgtccccacctgtgacagtgaatggcaagacctaccccctgggccgcatcctgattggcagcagcttccccctgagcggcggccgcaggatgaccaaggtggtgcgggacttcctgaaggcccagcaggtgcaggcccctgtggagctgtacagcgactggctgactgtgggccacgtggatgagttcatgagctttgtgcccatccctggcaccaagaagttcctgctgctgatggccagcaccagcgcctgctacaagctgttccgggagaagcagaaggatggccatggagaggccatcatgttcaagggcctgggcggcatgagcagcaagaggatcaccatcaacaagatcctgagcaatgaaagcctggtgcaggagaacctgtacttccagcgctgcctggactggaacagagacatcctgaagaaggagctgggcctgacagagcaggacatcatcgacctgcctgccctcttcaagatggatgaggaccaccgggcccgggccttcttccccaacatggtgaacatgattgtgctggacaaggacctgggcatccccaagcccttcggcccccaggtggaggaggagtgctgcctggagatgcacgtgcggggcctgctggagcccctgggcctggagtgcaccttcattgatgacatcagcgcctaccacaagttcctgggggaggtgcactgcggcaccaacgtgcggaggaagcccttcaccttcaagtggtggcacatggtgccctag

SEQ ID NO: 163476 - DNA, 1650 bp, synthetic construct
  misc_feature 1..1650: note = Description of Artificial Sequence: Synthetic coding sequence
  source 1..1650: mol_type = other DNA
atgctgcgggagaggacagtgcggctgcagtatggcagccgggtggaggccgtgtatgtgctgggcacctacctgtggacagatgtgtacagcgctgccccagctggggcccagaccttcagcctgaagcacagcgagcacgtgtgggtggaggtggtgagagatggagaggccgaggaggtggccaccaacgggaagcagcgctggctgctgagccccagcaccaccctgcgggtgaccatgagccaggccagcacagaggccagcagtgacaaggtgacagtgaactactatgatgaggagggcagcatccccatcgaccaggccggcctcttcctgacagccatcgagatcagcctggatgtggatgctgacagagatggagtggtggagaagaacaaccccaagaagaccaggagcagcgccaatgccatcagcacctcctgggccggcggcagcagcaccatgtggagcagcaccagggtggcccccaggagctgctgcagctcctggaaggcctctgtgagccccacccgggccagccaggcctggagccccagcatgtctgcctgctggagcacctggcccagcatgaaggacaactacctgttcctgaaggaggtgaagaacctggtggagaagaccaactgtgagctgaaggtgtgcttccagtacctgaacagaggagaccgctggatccaggatgaaattgaatttggctacatcgaggccccccacaagggcttccctgtggtgctggacagccccagagatggcaacctgaaggacttccctgtgaaggagctgctgggccctgactttggctacgtgacccgggagcccctgtttgaatctgtgaccagcctggacagctttggaaacctggaggtgtccccacctgtgacagtgaatggcaagacctaccccctgggccgcatcctgattggcagcagcttccccctgagcggcggccgcaggatgaccaaggtggtgcgggacttcctgaaggcccagcaggtgcaggcccctgtggagctgtacagcgactggctgactgtgggccacgtggatgagttcatgagctttgtgcccatccctggcaccaagaagttcctgctgctgatggccagcaccagcgcctgctacaagctgttccgggagaagcagaaggatggccatggagaggccatcatgttcaagggcctgggcggcatgagcagcaagaggatcaccatcaacaagatcctgagcaatgaaagcctggtgcaggagaacctgtacttccagcgctgcctggactggaacagagacatcctgaagaaggagctgggcctgacagagcaggacatcatcgacctgcctgccctcttcaagatggatgaggaccaccgggcccgggccttcttccccaacatggtgaacatgattgtgctggacaaggacctgggcatccccaagcccttcggcccccaggtggaggaggagtgctgcctggagatgcacgtgcggggcctgctggagcccctgggcctggagtgcaccttcattgatgacatcagcgcctaccacaagttcctgggggaggtgcactgcggcaccaacgtgcggaggaagcccttcaccttcaagtggtggcacatggtgccctag

SEQ ID NO: 163477 - DNA, 1995 bp, synthetic construct
  misc_feature 1..1995: note = Description of Artificial Sequence: Synthetic coding sequence
  source 1..1995: mol_type = other DNA
atgagcctgcagagaattgtgcgggtgtccctggagcaccccaccagcgctgtgtgtgtggccggcgtggagaccctggtggacatctacggctctgtgcctgagggcacagagatgtttgaggtgtatggcaccccaggagtggacatctacatcagccccaacatggagcggggccgggagagagctgacacccggcgctggaggtttgatgccaccctggagatcatcgtggtgatgaacagccccagcaatgacctgaatgacagccacgtgcagatctcctaccacagcagccatgagcccctgcccctggcctatgctgtgctgtacctgacctgtgtggacatcagcctggactgtgacctgaactgtgagggccggcaggacaggaactttgtggacaagaggcagtgggtgtggggccccagcggctacggcggcatcctgctggtgaactgtgacagagatgaccccagctgtgatgtgcaggacaactgtgaccagcacgtgcactgcctgcaggacctggaggacatgtctgtgatggtgctgcggacccagggccctgctgccctgtttgatgaccacaagctggtgctgcacaccagcagctatgatgccaagagggcccaggtgttccacatctgtggcccagaagatgtgtgtgaggcctaccgccacgtgctgggccaggacaaggtgtcctatgaggtgccccggctgcatggagatgaggagcgcttctttgtggagggcctgtccttcccagatgctggcttcaccggcctcatctccttccacgtgaccctgctggatgacagcaatgaagacttcagcgccagccccatcttcacagacacagtggtgttccgggtggccccctggatcatgacccccagcaccctgccccccctggaggtgtatgtgtgccgggtgaggaacaacacctgctttgtggatgctgtggccgagctggccaggaaggccggctgcaagctgaccatctgcccccaggctgaaaatagaaatgaccgctggatccaggatgagatggagctgggctacgtgcaggccccccacaagaccctgcctgtggtgtttgacagccccagaaatggagagctgcaggacttcccctacaagaggatcctgggccctgactttggctacgtgacccgggagccccgggacagatctgtgtctggcctggacagctttggaaacctggaggtgagcccccctgtggtggccaacgggaaggagtaccccctgggccgcatcctgattggaggcaacctgcccggcagcagcggccggcgggtgacccaggtggtgcgggacttcctgcacgcccagaaggtgcagccccctgtggagctgtttgtggactggctggccgtgggccacgtggatgagttcctgagctttgtgcctgccccagatggcaagggcttcaggatgctgctggccagccctggggcctgcttcaagctgttccaggagaagcagaagtgtggccacggccgggccctgctcttccagggcgtggtggatgatgagcaggtgaagaccatcagcatcaaccaggtgctgagcaacaaggacctgatcaactacaacaagtttgtgcagagctgcatcgactggaaccgggaggtgctgaagcgggagctgggcctggctgaatgtgacatcatcgacatcccccagctgttcaagacagagaggaagaaggccacagccttcttcccagacctggtgaacatgctggtgctgggcaagcacctgggcatccccaagcccttcggccccatcatcaatggctgctgctgcctggaggagaaggtgcgcagcctgctggagcccctgggcctgcactgcaccttcattgatgacttcaccccctaccacatgctgcatggagaggtgcactgcggcaccaacgtgtgcaggaagcccttctccttcaagtggtggaacatggtgccctag

SEQ ID NO: 163478 - DNA, 645 bp, synthetic construct
  misc_feature 1..645: note = Description of Artificial Sequence: Synthetic coding sequence
  source 1..645: mol_type = other DNA
atggcccagggcaccctcatccgggtgaccccagagcagcccacccatgctgtgtgtgtgctgggcaccctgacccagctggacatctgcagcagcgcccctgaggactgcaccagcttcagcatcaatgccagccctggggtggtggtggacatcgcccacggccccccagccaagaagaagagcacaggcagcagcacctggcccctggaccccggggtggaggtgaccctgaccatgaaggtggccagcggcagcactggagaccagaaggtgcagatctcctactacggccccaagaccccacctgtgaaggccctgctgtacctgactggagtggatggagtgagcccctgccaccctggctggagcgccatgcatgacctggcccactgcaacctgcggctgcaggtgcaggccatcctgtgcttctctgtgcccagctcctggaccaccggggcctgccaccacgcctggctgatctttgtgttcctggtggagatggagttccaccacgtgggccaggccggcctggagctgctgaccagcggggacctgcctgccagcggcagccagagcgcccgcatcaccggcatgaaccactgtgcccggcccagcatcttcctgatcctgaagtacctgtag

SEQ ID NO: 163479 - DNA, 1992 bp, synthetic construct
  misc_feature 1..1992: note = Description of Artificial Sequence: Synthetic coding sequence
  source 1..1992: mol_type = other DNA
atggcccagggcaccctcatccgggtgaccccagagcagcccacccatgctgtgtgtgtgctgggcaccctgacccagctggacatctgcagcagcgcccctgaggactgcaccagcttcagcatcaatgccagccctggggtggtggtggacatcgcccacggccccccagccaagaagaagagcacaggcagcagcacctggcccctggaccccggggtggaggtgaccctgaccatgaaggtggccagcggcagcactggagaccagaaggtgcagatctcctactacggccccaagaccccacctgtgaaggccctgctgtacctgactggagtggagatcagcctgtgtgccgacatcaccaggacaggcaaggtgaagcccaccagggctgtgaaggaccagaggacctggacctggggcccctgtggccagggcgccatcctgctggtgaactgtgaccgggacaacctggagagcagcgccatggactgtgaagatgatgaggtgctggacagcgaggacctgcaggacatgagcctgatgaccctgagcaccaagacccccaaggacttcttcaccaaccacaccctggtgctgcacgtggcccggtctgagatggacaaggtgcgggtcttccaggccacccggggcaagctgagcagcaagtgcagcgtggtgctgggccccaagtggcccagccactacctgatggtgcctgggggcaagcacaacatggacttctacgtggaggccctggccttcccagacacagacttccctggcctcatcaccctgaccatcagcctgctggacaccagcaacctggagctgcctgaggccgtggtgttccaggacagcgtggtgttccgggtggccccctggatcatgacccccaacacccagcccccccaggaggtgtatgcctgcagcatctttgaaaatgaagacttcctgaagtctgtgaccaccctggccatgaaggccaagtgcaagctgaccatctgcccagaggaggagaacatggatgaccagtggatgcaggatgagatggagatcggctacatccaggccccccacaagaccctgcctgtggtgtttgacagccccaggaacagaggcctgaaggagttccccatcaagagggtgatgggccctgactttggctacgtgacccggggcccccagacaggaggcatcagcggcctggacagctttggaaacctggaggtgagcccccctgtgacagtgcggggcaaggagtaccccctgggccgcatcctgtttggagacagctgctaccccagcaatgacagccggcagatgcaccaggccctgcaggacttcctgagcgcccagcaggtgcaggcccctgtgaagctgtacagcgactggctgtctgtgggccacgtggatgagttcctgagctttgtgcctgccccagacaggaagggcttccggctgctgctggccagccccaggagctgctacaagctgttccaggagcagcagaatgaaggacatggagaggccctgctgtttgagggcatcaagaagaagaagcagcagaagatcaagaacatcctgagcaacaagaccctgcgggagcacaacagctttgtggagcgctgcatcgactggaaccgggagctgctgaagcgggagctgggcctggccgagagtgacatcatcgacatcccccagctgttcaagctgaaggagttcagcaaggccgaggccttcttccccaacatggtgaacatgctggtgctgggcaagcacctgggcatccccaagcccttcggccctgtgatcaatggccgctgctgcctggaggagaaggtgtgcagcctgctggagcccctgggcctgcagtgcaccttcatcaatgacttcttcacctaccacatccgccacggggaggtgcactgcggcaccaacgtgcggaggaagcccttctccttcaagtggtggaacatggtgccctag

SEQ ID NO: 163480 - DNA, 384 bp, synthetic construct
  misc_feature 1..384: note = Description of Artificial Sequence: Synthetic coding sequence
  source 1..384: mol_type = other DNA
atggcccagggcaccctcatccgggtgaccccagagcagcccacccatgctgtgtgtgtgctgggcaccctgacccagctggacatctgcagcagcgcccctgaggactgcaccagcttcagcatcaatgccagccctggggtggtggtggacatcgcccacggccccccagccaagaagaagagcacaggcagcagcacctggcccctggaccccggggtggaggtgaccctgaccatgaaggtggccagcggcagcactggagaccagaaggtgcagatctcctactacggccccaagaccccacctgtgaaggccctgctgtacctgactggagtggatggagtgagcccctgccaccctggctggagcgccatggcctag

SEQ ID NO: 163481 - DNA, 2628 bp, synthetic construct
  misc_feature 1..2628: note = Description of Artificial Sequence: Synthetic coding sequence
  source 1..2628: mol_type = other DNA
atggacacagtgcaccacatgctgctgtttggctgcaacatgcccagcagcacaggcagctactggttctgtgatgagggcacctgcacagacaaggccaacatcctgtatgcctgggccagaaatgccccacccacccggctgcccaagggcgtgggcttccgggtgggcggggagaccggcagcaagtactttgtgctgcaggtgcactatggagacatcagcgccttccgggacaacaacaaggactgcagcggcgtgtccctgcacctgacccggctgccccagcccctgattgctggcatgtacctgatgatgtctgtggacaccgtcatcccagctggggagaaggtggtgaacagcgacatcagctgccactacaagaactaccccatgcacgtgtttgcctacagagtgcacacccaccacctgggcaaggtggtgtctggctacagagtgagaaatggccagtggaccctgattggccggcagagcccccagctgccccaggccttctaccctgtgggccaccctgtggatgtgtcctttggagacctgctggccgcccgctgtgtgttcaccggggagggccgcacagaggccacccacatcggcggcaccagcagtgatgagatgtgcaacctgtacatcatgtactacatggaggccaagcatgctgtgtccttcatgacctgcacccagaatgtggccccagacatgttccgcaccatccccccagaggccaacatccccatccctgtgaagagtgacatggtgatgatgcatgagcaccacaaggagacagagtacaaggacaagatccccctgctgcagcagcccaagcgggaggaggaggaggtgctggaccagggcgacttctacagcctgctgagcaagctgctgggggagagagaagatgtggtgcacgtgcacaagtacaaccccacagagaaggccgagagcgagagtgacctggtggccgagatcgccaacgtggtgcagaagaaggacctgggccgcagtgatgcccgggagggcgctgagcacgagagaggaaatgccatcctggtgcgggaccgcatccacaagttccaccggctggtgtccaccctgcggcccccagagagcagggtcttcagcctgcagcagcccccacctggagagggcacctgggagcctgagcacactggagacttccacatggaggaggccctggactggccaggagtgtacctgctgcccggccaggtgtctggagtggccctggaccccaagaacaacctggtgatcttccacagaggagaccacgtgtgggatggcaacagctttgacagcaagtttgtgtaccagcagatcggcctgggccccatcgaggaggacaccatcctggtgattgaccccaacaatgctgctgtgctgcagagcagcggcaagaacctcttctacctgccccacggcctgagcattgacaaggatggcaactactgggtgacagatgtggccctgcaccaggtgttcaagctggaccccaacaacaaggagggccctgtgctgatcctgggccgctccatgcagcccggcagtgaccagaaccacttctgccagcccacagatgtggccgtggaccccggcactggagccatctacgtgtctgatggctactgcaacagcagaattgtgcagttcagccccagcggcaagttcatcacccagtggggcgaggagagcagcggcagcagccccctgcccggccagttcaccgtgccccacagcctggccctggtgcccctgctgggccagctgtgtgtggccgacagagaaaatggccgcatccagtgcttcaagacagacaccaaggagtttgtgcgggagatcaagcacagcagctttggaagaaatgtgtttgccatctcctacatccctggcctgctgtttgctgtgaatggcaagccccactttggagaccaggagcctgtgcagggctttgtgatgaacttcagcaatggagagatcatcgacatcttcaagcctgtgaggaagcactttgacatgcctcatgacatcgtggcctctgaagatggcaccgtgtacatcggagatgcccacaccaacacagtgtggaagttcaccctgacagagaagctggagcacaggtctgtgaagaaggccggcatcgaggtgcaggagatcaaggccgaggccgtggtggagaccaagatggagaacaagcccaccagcagcgagctgcagaagatgcaggagaagcagaagctgatcaaggagcccggcagcggcgtgcctgtggtgctgatcaccaccctgctggtgattcctgtggtggtgctgctggccatcgccatcttcatccgctggaagaagagccgggcctttggagacagcgagcacaagctggagaccagcagcggccgggtgctgggccgcttccggggcaagggcagcggcggcctgaacctgggcaacttctttgccagcaggaagggctacagcaggaagggctttgaccggctgagcacagagggcagtgaccaggagaaggaggatgatggcagcgagagcgaggaggagtacagcgcccccctgcctgccctggcccccagcagcagctag

SEQ ID NO: 163482 - DNA, 2925 bp, synthetic construct
  misc_feature 1..2925: note = Description of Artificial Sequence: Synthetic coding sequence
  source 1..2925: mol_type = other DNA
atggccggccgggtgcccagcctgctggtgctgctggtgttccccagcagctgcctggccttccgcagccccctgagcgtcttcaagcgcttcaaggagaccacccggcccttcagcaatgaatgtctgggcaccaccaggcctgtggtgcccatcgacagcagtgactttgccctggacatccgcatgcctggggtgacccccaagcagagcgacacctacttctgcatgtccatgagaattcctgtggatgaggaggccttcgtcatcgacttcaagccccgggcctccatggacacagtgcaccacatgctgctgtttggctgcaacatgcccagcagcacaggcagctactggttctgtgatgagggcacctgcacagacaaggccaacatcctgtatgcctgggccagaaatgccccacccacccggctgcccaagggcgtgggcttccgggtgggcggggagaccggcagcaagtactttgtgctgcaggtgcactacggggacatcagcgccttccgggacaacaacaaggactgcagcggcgtgtccctgcacctgacccggctgccccagcccctgattgctggcatgtacctgatgatgtctgtggacaccgtcatcccagctggggagaaggtggtgaacagcgacatcagctgccactacaagaactaccccatgcacgtgtttgcctacagagtgcacacccaccacctgggcaaggtggtgtctggctacagagtgagaaatggccagtggaccctcatcggccggcagagcccccagctgccccaggccttctaccctgtgggccaccctgtggatgtgtcctttggagacctgctggccgcccgctgtgtgttcaccggggagggccgcacagaggccacccacatcggcggcaccagcagtgatgagatgtgcaacctgtacatcatgtactacatggaggccaagcatgctgtgtccttcatgacctgcacccagaatgtggccccagacatgttccgcaccatccccccagaggccaacatccccatccctgtgaagagtgacatggtgatgatgcatgagcaccacaaggagacagagtacaaggacaagatccccctgctgcagcagcccaagcgggaggaggaggaggtgctggaccagggcgacttctacagcctgctgagcaagctgctgggggagcgggaggatgtggtgcacgtgcacaagtacaaccccacagagaaggccgagagcgagagtgacctggtggccgagatcgccaacgtggtgcagaagaaggacctgggccgcagtgatgcccgggagggcgctgagcacgagagaggaaatgccatcctggtgcgggaccgcatccacaagttccaccggctggtgtccaccctgcggcccccagagagcagggtcttcagcctgcagcagcccccacctggagagggcacctgggagcctgagcacactggagacttccacatggaggaggccctggactggccaggagtgtacctgctgcccggccaggtgtctggagtggccctggaccccaagaacaacctggtgatcttccacagaggagaccacgtgtgggatggcaacagctttgacagcaagtttgtgtaccagcagatcggcctgggccccatcgaggaggacaccatcctggtgattgaccccaacaatgctgctgtgctgcagagcagcggcaagaacctcttctacctgccccacggcctgagcattgacaaggatggcaactactgggtgacagatgtggccctgcaccaggtgttcaagctggaccccaacaacaaggagggccctgtgctgatcctgggccgctccatgcagcccggcagtgaccagaaccacttctgccagcccacagatgtggccgtggaccccggcaccggggccatctacgtgtctgatggctactgcaacagccgcatcgtgcagttcagccccagcggcaagttcatcacccagtggggcgaggagagcagcggcagcagccccctgcccggccagttcaccgtgccccacagcctggccctggtgcccctgctgggccagctgtgtgtggccgaccgggagaatggccgcatccagtgcttcaagacagacaccaaggagtttgtgcgggagatcaagcacagcagctttggaagaaatgtgtttgccatctcctacatccctggcctgctgtttgctgtgaatggcaagccccactttggagaccaggagcctgtgcagggctttgtgatgaacttcagcaatggagagatcatcgacatcttcaagcctgtgaggaagcactttgacatgcctcatgacatcgtggcctctgaagatggcaccgtgtacatcggagatgcccacaccaacacagtgtggaagttcaccctgacagagaagctggagcacaggtctgtgaagaaggccggcatcgaggtgcaggagatcaaggaggccgaggccgtggtggagaccaagatggagaacaagcccaccagcagcgagctgcagaagatgcaggagaagcagaagctgatcaaggagcccggcagcggcgtgcctgtggtgctgatcaccaccctgctggtgattcctgtggtggtgctgctggccatcgccatcttcatccgctggaagaagagccgggcctttggagctgacagcgagcacaagctggagaccagcagcggccgggtgctgggccgcttccggggcaaaggaagtggcggcctgaacctgggcaacttctttgccagcaggaagggctacagcaggaaaggatttgaccggctgagcacagagggcagtgaccaggagaaggaggatgatggcagcgagagcgaggaggagtacagcgcccccctgcctgccctggcccccagcagcagctag

SEQ ID NO: 163483 - DNA, 2664 bp, synthetic construct
  misc_feature 1..2664: note = Description of Artificial Sequence: Synthetic coding sequence
  source 1..2664: mol_type = other DNA
atggccggccgggtgcccagcctgctggtgctgctggtgttccccagcagctgcctggccttccgcagccccctgagcgtcttcaagcgcttcaaggagaccacccggcccttcagcaatgaatgtctgggcaccaccaggcctgtggtgcccatcgacagcagtgactttgccctggacatccgcatgcctggggtgacccccaagcagagcgacacctacttctgcatgtccatgagaattcctgtggatgaggaggccttcgtcatcgacttcaagccccgggcctccatggacacagtgcaccacatgctgctgtttggctgcaacatgcccagcagcacaggcagctactggttctgtgatgagggcacctgcacagacaaggccaacatcctgtatgcctgggccagaaatgccccacccacccggctgcccaagggcgtgggcttccgggtgggcggggagaccggcagcaagtactttgtgctgcaggtgcactacggggacatcagcgccttccgggacaacaacaaggactgcagcggcgtgtccctgcacctgacccggctgccccagcccctgattgctggcatgtacctgatgatgtctgtggacaccgtcatcccagctggggagaaggtggtgaacagcgacatcagctgccactacaagaactaccccatgcacgtgtttgcctacagagtgcacacccaccacctgggcaaggtggtgtctggctacagagtgagaaatggccagtggaccctcatcggccggcagagcccccagctgccccaggccttctaccctgtgggccaccctgtggatgtgtcctttggagacctgctggccgcccgctgtgtgttcaccggggagggccgcacagaggccacccacatcggcggcaccagcagtgatgagatgtgcaacctgtacatcatgtactacatggaggccaagcatgctgtgtccttcatgacctgcacccagaatgtggccccagacatgttccgcaccatccccccagaggccaacatccccatccctgtgaagagtgacatggtgatgatgcatgagcaccacaaggagacagagtacaaggacaagatccccctgctgcagcagcccaagcgggaggaggaggaggtgctggaccagggcgacttctacagcctgctgagcaagctgctgggggagcgggaggatgtggtgcacgtgcacaagtacaaccccacagagaaggccgagagcgagagtgacctggtggccgagatcgccaacgtggtgcagaagaaggacctgggccgcagtgatgcccgggagggcgctgagcacgagagaggaaatgccatcctggtgcgggaccgcatccacaagttccaccggctggtgtccaccctgcggcccccagagagcagggtcttcagcctgcagcagcccccacctggagagggcacctgggagcctgagcacactggagacttccacatggaggaggccctggactggccaggagtgtacctgctgcccggccaggtgtctggagtggccctggaccccaagaacaacctggtgatcttccacagaggagaccacgtgtgggatggcaacagctttgacagcaagtttgtgtaccagcagatcggcctgggccccatcgaggaggacaccatcctggtgattgaccccaacaatgctgctgtgctgcagagcagcggcaagaacctcttctacctgccccacggcctgagcattgacaaggatggcaactactgggtgacagatgtggccctgcaccaggtgttcaagctggaccccaacaacaaggagggccctgtgctgatcctgggccgctccatgcagcccggcagtgaccagaaccacttctgccagcccacagatgtggccgtggaccccggcaccggggccatctacgtgtctgatggctactgcaacagccgcatcgtgcagttcagccccagcggcaagttcatcacccagtggggcgaggagagcagcggcagcagccccctgcccggccagttcaccgtgccccacagcctggccctggtgcccctgctgggccagctgtgtgtggccgaccgggagaatggccgcatccagtgcttcaagacagacaccaaggagtttgtgcgggagatcaagcacagcagctttggaagaaatgtgtttgccatctcctacatccctggcctgctgtttgctgtgaatggcaagccccactttggagaccaggagcctgtgcagggctttgtgatgaacttcagcaatggagagatcatcgacatcttcaagcctgtgaggaagcactttgacatgcctcatgacatcgtggcctctgaagatggcaccgtgtacatcggagatgcccacaccaacacagtgtggaagttcaccctgacagagaagctggagcacaggtctgtgaagaaggccggcatcgaggtgcaggagatcaagggcaagggcagcggcggcctgaacctgggcaacttctttgccagcaggaagggctacagcaggaagggctttgaccggctgagcacagagggcagtgaccaggagaaggaggatgatggcagcgagagcgaggaggagtacagcgcccccctgcctgccctggcccccagcagcagctag

SEQ ID NO: 163484 - DNA, 2601 bp, synthetic construct
  misc_feature 1..2601: note = Description of Artificial Sequence: Synthetic coding sequence
  source 1..2601: mol_type = other DNA
atggccggccgggtgcccagcctgctggtgctgctggtgttccccagcagctgcctggccttccgcagccccctgagcgtcttcaagcgcttcaaggagaccacccggcccttcagcaatgaatgtctgggcaccaccaggcctgtggtgcccatcgacagcagtgactttgccctggacatccgcatgcctggggtgacccccaagcagagcgacacctacttctgcatgtccatgagaattcctgtggatgaggaggccttcgtcatcgacttcaagccccgggcctccatggacacagtgcaccacatgctgctgtttggctgcaacatgcccagcagcacaggcagctactggttctgtgatgagggcacctgcacagacaaggccaacatcctgtatgcctgggccagaaatgccccacccacccggctgcccaagggcgtgggcttccgggtgggcggggagaccggcagcaagtactttgtgctgcaggtgcactacggggacatcagcgccttccgggacaacaacaaggactgcagcggcgtgtccctgcacctgacccggctgccccagcccctgattgctggcatgtacctgatgatgtctgtggacaccgtcatcccagctggggagaaggtggtgaacagcgacatcagctgccactacaagaactaccccatgcacgtgtttgcctacagagtgcacacccaccacctgggcaaggtggtgtctggctacagagtgagaaatggccagtggaccctcatcggccggcagagcccccagctgccccaggccttctaccctgtgggccaccctgtggatgtgtcctttggagacctgctggccgcccgctgtgtgttcaccggggagggccgcacagaggccacccacatcggcggcaccagcagtgatgagatgtgcaacctgtacatcatgtactacatggaggccaagcatgctgtgtccttcatgacctgcacccagaatgtggccccagacatgttccgcaccatccccccagaggccaacatccccatccctgtgaagagtgacatggtgatgatgcatgagcaccacaaggagacagagtacaaggacaagatccccctgctgcagcagcccaagcgggaggaggaggaggtgctggaccaggacttccacatggaggaggccctggactggccaggagtgtacctgctgcccggccaggtgtctggagtggccctggaccccaagaacaacctggtgatcttccacagaggagaccacgtgtgggatggcaacagctttgacagcaagtttgtgtaccagcagatcggcctgggccccatcgaggaggacaccatcctggtgattgaccccaacaatgctgctgtgctgcagagcagcggcaagaacctcttctacctgccccacggcctgagcattgacaaggatggcaactactgggtgacagatgtggccctgcaccaggtgttcaagctggaccccaacaacaaggagggccctgtgctgatcctgggccgctccatgcagcccggcagtgaccagaaccacttctgccagcccacagatgtggccgtggaccccggcactggagccatctacgtgtctgatggctactgcaacagcagaattgtgcagttcagccccagcggcaagttcatcacccagtggggcgaggagagcagcggcagcagccccctgcccggccagttcaccgtgccccacagcctggccctggtgcccctgctgggccagctgtgtgtggccgacagagaaaatggccgcatccagtgcttcaagacagacaccaaggagtttgtgcgggagatcaagcacagcagctttggaagaaatgtgtttgccatctcctacatccctggcctgctgtttgctgtgaatggcaagccccactttggagaccaggagcctgtgcagggctttgtgatgaacttcagcaatggagagatcatcgacatcttcaagcctgtgaggaagcactttgacatgcctcatgacatcgtggcctctgaagatggcaccgtgtacatcggagatgcccacaccaacacagtgtggaagttcaccctgacagagaagctggagcacaggtctgtgaagaaggccggcatcgaggtgcaggagatcaaggaggccgaggccgtggtggagaccaagatggagaacaagcccaccagcagcgagctgcagaagatgcaggagaagcagaagctgatcaaggagcccggcagcggcgtgcctgtggtgctgatcaccaccctgctggtgattcctgtggtggtgctgctggccatcgccatcttcatccgctggaagaagagccgggccttcggggacagcgagcacaagctggagaccagcagcggccgggtgctgggccgcttccggggcaaaggaagtggcggcctgaacctgggcaacttctttgccagcaggaagggctacagcaggaaaggatttgaccggctgagcacagagggcagtgaccaggagaaggaggatgatggcagcgagagcgaggaggagtacagcgcccccctgcctgccctggcccccagcagcagctag

SEQ ID NO: 163485 - DNA, 1008 bp, synthetic construct
  misc_feature 1..1008: note = Description of Artificial Sequence: Synthetic coding sequence
  source 1..1008: mol_type = other DNA
atgcagcccggcagtgaccagaaccacttctgccagcccacagatgtggccgtggaccccggcaccggggccatctacgtgtctgatggctactgcaacagccgcatcgtgcagttcagccccagcggcaagttcatcacccagtggggcgaggagagcagcggcagcagccccctgcccggccagttcaccgtgccccacagcctggccctggtgcccctgctgggccagctgtgtgtggccgaccgggagaatggccgcatccagtgcttcaagacagacaccaaggagtttgtgcgggagatcaagcacagcagctttggaagaaatgtgtttgccatctcctacatccctggcctgctgtttgctgtgaatggcaagccccactttggagaccaggagcctgtgcagggctttgtgatgaacttcagcaatggagagatcatcgacatcttcaagcctgtgaggaagcactttgacatgcctcatgacatcgtggcctctgaagatggcaccgtgtacatcggagatgcccacaccaacacagtgtggaagttcaccctgacagagaagctggagcacaggtctgtgaagaaggccggcatcgaggtgcaggagatcaaggaggccgaggccgtggtggagaccaagatggagaacaagcccaccagcagcgagctgcagaagatgcaggagaagcagaagctgatcaaggagcccggcagcggcgtgcctgtggtgctgatcaccaccctgctggtgattcctgtggtggtgctgctggccatcgccatcttcatccgctggaagaagagccgggcctttggaggcaagggcagcggcggcctgaacctgggcaacttctttgccagcaggaagggctacagcaggaagggctttgaccggctgagcacagagggcagtgaccaggagaaggaggatgatggcagcgagagcgaggaggagtacagcgcccccctgcctgccctggcccccagcagcagctag

SEQ ID NO: 163486 - DNA, 468 bp, synthetic construct
  misc_feature 1..468: note = Description of Artificial Sequence: Synthetic coding sequence
  source 1..468: mol_type = other DNA
atgcatgagcaccacaaggagacagagtacaaggacaagatccccctgctgcagcagcccaagcgggaggaggaggaggtgctggaccagggcgacttctacagcctgctgagcaagctgctgggggagagagaagatgtggtgcacgtgcacaagtacaaccccacagagaaggccgagagcgagagtgacctggtggccgagatcgccaacgtggtgcagaagaaggacctgggccgcagtgatgcccgggagggcgctgagcacgagagaggaaatgccatcctggtgcgggaccgcatccacaagttccaccggctggtgtccaccctgcggcccccagagagcagggtcttcagcctgcagcagcccccacctggagagggcacctgggagcctgagcacactggagcccggcgggaggacatgaagtgcttccagtgcaaggagatgatctctgtgcagtag

SEQ ID NO: 163487 - DNA, 2922 bp, synthetic construct
  misc_feature 1..2922: note = Description of Artificial Sequence: Synthetic coding sequence
  source 1..2922: mol_type = other DNA
atggccggccgggtgcccagcctgctggtgctgctggtgttccccagcagctgcctggccttccgcagccccctgagcgtcttcaagcgcttcaaggagaccacccggcccttcagcaatgaatgtctgggcaccaccaggcctgtggtgcccatcgacagcagtgactttgccctggacatccgcatgcctggggtgacccccaagcagagcgacacctacttctgcatgtccatgagaattcctgtggatgaggaggccttcgtcatcgacttcaagccccgggcctccatggacacagtgcaccacatgctgctgtttggctgcaacatgcccagcagcacaggcagctactggttctgtgatgagggcacctgcacagacaaggccaacatcctgtatgcctgggccagaaatgccccacccacccggctgcccaagggcgtgggcttccgggtgggcggggagaccggcagcaagtactttgtgctgcaggtgcactacggggacatcagcgccttccgggacaacaacaaggactgcagcggcgtgtccctgcacctgacccggctgccccagcccctgattgctggcatgtacctgatgatgtctgtggacaccgtcatcccagctggggagaaggtggtgaacagcgacatcagctgccactacaagaactaccccatgcacgtgtttgcctacagagtgcacacccaccacctgggcaaggtggtgtctggctacagagtgagaaatggccagtggaccctcatcggccggcagagcccccagctgccccaggccttctaccctgtgggccaccctgtggatgtgtcctttggagacctgctggccgcccgctgtgtgttcaccggggagggccgcacagaggccacccacatcggcggcaccagcagtgatgagatgtgcaacctgtacatcatgtactacatggaggccaagcatgctgtgtccttcatgacctgcacccagaatgtggccccagacatgttccgcaccatccccccagaggccaacatccccatccctgtgaagagtgacatggtgatgatgcatgagcaccacaaggagacagagtacaaggacaagatccccctgctgcagcagcccaagcgggaggaggaggaggtgctggaccagggcgacttctacagcctgctgagcaagctgctgggggagcgggaggatgtggtgcacgtgcacaagtacaaccccacagagaaggccgagagcgagagtgacctggtggccgagatcgccaacgtggtgcagaagaaggacctgggccgcagtgatgcccgggagggcgctgagcacgagagaggaaatgccatcctggtgcgggaccgcatccacaagttccaccggctggtgtccaccctgcggcccccagagagcagggtcttcagcctgcagcagcccccacctggagagggcacctgggagcctgagcacactggagacttccacatggaggaggccctggactggccaggagtgtacctgctgcccggccaggtgtctggagtggccctggaccccaagaacaacctggtgatcttccacagaggagaccacgtgtgggatggcaacagctttgacagcaagtttgtgtaccagcagatcggcctgggccccatcgaggaggacaccatcctggtgattgaccccaacaatgctgctgtgctgcagagcagcggcaagaacctcttctacctgccccacggcctgagcattgacaaggatggcaactactgggtgacagatgtggccctgcaccaggtgttcaagctggaccccaacaacaaggagggccctgtgctgatcctgggccgctccatgcagcccggcagtgaccagaaccacttctgccagcccacagatgtggccgtggaccccggcaccggggccatctacgtgtctgatggctactgcaacagccgcatcgtgcagttcagccccagcggcaagttcatcacccagtggggcgaggagagcagcggcagcagccccctgcccggccagttcaccgtgccccacagcctggccctggtgcccctgctgggccagctgtgtgtggccgaccgggagaatggccgcatccagtgcttcaagacagacaccaaggagtttgtgcgggagatcaagcacagcagctttggaagaaatgtgtttgccatctcctacatccctggcctgctgtttgctgtgaatggcaagccccactttggagaccaggagcctgtgcagggctttgtgatgaacttcagcaatggagagatcatcgacatcttcaagcctgtgaggaagcactttgacatgcctcatgacatcgtggcctctgaagatggcaccgtgtacatcggagatgcccacaccaacacagtgtggaagttcaccctgacagagaagctggagcacaggtctgtgaagaaggccggcatcgaggtgcaggagatcaaggaggccgaggccgtggtggagaccaagatggagaacaagcccaccagcagcgagctgcagaagatgcaggagaagcagaagctgatcaaggagcccggcagcggcgtgcctgtggtgctgatcaccaccctgctggtgattcctgtggtggtgctgctggccatcgccatcttcatccgctggaagaagagccgggcctttggagacagcgagcacaagctggagaccagcagcggccgggtgctgggccgcttccggggcaagggcagcggcggcctgaacctgggcaacttctttgccagcaggaagggctacagcaggaagggctttgaccggctgagcacagagggcagtgaccaggagaaggaggatgatggcagcgagagcgaggaggagtacagcgcccccctgcctgccctggcccccagcagcagctag

SEQ ID NO: 163488 - DNA, 2718 bp, synthetic construct
  misc_feature 1..2718: note = Description of Artificial Sequence: Synthetic coding sequence
  source 1..2718: mol_type = other DNA
atggccggccgggtgcccagcctgctggtgctgctggtgttccccagcagctgcctggccttccgcagccccctgagcgtcttcaagcgcttcaaggagaccacccggcccttcagcaatgaatgtctgggcaccaccaggcctgtggtgcccatcgacagcagtgactttgccctggacatccgcatgcctggggtgacccccaagcagagcgacacctacttctgcatgtccatgagaattcctgtggatgaggaggccttcgtcatcgacttcaagccccgggcctccatggacacagtgcaccacatgctgctgtttggctgcaacatgcccagcagcacaggcagctactggttctgtgatgagggcacctgcacagacaaggccaacatcctgtatgcctgggccagaaatgccccacccacccggctgcccaagggcgtgggcttccgggtgggcggggagaccggcagcaagtactttgtgctgcaggtgcactacggggacatcagcgccttccgggacaacaacaaggactgcagcggcgtgtccctgcacctgacccggctgccccagcccctgattgctggcatgtacctgatgatgtctgtggacaccgtcatcccagctggggagaaggtggtgaacagcgacatcagctgccactacaagaactaccccatgcacgtgtttgcctacagagtgcacacccaccacctgggcaaggtggtgtctggctacagagtgagaaatggccagtggaccctcatcggccggcagagcccccagctgccccaggccttctaccctgtgggccaccctgtggatgtgtcctttggagacctgctggccgcccgctgtgtgttcaccggggagggccgcacagaggccacccacatcggcggcaccagcagtgatgagatgtgcaacctgtacatcatgtactacatggaggccaagcatgctgtgtccttcatgacctgcacccagaatgtggccccagacatgttccgcaccatccccccagaggccaacatccccatccctgtgaagagtgacatggtgatgatgcatgagcaccacaaggagacagagtacaaggacaagatccccctgctgcagcagcccaagcgggaggaggaggaggtgctggaccagggcgacttctacagcctgctgagcaagctgctgggggagcgggaggatgtggtgcacgtgcacaagtacaaccccacagagaaggccgagagcgagagtgacctggtggccgagatcgccaacgtggtgcagaagaaggacctgggccgcagtgatgcccgggagggcgctgagcacgagagaggaaatgccatcctggtgcgggaccgcatccacaagttccaccggctggtgtccaccctgcggcccccagagagcagggtcttcagcctgcagcagcccccacctggagagggcacctgggagcctgagcacactggagacttccacatggaggaggccctggactggccaggagtgtacctgctgcccggccaggtgtctggagtggccctggaccccaagaacaacctggtgatcttccacagaggagaccacgtgtgggatggcaacagctttgacagcaagtttgtgtaccagcagatcggcctgggccccatcgaggaggacaccatcctggtgattgaccccaacaatgctgctgtgctgcagagcagcggcaagaacctcttctacctgccccacggcctgagcattgacaaggatggcaactactgggtgacagatgtggccctgcaccaggtgttcaagctggaccccaacaacaaggagggccctgtgctgatcctgggccgctccatgcagcccggcagtgaccagaaccacttctgccagcccacagatgtggccgtggaccccggcaccggggccatctacgtgtctgatggctactgcaacagccgcatcgtgcagttcagccccagcggcaagttcatcacccagtggggcgaggagagcagcggcagcagccccctgcccggccagttcaccgtgccccacagcctggccctggtgcccctgctgggccagctgtgtgtggccgaccgggagaatggccgcatccagtgcttcaagacagacaccaaggagtttgtgcgggagatcaagcacagcagctttggaagaaatgtgtttgccatctcctacatccctggcctgctgtttgctgtgaatggcaagccccactttggagaccaggagcctgtgcagggctttgtgatgaacttcagcaatggagagatcatcgacatcttcaagcctgtgaggaagcactttgacatgcctcatgacatcgtggcctctgaagatggcaccgtgtacatcggagatgcccacaccaacacagtgtggaagttcaccctgacagagaagctggagcacaggtctgtgaagaaggccggcatcgaggtgcaggagatcaaggacagcgagcacaagctggagaccagcagcggccgggtgctgggccgcttccggggcaagggcagcggcggcctgaacctgggcaacttctttgccagcaggaagggctacagcaggaagggctttgaccggctgagcacagagggcagtgaccaggagaaggaggatgatggcagcgagagcgaggaggagtacagcgcccccctgcctgccctggcccccagcagcagctag

SEQ ID NO: 163489 - DNA, 90 bp, synthetic construct
  misc_feature 1..90: note = Description of Artificial Sequence: Synthetic coding sequence
  source 1..90: mol_type = other DNA
atggccggccgggtgcccagcctgctggtgctgctggtgttccccagcagctgcctggccttccgcagccccctgagcgtcttcaagtag

SEQ ID NO: 163490 - DNA, 87 bp, synthetic construct
  misc_feature 1..87: note = Description of Artificial Sequence: Synthetic coding sequence
  source 1..87: mol_type = other DNA
atggccggccgggtgcccagcctgctggtgctgctggtgttccccagcagctgcctggccttccgcagccccctgagcgtcttctag

SEQ ID NO: 163491 - DNA, 162 bp, synthetic construct
  misc_feature 1..162: note = Description of Artificial Sequence: Synthetic coding sequence
  source 1..162: mol_type = other DNA
atggccggccgggtgcccagcctgctggtgctgctggtgttccccagcagctgcctggccttccgcagccccctgagcgtcttcaagcgcttcaaggagaccacccggcccttcagcaatgaatgtctgggcaccaccaggcctgtggtgcccatcgactag

SEQ ID NO: 163492 - DNA, 129 bp, synthetic construct
  misc_feature 1..129: note = Description of Artificial Sequence: Synthetic coding sequence
  source 1..129: mol_type = other DNA
atggccggccgggtgcccagcctgctggtgctgctggtgttccccagcagctgcctggccttccgcagccccctgagcgtcttcaagcgcttcaaggagaccacccggcccttcagcaatgaatgttag

SEQ ID NO: 163493 - DNA, 207 bp, synthetic construct
  misc_feature 1..207: note = Description of Artificial Sequence: Synthetic coding sequence
  source 1..207: mol_type = other DNA
atggccggccgggtgcccagcctgctggtgctgctggtgttccccagcagctgcctggccttccgcagccccctgagcgtcttcaagcgcttcaaggagaccacccggcccttcagcaatgaatgtctgggcaccaccaggcctgtggtgcccatcgacagcagtgactttgccctggacatccgcatgcctggggtgaccccctag

SEQ ID NO: 163494 - DNA, 78 bp, synthetic construct
  misc_feature 1..78: note = Description of Artificial Sequence: Synthetic coding sequence
  source 1..78: mol_type = other DNA
atggccggccgggtgcccagcctgctggtgctgctggtgttccccagcagctgcctggccttccgcagccccctgtag

SEQ ID NO: 163495 - DNA, 501 bp, synthetic construct
  misc_feature 1..501: note = Description of Artificial Sequence: Synthetic coding sequence
  source 1..501: mol_type = other DNA
atggccgccatccccccagacagctggcagcccccaaatgtgtacctggagacctccatgggcatcatcgtgctggagctgtactggaagcacgcccccaagacctgcaagaactttgctgagctggcccggcggggctactacaacggcaccaagttccaccgcatcatcaaggacttcatgatccagggcggggaccccaccggcaccggccggggcggggccagcatctacggcaagcagtttgaagatgagctgcacccagacctgaagttcaccggggccggcatcctggccatggccaatgccggccctgacaccaacggcagccagttctttgtgaccctggcccccacccagtggctggatggcaagcacaccatcttcggccgggtgtgccagggcatcggcatggtgaacagagtgggcatggtggagaccaacagccaggacaggcctgtggatgatgtgaagatcatcaaggcctaccccagcggctag

SEQ ID NO: 163496 - DNA, 1563 bp, synthetic construct
  misc_feature 1..1563: note = Description of Artificial Sequence: Synthetic coding sequence
  source 1..1563: mol_type = other DNA
atgggcaagaggcagcaccagaaggacaagatgtacatcacctgtgccgagtacacccacttctacggcggcaagaagccagacctgccccagaccaacttccggcggctgccctttgaccactgcagcctgagcctgcagccctttgtgtaccctgtgtgcaccccagatggcatcgtgtttgacctgctgaacatcgtgccctggctgaagaagtatggcaccaaccccagcaatggagagaagctggatggccgcagcctcatcaagctgaacttcagcaagaacagcgagggcaagtaccactgccctgtgctcttcaccgtcttcaccaacaacacccacatcgtggccgtgaggaccactggaaatgtgtatgcctatgaggccgtggagcagctgaacatcaaggccaagaacttccgggacctgctgacagatgagcccttcagccggcaggacatcatcaccctgcaggaccccaccaacctggacaagttcaacgtgagcaacttctaccacgtgaagaacaacatgaagatcatcgaccctgatgaggagaaggccaagcaggaccccagctactacctgaagaacaccaatgctgagacccgggagaccctgcaggagctgtacaaggagttcaagggagatgagatcctggccgccaccatgaaggcccctgagaagaagaaggtggacaagctgaatgctgcccactacagcacaggcaaggtgtctgccagcttcaccagcacagccatggtgcctgagaccacccatgaagctgctgccattgatgaagatgtgctgcgctaccagtttgtgaagaagaagggctacgtgcggctgcacaccaacaagggggacctgaacctggagctgcactgtgacctgacccccaagacctgtgagaacttcatccggctgtgcaagaagcactactatgatggcaccatcttccacaggagcatccggaacttcgtcatccagggcggggaccccaccggcaccggcaccggcggggagagctactggggcaagcccttcaaggatgagttccggcccaacctgagccacacaggccggggcatcctgtccatggccaacagcggccccaacagcaacagaagccagttcttcatcaccttccgcagctgtgcctacctggacaagaagcacaccatcttcggccgggtggtgggcggctttgatgtgctgacagccatggagaatgtggagagtgaccccaagacagaccggcccaaggaggagatcagaattgatgccaccaccgtgtttgtggacccctatgaggaggctgatgcccagatcgcccaggagaggaagacccagctgaaggtggcccctgagaccaaggtgaagagcagccagccccaggccggcagccagggcccccagaccttccggcagggcgtgggcaagtacatcaacccagctgccaccaagagagctgctgaggaggagcccagcaccagcgccaccgtgcccatgagcaagaagaagcccagccggggctttggagacttcagctcctggtag

SEQ ID NO: 163497 - DNA, 1563 bp, synthetic construct; identical to SEQ ID NO: 163496
  misc_feature 1..1563: note = Description of Artificial Sequence: Synthetic coding sequence
  source 1..1563: mol_type = other DNA

SEQ ID NO: 163498 - DNA, 1563 bp, synthetic construct; identical to SEQ ID NO: 163496
  misc_feature 1..1563: note = Description of Artificial Sequence: Synthetic coding sequence
  source 1..1563: mol_type = other DNA

SEQ ID NO: 163499 - DNA, 1584 bp, synthetic construct
  misc_feature 1..1584: note = Description of Artificial Sequence: Synthetic coding sequence
  source 1..1584: mol_type = other DNA
atgggcaagaggcagcaccagaaggacaagatgtacatcacctgtgccgagtacacccacttctacggcggcaagaagccagacctgccccagaccaacttccggcggctgccctttgaccactgcagcctgagcctgcagccctttgtgtaccctgtgtgcaccccagatggcatcgtgtttgacctgctgaacatcgtgccctggctgaagaagtatggcaccaaccccagcaatggagagaagctggatggccgcagcctcatcaagctgaacttcagcaagaacagcgagggcaagtaccactgccctgtgctcttcaccgtcttcaccaacaacacccacatcgtggccgtgaggaccactggaaatgtgtatgcctatgaggccgtggagcagctgaacatcaaggccaagaacttccgggacctgctgacagatgagcccttcagccggcaggacatcatcaccctgcaggaccccaccaacctggacaagttcaacgtgagcaacttctaccacgtgaagaacaacatgaagatcatcgaccctgatgaggagaaggccaagcaggaccccagctactacctgaagaacaccaatgctgagacccgggagaccctgcaggagctgtacaaggagttcaagggagatgagatcctggccgccaccatgaaggcccctgagaagaagaaggtggacaagctgaatgctgcccactacagcacaggcaaggtgtctgccagcttcaccagcacagccatggtgcctgagaccacccatgaagctgctgccattgatgaagatgtgctgcgctaccagtttgtgaagaagaagggctacgtgcggctgcacaccaacaagggggacctgaacctggagctgcactgtgacctgacccccaagacctgtgagaacttcatccggctgtgcaagaagcactactatgatggcaccatcttccacaggagcatccggaacttcgtcatccagggcggggaccccaccggcaccggcaccggcggggagagctactggggcaagcccttcaaggatgagttccggcccaacctgagccacacaggccggggcatcctgtccatggccaacagcggccccaacagcaacagaagccagttcttcatcaccttccgcagctgtgcctacctggacaagaagcacaccatcttcggccgggtggtgggcggctttgatgtgctgacagccatggagaatgtggagagtgaccccaagacagaccggcccaaggaggagatcagaattgatgccaccaccgtgtttgtggacccctatgaggaggctgatgcccagatcgcccaggagaggaagacccagctgaaggtggcccctgagaccaaggtgaagagcagccagccccaggccggcagccagggcccccagaccttccggcagggcgtgggcaagtacatcaacccagctgccacagagcagcagaggaagagcccccagcctgtgcccctgagcccctgcccccggcgcagccctgtgggcgtgctgggcaccagcgcccctggcagcagccggctgcctgatgaccactag

SEQ ID NO: 163500 - DNA, 1470 bp, synthetic construct
  misc_feature 1..1470: note = Description of Artificial Sequence: Synthetic coding sequence
  source 1..1470: mol_type = other DNA
atgggcaagaggcagcaccagaaggacaagatgtacatcacctgtgccgagtacacccacttctacggcggcaagaagccagacctgccccagaccaacttccggcggctgccctttgaccactgcagaaatattgtgccctggctgaagaagtatggcaccaaccccagcaatggagagaagctggatggccgcagcctcatcaagctgaacttcagcaagaacagcgagggcaagtaccactgccctgtgctcttcaccgtcttcaccaacaacacccacatcgtggccgtgaggaccactggaaatgtgtatgcctatgaagctgtggagcagctgaacatcaaggccaagaacttccgggacctgctgacagatgagcccttcagccggcaggacatcatcaccctgcaggaccccaccaacctggacaagttcaacgtgagcaacttctaccacgtgaagaacaacatgaagatcattgatcctgatgaggagaaggccaagcaggaccccagctactacctgaagaacaccaatgctgagacccgggagaccctgcaggagctgtacaaggagttcaagggagatgagatcctggccgccaccatgaaggcccctgagaagaagaaggtggacaagctgaatgctgcccactacagcacaggcaaggtgtctgccagcttcaccagcacagccatggtgcctgagaccacccatgaggccgccgccattgatgaagatgtgctgcgctaccagtttgtgaagaagaagggctacgtgcggctgcacaccaacaagggggacctgaacctggagctgcactgtgacctgacccccaagacctgtgagaacttcatccggctgtgcaagaagcactactatgatggcaccatcttccacaggagcatccggaactttgtgatccagggcggggaccccactggaactggaactggaggagagagctactggggcaagcccttcaaggatgagttccggcccaacctgagccacacaggccggggcatcctgtccatggccaacagcggccccaacagcaacagaagccagttcttcatcaccttccgcagctgtgcctacctggacaagaagcacaccatcttcggccgggtggtgggcggctttgatgtgctgacagccatggagaatgtggagagtgaccccaagacagaccggcccaaggaggagatcagaattgatgccaccaccgtgtttgtggacccctatgaggaggctgatgcccagatcgcccaggagaggaagacccagctgaaggaggccagcagccggggccgggccctgaaccagtgccactgcccccacgtgcaggaggaggcccagagcggcttctggggcctgcagctgctggtggccgccgccacctgccgcctgtacctgtgccccagcttcagccaccagagcctgatgctgaagctgcaggcctag

SEQ ID NO: 163501 - DNA, 1563 bp, synthetic construct; identical to SEQ ID NO: 163496
  misc_feature 1..1563: note = Description of Artificial Sequence: Synthetic coding sequence
  source 1..1563: mol_type = other DNA

SEQ ID NO: 163502 - DNA, 1479 bp, synthetic construct
  misc_feature 1..1479: note = Description of Artificial Sequence: Synthetic coding sequence
  source 1..1479: mol_type = other DNA
atggctgtgctgctggagaccaccctgggagatgtggtgattgacctgtacacagaggagcggccccgggcctgcctgaacttcctgaagctgtgcaagatcaagtactacaactactgcctgatccacaacgtgcagagggacttcatcatccagacaggagaccccactggaacaggccggggcggggagagcatcttcggccagctgtatggagaccaggccagcttctttgaggccgagaaggtgccccgcatcaagcacaagaagaagggcaccgtgtccatggtgaacaatggaagtgaccagcacggcagccagttcctgatcaccaccggggagaacctggactacctggatggagtgcacacagtgtttggagaggtgacagagggcatggacatcatcaagaagatcaatgagacctttgtggacaaggactttgtgccctaccaggacatccgcatcaaccacacagtcatcctggatgacccctttgatgatcctccagacctgctgatcccagacaggagccctgagcccacccgggagcagctggacagcggcagaattggagcagatgaggagattgatgacttcaagggccgctctgctgaggaggtggaggagatcaaggccgagaaggaggccaagacccaggccatcctgctggagatggtgggggacctgcctgatgctgacatcaagcccccagaaaatgtgctgtttgtgtgcaagctgaaccctgtgaccacagatgaggacctggagatcatcttcagcagatttggccccatccgcagctgtgaggtgatccgggactggaagacaggagagagcctgtgctacgccttcatcgagtttgagaaggaggaggactgtgagaaggccttcttcaagatggacaacgtgctgattgatgaccggcgcatccacgtggacttcagccagagcgtggccaaggtgaagtggaagggcaaaggaggcaagtacaccaagagtgacttcaaggagtatgagaaggagcaggacaagccacccaacctggtgctgaaggacaaggtgaagcccaagcaggacaccaagtatgacctgatcctggatgagcaggccgaggacagcaagagcagccacagccacaccagcaagaagcacaagaagaagacccaccactgcagcgaggagaaggaggatgaggactacatgcccatcaagaacaccaaccaggacatctaccgggagatgggcttcggccactatgaggaggaggagagctgctgggagaagcagaagtctgagaagagggacaggacccagaacagaagccgcagccgcagccgggagagagatggccactacagcaacagccacaagagcaagtaccagacagacctgtatgaaagagagaggagcaagaagagggacaggagccgcagccccaagaagagcaaggacaaggagaagagcaagtacagatag

SEQ ID NO: 163503 - DNA, 384 bp, synthetic construct
  misc_feature 1..384: note = Description of Artificial Sequence: Synthetic coding sequence
  source 1..384: mol_type = other DNA
atgagccggcccaagacccagaaccaggtgacccacacccaggtgaagaacaccaggaggaagcccatcaccgtgctgaagaggaagaagatgaggaccacctgccagagcaagatcctgatccgcatcagcattgagaagtggggcctggtgaccatgaagaagaagaaggctgtgggcaggaacaagagggtgaagcgggagacagagctgaggacagaggtggtggccgacctggagcggggcatggccatcatcgtcatcgtcatcaaccagaacaccaagcagatcttcatgaaggagaagggcgtgaagcgggagacagaggccgaggtgcagaggagccccaagatcaagaagaacctgagcattgatgaaagatag

SEQ ID NO: 163504 - DNA, 318 bp, synthetic construct
  misc_feature 1..318: note = Description of Artificial Sequence: Synthetic coding sequence
  source 1..318: mol_type = other DNA
atgtgccagggcggggacttcaccaggcacaatggaactggaggcaagagcatctatggagagaagtttgaagatgagaacttcatcctgaagcacactggacctggcatcctgtccatggccaatgccggccccaacaccaacggcagccagttcttcatctgcacagccaagacagagtggctggatggcaagcacgtggtgtttgggaaggtgaaggagggcatgaacatcgtggaggccatggagagatttggcagcagaaatggcaagaccagcaagaagatcaccatcgctgactgtggccagctggagtag

SEQ ID NO: 163505 - DNA, 390 bp, synthetic construct
  misc_feature 1..390: note = Description of Artificial Sequence: Synthetic coding sequence
  source 1..390: mol_type = other DNA
atggtgaaccccaccgtcttctttgatattgctgtggatggagagcccctgggccgggtgtcctttgagctgtttgctgacaaggtgcccaagacagctgagaacttccgggccctgagcactggagagaagggcttcggctacaagggcagctgcttccaccgcatcatccctggcttcatgtgccagggcggggacttcaccaggcacaatggaactggaggcaagagcatctgcacagccaagacagagtggctggatggcaagcacgtggtgtttgggaaggtgaaggagggcatgaacatcgtggaggccatggagagatttggcagcagaaatggcaagaccagcaagaagatcaccatcgctgactgtggccagctggagtag

SEQ ID NO: 163506 - DNA, 498 bp, synthetic construct
  misc_feature 1..498: note = Description of Artificial Sequence: Synthetic coding sequence
  source 1..498: mol_type = other DNA
atggtgaaccccaccgtcttctttgatattgctgtggatggagagcccctgggccgggtgtcctttgagctgtttgctgacaaggtgcccaagacagctgagaacttccgggccctgagcactggagagaagggcttcggctacaagggcagctgcttccaccgcatcatccctggcttcatgtgccagggcggggacttcaccaggcacaatggaactggaggcaagagcatctatggagagaagtttgaagatgagaacttcatcctgaagcacactggacctggcatcctgtccatggccaatgccggccccaacaccaacggcagccagttcttcatctgcacagccaagacagagtggctggatggcaagcacgtggtgtttgggaaggtgaaggagggcatgaacatcgtggaggccatggagagatttggcagcagaaatggcaagaccagcaagaagatcaccatcgctgactgtggccagctggagtag

SEQ ID NO: 163507 - DNA, 495 bp, synthetic construct
  misc_feature 1..495: note = Description of Artificial Sequence: Synthetic coding sequence
  source 1..495: mol_type = other DNA
atggtgaacagcgtggtgttctttgacatcaccgtggatggcaagcccctgggccgcatcagcatcaagctgtttgctgacaagatcctgaagacagctgagaacttccgggccctgagcactggagagaagggcttccgctacaagggcagctgcttccaccgcatcatccctggcttcatgtgccagggcggggacttcaccaggcacaatggaactggagacaagagcatctatggagagaagtttgatgatgagaacctgatcaggaagcacactggaagtggcatcctgtccatggccaatgccggccccaacaccaacggcagccagttcttcatctgtgccgccaagacagagtggctggatggcaagcacgtggccttcggcaaggtgaaggagcgggtgaacatcgtggaggccatggagcacttcggctacagaaacagcaagaccagcaagaagatcaccatcgctgactgtggccagttctag

SEQ ID NO: 163508 - DNA, 651 bp, synthetic construct
  misc_feature 1..651: note = Description of Artificial Sequence: Synthetic coding sequence
  source 1..651: mol_type = other DNA
atgctgcggctgtctgaaagaaacatgaaggtgctgctggccgccgccctgattgctggctctgtgttcttcctgctgctgcccggccccagcgctgctgatgagaagaagaagggccccaaggtgacagtgaaggtgtactttgacctgagaattggagatgaagatgtgggccgggtcatcttcggcctgtttgggaagacagtgcccaagacagtggacaactttgtggccctggccactggagagaagggcttcggctacaagaacagcaagttccacagggtcatcaaggacttcatgatccagggcggggacttcaccagaggagatggcactggaggcaagagcatctatggagagcgcttcccagatgagaacttcaagctgaagcactacggccctggctgggtgtccatggccaatgccggcaaggacaccaacggcagccagttcttcatcaccaccgtgaagacagcctggctggatggcaagcacgtggtgtttgggaaggtgctggagggcatggaggtggtgaggaaggtggagagcaccaagacagacagccgggacaagcccctgaaggatgtgatcatcgctgactgtgggaagattgaggtggagaagccctttgccatcgccaaggagtag

SEQ ID NO: 163509 - DNA, 639 bp, synthetic construct
  misc_feature 1..639: note = Description of Artificial Sequence: Synthetic coding sequence
  source 1..639: mol_type = other DNA
atgggccctggcccccggctgctgctgcccctggtgctgtgtgtgggcctgggcgccctggtgttcagcagcggggctgagggcttcaggaagaggggccccagcgtgacagccaaggtgttctttgatgtgcgcatcggggacaaggatgtgggccgcatcgtcatcggcctgtttgggaaggtggtgcccaagacagtggagaactttgtggccctggccactggagagaagggctacggctacaagggcagcaagttccacagggtcatcaaggacttcatgatccagggcggggacatcaccactggagatggcactggaggagtgtccatctatggagagaccttcccagatgagaacttcaagctgaagcactatggaattggctgggtgtccatggccaatgccggccctgacaccaacggcagccagttcttcatcaccctgaccaagcccacctggctggatggcaagcacgtggtgtttgggaaggtgattgatggcatgacagtggtgcacagcattgagctgcaggccacagatggccatgaccggcccctgaccaactgcagcatcatcaacagcggcaagattgatgtgaagaccccatttgtggtggagattgctgactggtag

SEQ ID NO: 163510 - DNA, 1113 bp, synthetic construct
  misc_feature 1..1113: note = Description of Artificial Sequence: Synthetic coding sequence
  source 1..1113: mol_type = other DNA
atgagccaccccagcccccaggccaagcccagcaaccccagcaaccccagggtcttctttgatgtggacatcggcggggagcgggtgggccgcatcgtgctggagctgtttgctgacatcgtgcccaagacagctgagaacttccgggccctgtgcacaggagagaagggcatcggccacaccaccgggaagcccctgcacttcaagggctgccccttccaccgcatcatcaagaagttcatgatccagggcggggacttcagcaaccagaatggaactggaggagagagcatctatggagagaagtttgaagatgagaacttccactacaagcatgaccgggagggcctgctgtccatggccaatgccggcaggaacaccaacggcagccagttcttcatcaccaccgtgcccaccccccacctggatggcaagcacgtggtgtttggccaggtgatcaagggcatcggcgtggcccgcatcctggagaatgtggaggtgaagggggagaagccagccaagctgtgtgtgattgctgaatgtggggagctgaaggagggagatgatggcggcatcttccccaaggatggcagcggggacagccacccagacttcccagaagatgctgacatcgacctgaaggatgtggacaagatcctgctgatcacagaggacctgaagaacatcggcaacaccttcttcaagagccagaactgggagatggccatcaagaagtatgcagaggtgctgcgctacgtggacagcagcaaggccgtcatcgagacagctgaccgggccaagctgcagcccatcgccctgagctgtgtgctgaacattggagcctgcaagctgaagatgagcaactggcagggcgccatcgacagctgcctggaggccctggagctggaccccagcaacaccaaggccctgtaccgccgggcccagggctggcagggcctgaaggagtatgaccaggccctggccgacctgaagaaggcccagggcatcgcccctgaggacaaggccatccaggccgagctgctgaaggtgaagcagaagatcaaggcccagaaggacaaggagaaggctgtgtatgccaagatgtttgcctag

SEQ ID NO: 163511 - DNA, 597 bp, synthetic construct
  misc_feature 1..597: note = Description of Artificial Sequence: Synthetic coding sequence
  source 1..597: mol_type = other DNA
atggatgccatcctgaactacagaagtgaggacacagaggactactacaccctgctgggctgtgatgagctgagctctgtggagcagatcctggccgagttcaaggtgcgggccctggagtgccacccagacaagcaccctgagaaccccaaggctgtggagaccttccagaagctgcagaaggccaaggagatcctgaccaatgaggagagccgggcccgctatgaccactggaggaggagccagatgtccatgcccttccagcagtgggaggccctgaatgacagcgtgaagacctccatgcactgggtggtgcggggcaagaaggacctgatgctggaggagagtgacaagacccacaccaccaagatggagaatgaggagtgcaatgagcagcgggagaggaagaaggaggagctggccagcacagctgagaagacagagcagaaggagcccaagcccctggagaagtctgtgagcccccagaacagcgacagcagcggctttgctgatgtgaatggctggcacctgcgcttccgctggagcaaggatgcccccagcgagctgctgaggaagttcaggaactatgagatctag

SEQ ID NO: 163512 - DNA, 468 bp, synthetic construct
  misc_feature 1..468: note = Description of Artificial Sequence: Synthetic coding sequence
  source 1..468: mol_type = other DNA
atgctggccctgcgctgtggcagccgctggctgggcctgctgtctgtgcccaggtctgtgcccctgcggctgcctgctgcccgggcctgcagcaagggcagcggggaccccagcagcagcagcagcagcggcaaccccctggtgtacctggatgtggatgccaacgggaagcccctgggccgggtggtgctggagctgaaggcagatgtggtgcccaagacagctgagaacttccgggccctgtgcacaggagagaagggcttcggctacaagggcagcaccttccacagggtcatccccagcttcatgtgccaggccggggacttcaccaaccacaatggaactggaggcaagagcatctacggcagccgcttcccagatgagaacttcaccctgaagcacgtgggccctggctggatggcctccatgctgtgcagcgtgaccagcaagagggcctggaccagctag

SEQ ID NO: 163513 - DNA, 498 bp, synthetic construct
  misc_feature 1..498: note = Description of Artificial Sequence: Synthetic coding sequence
  source 1..498: mol_type = other DNA
tgaagcagcagcagcagcagcggcaaccccctggtgtacctggatgtggatgccaacgggaagcccctgggccgggtggtgctggagctgaaggcagatgtggtgcccaagacagctgagaacttccgggccctgtgcacaggagagaagggcttcggctacaagggcagcaccttccacagggtcatccccagcttcatgtgccaggccggggacttcaccaaccacaatggaactggaggcaagagcatctacggcagccgcttcccagatgagaacttcaccctgaagcacgtgggccctggggtgctgtccatggccaatgccggccccaacaccaacggcagccagttcttcatctgcaccatcaagacagactggagcatggccctggatgacatcgccctgcactgctgcagccctggcagccctgtgctgaccggctggatggcctccatgctgtgcagcgtgaccagcaagagggcctggaccagctag

SEQ ID NO: 163514 - DNA, 2265 bp, synthetic construct
  misc_feature 1..2265: note = Description of Artificial Sequence: Synthetic coding sequence
  source 1..2265: mol_type = other DNA
atgggcatcaaggtgcagaggccccgctgcttctttgacatcgccatcaacaaccagcctgctggccgggtggtgtttgagctgttcagtgatgtgtgccccaagacctgtgagaacttccgctgcctgtgcacaggagagaagggcaccgggaagagcacccagaagcccctgcactacaagagctgcctcttccaccgggtggtgaaggacttcatggtgcagggcggggacttcagcgagggcaatggccggggcggggagagcatctatggaggcttctttgaagatgagagctttgctgtgaagcacaacaaggagttcctgctgtccatggccaacagaggcaaggacaccaacggcagccagttcttcatcaccaccaagcccaccccccacctggatggccaccacgtggtgtttggccaggtgatcagcggccaggaggtggtgcgggagattgagaaccagaagacagatgctgccagcaagccctttgctgaggtgcgcatcctgagctgtggggagctgatccccaagagcaaggtgaagaaggaggagaagaagaggcacaagagcagcagcagcagcagcagcagcagcagtgacagcgacagcagcagtgacagccagagcagcagtgacagcagtgacagcgagagcgccacagaggagaagagcaagaagaggaagaagaagcacaggaagaacagcaggaagcacaagaaggagaagaagaagaggaagaagagcaagaagagcgccagcagcgagagcgaggccgagaacctggaggcccagccccagagcacagtgcggcctgaggagatcccccccatccctgagaaccgcttcctgatgaggaagagcccccccaaggcagatgagaaggagaggaagaaccgggagcgggagcgggagcgggagtgcaacccccccaacagccagcctgccagctaccagaggcggctgctggtgaccaggagcggcaggaagatcaagggccggggcccccggcgctaccgcacccccagccgcagccgcagccgggaccgcttccgccgctctgagaccccaccccactggaggcaggagatgcagagggcccagaggatgagggtgagcagcggggagcgctggatcaagggggacaagtctgagctgaatgagatcaaggagaaccagaggagccctgtgcgggtgaaggagaggaagatcacagaccacagaaatgtgtctgagagccccaacaggaagaatgagaaggagaagaaggtgaaggaccacaagagcaacagcaaggagcgggacatcagaagaaacagcgagaaggatgacaagtacaagaacaaggtgaagaagagggccaagagcaagagccgcagcaagagcaaggagaagagcaagagcaaggagcgggacagcaagcacaacagaaatgaggagaagaggatgaggagccgcagcaagggccgggaccatgaaaatgtgaaggagaaggagaagcagagcgacagcaagggcaaggaccaggagaggagccgcagcaaggagaagagcaagcagctggagagcaagagcaatgaacatgaccacagcaagagcaaggagaaggaccggcgggcccagagccgcagccgggagtgtgacatcaccaagggcaagcacagctacaacagcaggacccgggagaggagccgcagccgggacaggagcagaagagtgcgcagcaggacccatgaccgggacaggagccgcagcaaggagtaccaccgctaccgggagcaggagtacagaagaagaggccgcagccgcagccgggagaggaggaccccacctggccgcagccgcagcaaggacagaagaagaagaagaagagacagccgcagcagcgagcgggaggagagccagagcaggaacaaggacaagtacagaaaccaggagagcaagagcagccacaggaaggagaacagcgagagcgagaagaggatgtacagcaagagccgggaccacaacagcagcaacaacagccgggagaagaaggctgaccgggaccagagccccttcagcaagatcaagcagagcagccaggacaatgagctgaagagctccatgctgaagaacaaggaggatgagaagatccgcagctctgtggagaaggagaaccagaagagcaagggccaggagaatgaccacgtgcatgagaagaacaagaagtttgaccacgagagcagccctggaacagatgaggacaagtctggatag

SEQ ID NO: 163515 - DNA, 741 bp, synthetic construct
  misc_feature 1..741: note = Description of Artificial Sequence: Synthetic coding sequence
  source 1..741: mol_type = other DNA
atgggcatcaaggtgcagaggccccgctgcttctttgacatcgccatcaacaaccagcctgctggccgggtggtgtttgagctgttcagtgatgtgtgccccaagacctgtgagaacttccgctgcctgtgcacaggagagaagggcaccgggaagagcacccagaagcccctgcactacaagagctgcctcttccaccgggtggtgaaggacttcatggtgcagggcggggacttcagcgagggcaatggccggggcggggagagcatctatggaggcttctttgaagatgagagctttgctgtgaagcacaacaaggagttcctgctgtccatggccaacagaggcaaggacaccaacggcagccagttcttcatcaccaccaagcccaccccccacctggatggccaccacgtggtgtttggccaggtgatcagcggccaggaggtggtgcgggagattgagaaccagaagacagatgctgccagcaagccctttgctgaggtgcgcatcctgagctgtggggagctgatccccaagagcaaggtgaagaaggaggagaagaagaggcacaagagcagcagcagcagcagcagcagcagcagtgacagcgacagcagcagtgacagccagagcagcagtgacagcagtgacagcgagagcgccacagaggagaagagcaagaagaggaagaagaagcacaggaagaacagcaggaagcacaagaaggagaagaagtag

SEQ ID NO: 163516 - DNA, 180 bp, synthetic construct
  misc_feature 1..180: note = Description of Artificial Sequence: Synthetic coding sequence
  source 1..180: mol_type = other DNA
atgggcatcaaggtgcagaggccccgctgcttctttgacatcgccatcaacaaccagcctgctggccgggtggtgtttgagctgttcagtgatgtgtgccccaagacctgtgagaacttccgctgcctgtgcacaggagagaagggcaccgggaagagcacccagaagcccctgcactag

SEQ ID NO: 163517 - DNA, 2265 bp, synthetic construct; identical to SEQ ID NO: 163514
  misc_feature 1..2265: note = Description of Artificial Sequence: Synthetic coding sequence
  source 1..2265: mol_type = other DNA

SEQ ID NO: 163518 - DNA, 1347 bp, synthetic construct
  misc_feature 1..1347: note = Description of Artificial Sequence: Synthetic coding sequence
  source 1..1347: mol_type = other DNA
atgggcatcaaggtgcagaggccccgctgcttctttgacatcgccatcaacaaccagcctgctggccgggtggtgtttgagctgttcagtgatgtgtgccccaagacctgtgagaacttccgctgcctgtgcacaggagagaagggcaccgggaagagcacccagaagcccctgcactacaagagctgcctcttccaccgggtggtgaaggacttcatggtgcagggcggggacttcagcgagggcaatggccggggcggggagagcatctatggaggcttctttgaagatgagagctttgctgtgaagcacaacaaggagttcctgctgtccatggccaacagaggcaaggacaccaacggcagccagttcttcatcaccaccaagcccaccccccacctggatggccaccacgtggtgtttggccaggtgatcagcggccaggaggtggtgcgggagattgagaaccagaagacagatgctgccagcaagccctttgctgaggtgcgcatcctgagctgtggggagctgatccccaagagcaaggtgaagaaggaggagaagaagaggcacaagagcagcagcagcagcagcagcagcagcagtgacagcgacagcagcagtgacagccagagcagcagtgacagcagtgacagcgagagcgccacagaggagaagagcaagaagaggaagaagaagcacaggaagaacagcaggaagcacaagaaggagaagaagaagaggaagaagagcaagaagagcgccagcagcgagagcgaggccgagaacctggaggcccagccccagagcacagtgcggcctgaggagatcccccccatccctgagaaccgcttcctgatgaggaagagcccccccaaggcagatgagaaggagaggaagaaccgggagcgggagcgggagcgggagtgcaacccccccaacagccagcctgccagctaccagaggcggctgctggtgaccaggagcggcaggaagatcaagggccggggcccccggcgctaccgcacccccagccgcagccgcagccgggaccgcttccgccgctctgagaccccaccccactggaggcaggagatgcagagggcccagaggatgagggtgagcagcggggagcgctggatcaagggggacaagtctgagctgaatgagatcaaggagaaccagaggagccctgtgcgggtgaaggagaggaagatcacagaccacagaaatgtgtctgagagccccaacaggaagaatgagaaggagaagaaggtgaaggaccacaagagcaacagcaaggagcgggacatccggaggaagaagaagaagaagaagaagaagtag

SEQ ID NO: 163519 - DNA, 534 bp, synthetic construct
  misc_feature 1..534: note = Description of Artificial Sequence: Synthetic coding sequence
  source 1..534: mol_type = other DNA
atggctgtggccaacagcagccctgtgaaccctgtggtgttctttgatgtgtccattggaggccaggaggtgggccgcatgaagattgagctgtttgctgatgtggtgcccaagacagctgagaacttccggcagttctgcaccggggagttcaggaaggatggagtgcccatcggctacaagggcagcaccttccacagggtcatcaaggacttcatgatccagggcggggactttgtgaatggagatggcactggagtggccagcatctaccggggcccctttgctgatgagaacttcaagctgcggcacagcgcccctggcctgctgtccatggccaacagcggccccagcaccaacggctgccagttcttcatcacctgcagcaaatgtgactggctggatggcaagcacgtggtgtttgggaagatcattgatggcctgctggtgatgaggaagattgaaaatgtgcccaccggccccaacaacaagcccaagctgcctgtggtgatcagccagtgtggggagatgtag

SEQ ID NO: 163520 - DNA, 174 bp, synthetic construct
  misc_feature 1..174: note = Description of Artificial Sequence: Synthetic coding sequence
  source 1..174: mol_type = other DNA
atgaagattgagctgtttgctgatgtggtgcccaagacagctgagaacttccggcagttctgcaccggggagttccgctctgtgtctgatgtgtttgacttctttgcctgcagccggggcgtcttctggggctgcagcgagggcattggagagcccccagctggcctggagtag

SEQ ID NO: 163521 - DNA, 405 bp, synthetic construct
  misc_feature 1..405: note = Description of Artificial Sequence: Synthetic coding sequence
  source 1..405: mol_type = other DNA
atgattgctggggacagcgacaggaggaaggatggagtgcccatcggctacaagggcagcaccttccacagggtcatcaaggacttcatgatccagggcggggactttgtgaatggagatggcaccggggtggccagcatctaccggggcccctttgctgatgagaacttcaagctgcggcacagcgcccctggcctgctgtccatggccaacagcggccccagcaccaacggctgccagttcttcatcacctgcagcaaatgtgactggctggatggcaagcacgtggtgtttgggaagatcattgatggcctgctggtgatgaggaagattgaaaatgtgcccaccggccccaacaacaagcccaagctgcctgtggtgatcagccagtgtggggagatgtag

SEQ ID NO: 163522 - DNA, 207 bp, synthetic construct
  misc_feature 1..207: note = Description of Artificial Sequence: Synthetic coding sequence
  source 1..207: mol_type = other DNA
atggtgaactggaagggcctggtgctgcctgctgtgacccccagcctcttcctgtttggctacaggaaggatggagtgcccatcggctacaagggcagcaccttccacagggtcatcaaggacttcatgatccagggcggggactttgtgaatgtgtccaccatccccttcctgagcaagaccaggagcttctccttctgctgctag

SEQ ID NO: 163523 - DNA, 435 bp, synthetic construct
  misc_feature 1..435: note = Description of Artificial Sequence: Synthetic coding sequence
  source 1..435: mol_type = other DNA
atgaagattgagctgtttgctgatgtggtgcccaagacagctgagaacttccggcagttctgcaccggggagttcaggaaggatggagtgcccatcggctacaagggcagcaccttccacagggtcatcaaggacttcatgatccagggcggggactttgtgaatggagatggcactggagtggccagcatctaccggggcccctttgctgatgagaacttcaagctgcggcacagcgcccctggcctgctgtccatggccaacagcggccccagcaccaacggctgccagttcttcatcacctgcagcaaatgtgactggctggatggcaagcacgtggtgtttgggaagatcattgatggcctgctggtgatgaggaagattgaaaatgtgcccaccggccccaacaacaagcccaagctgcctgtggtgtag

SEQ ID NO: 163524 - DNA, 405 bp, synthetic construct; identical to SEQ ID NO: 163521
  misc_feature 1..405: note = Description of Artificial Sequence: Synthetic coding sequence
  source 1..405: mol_type = other DNA

SEQ ID NO: 163525 - DNA, 540 bp, synthetic construct
  misc_feature 1..540: note = Description of Artificial Sequence: Synthetic coding sequence
  source 1..540: mol_type = other DNA
atgcccagcaagagcctggtgatggagtacctggcccaccccagcaccctgggcctggccgtgggcgtggcctgtggcatgtgcctgggctggagcctgcgggtgtgcttcggcatgctgcccaagagcaagaccagcaagacccacacagacacagagagcgaggccagcatcctgggggacagcggggagtacaagatgatcctggtggtgagaaatgacctgaagatgggcaagggcaaggtggccgcccagtgcagccatgctgctgtgtctgcctacaagcagatccagaggaggaaccctgagatgctgaagcagtgggagtactgcggccagcccaaggtggtggtgaaggccccagatgaggagaccctgattgccctgctggcccacgccaagatgctgggcctgactgtgtccctcatccaggatgctggccgcacccagatcgcccctggcagccagacagtgctgggcatcggccctggccctgctgacctgattgacaaggtgacaggccacctgaagctgtactag

SEQ ID NO: 163526 - DNA, 543 bp, synthetic construct
  misc_feature 1..543: note = Description of Artificial Sequence: Synthetic coding sequence
  source 1..543: mol_type = other DNA
atgatgcccagcaagagcctggtgatggagtacctggcccaccccagcaccctgggcctggccgtgggcgtggcctgtggcatgtgcctgggctggagcctgcgggtgtgcttcggcatgctgcccaagagcaagaccagcaagacccacacagacacagaaagtgaggccagcatcctgggggacagcggggagtacaagatgatcctggtggtgagaaatgacctgaagatgggcaagggcaaggtggccgcccagtgcagccacgccgctgtgtctgcctacaagcagatccagaggagaaatcctgagatgctgaagcagtgggagtactgcggccagcccaaggtggtggtgaaggccccagatgaggagaccctcatcgccctgctggcccacgccaagatgctgggcctgactgtgtccctcatccaggatgctggccgcacccagatcgcccctggcagccagacagtgctgggcatcggccctggccctgctgacctgattgacaaggtgacaggccacctgaagctgtactag

SEQ ID NO: 163527 - DNA, 540 bp, synthetic construct; identical to SEQ ID NO: 163525
  misc_feature 1..540: note = Description of Artificial Sequence: Synthetic coding sequence
  source 1..540: mol_type = other DNA

SEQ ID NO: 163528 - DNA, 1668 bp, synthetic construct
  misc_feature 1..1668: note = Description of Artificial Sequence: Synthetic coding sequence
  source 1..1668: mol_type = other DNA
atggccgcccggctgctgctgctgggcatcctgctgctgctgctgcccctgcctgtgcctgccccctgccacacagctgcccggtctgagtgcaagaggagccacaagtttgtgcctggggcctggctggccggggagggcgtggatgtgaccagcctgcggcgcagcggcagcttccctgtggacacccagcgcttcctgcggccagatggcacctgcaccctgtgtgaaaatgccctgcaggagggcaccctgcagaggctgcccctggccctgaccaactggagggcccagggcagcggctgccagagacatgtgacccgggccaaggtgagcagcacagaggccgtggccagagatgctgcccggagcatcagaaatgactggaaggtgggcctggatgtgacccccaagcccaccagcaatgtgcacgtgtctgtggccggcagccacagccaggccgccaactttgctgcccagaagacccaccaggaccagtacagcttcagcacagacacagtggagtgccgcttctacagcttccacgtggtgcacaccccacccctgcacccagacttcaagagggccctgggggacctgccccaccacttcaatgccagcacccagcctgcctacctgcggctcatcagcaactacggcacccacttcatccgggctgtggagctgggcggccgcatcagcgccctgacagccctgcggacctgtgagctggccctggagggcctgacagacaatgaggtggaggactgcctgactgtggaggcccaggtgaacatcggcatccacggcagcatctctgctgaggccaaggcctgtgaggagaagaagaagaagcacaagatgacagccagcttccaccagacctaccgggagcggcacagcgaggtggtgggcggccaccacaccagcatcaatgacctgctgtttggcatccaggccggccctgagcagtacagcgcctgggtgaacagcctgcccggcagccctggcctggtggactacaccctggagcccctgcacgtgctgctggacagccaggacccccggcgggaggccctgcggcgggccctgagccagtacctgacagaccgggcccgctggagggactgcagccggccctgccccccaggccggcagaagagcccccgggacccctgccagtgtgtgtgccacggcagcgctgtgaccacccaggactgctgcccccggcagaggggcctggcccagctggaggtgaccttcatccaggcctggggcctgtggggagactggttcaccgccacagatgcctacgtgaagctgttctttggaggccaggagctgcggaccagcacagtgtgggacaacaacaaccccatctggagcgtgcggctggactttggagatgtgctgctggccaccggcggccccctgcggctgcaggtgtgggaccaggacagcggcagagatgatgacctgctgggcacctgtgaccaggcccccaagagcggcagccatgaggtgcgctgcaacctgaaccacggccacctgaagttccgctaccacgcccgctgcctgccccacctgggcggcggcacctgcctggactatgtgccccagatgctgctgggggagcccccaggcaacagaagtggagctgtgtggtag

SEQ ID NO: 163529 - DNA, 1668 bp, synthetic construct; identical to SEQ ID NO: 163528
  misc_feature 1..1668: note = Description of Artificial Sequence: Synthetic coding sequence
  source 1..1668: mol_type = other DNA

SEQ ID NO: 163530 - DNA, 1668 bp, synthetic construct; identical to SEQ ID NO: 163528
  misc_feature 1..1668: note = Description of Artificial Sequence: Synthetic coding sequence
  source 1..1668: mol_type = other DNA

SEQ ID NO: 163531 - DNA, 444 bp, synthetic construct
  misc_feature 1..444: note = Description of Artificial Sequence: Synthetic coding sequence
  source 1..444: mol_type = other DNA
atggaggcccggagccgctctgctgaggagctgcggcgggcagagctggtggagatcatcgtggagacagaggcccagacaggagtgtctggcatcaacgtggccggcggcggcaaggagggcatctttgtgcgggagctgcgggaggacagccctgctgcccggagcctgagcctgcaggagggggaccagctgctgagcgcccgggtcttctttgagaacttcaagtatgaagatgccctgcggctgctgcagtgtgccgagccctacaaggtgtccttctgcctgaagaggacagtgcccaccggggacctggccctgcggcccggcaccgtgtctggctatgagatcaagggcccccgggccaaggtggccaagctggtgcgggtgctgagccctgccccagccctggactgccccagcgaccctgtgtctgccccctag

SEQ ID NO: 163532 - DNA, 4386 bp, synthetic construct
  misc_feature 1..4386: note = Description of Artificial Sequence: Synthetic coding sequence
  source 1..4386: mol_type = other DNA
atggaggcccggagccgctctgctgaggagctgcggcgggcagagctggtggagatcatcgtggagacagaggcccagacaggagtgtctggcatcaacgtggccggcggcggcaaggagggcatctttgtgcgggagctgcgggaggacagccctgctgcccggagcctgagcctgcaggagggggaccagctgctgagcgcccgggtcttctttgagaacttcaagtatgaagatgccctgcggctgctgcagtgtgccgagccctacaaggtgtccttctgcctgaagaggacagtgcccaccggggacctggccctgcggcccggcaccgtgtctggctatgagatcaagggcccccgggccaaggtggccaagctgaacatccagagcctgagccctgtgaagaagaagaagatggtgcctggggccctgggcgtgcctgctgacctggcccctgtggatgtggagttctccttccccaagttcagccggctgcggcggggcctgaaggccgaggccgtgaagggccctgtgcctgctgccccagcccggcggcggctgcagctgccccggctgcgggtgcgggaggtggccgaggaggcccaggccgcccggctggccgccgccgcccccccacccaggaaggccaaggtggaggccgaggtggccgccggggcccgcttcaccgccccccaggtggagctggtgggcccccggctgcccggggctgaggtgggcgtgccccaggtgtctgcccccaaggccgcccccagcgctgaggccgccggcggctttgccctgcacctgcccaccctgggcctgggcgccccagcccccccagctgtggaggccccagctgtgggcatccaggtgccccaggtggagctgcctgccctgcccagcctgcccaccctgcccaccctgccctgcctggagacccgggagggcgctgtgtctgtggtggtgcccaccctggatgtggccgcccccaccgtgggcgtggacctggccctgcccggggctgaggtggaggcccggggggaggcccctgaggtggccctgaagatgccccggctgtccttccccaggtttggagcccgggccaaggaggtggccgaggccaaggtggccaaggtgtccccagaggcccgggtgaagggcccccggctgaggatgcccaccttcggcctgagcctgctggagcccaggcctgctgcccctgaggtggtggagagcaagctgaagctgcccaccatcaagatgcccagcctgggcattggagtgtctggccctgaggtgaaggtgcccaagggccctgaggtgaagctgcccaaggcccctgaggtgaagctgcccaaggtgcctgaggccgccctgcctgaggtgcggctgcctgaggtggagctgcccaaggtgtctgagatgaagctgcccaaggtgcctgagatggctgtgcctgaggtgcggctgcctgaggtggagctgcccaaggtgtctgagatgaagctgcccaaggtgcctgagatggctgtgcctgaggtgcggctgcctgaggtgcagctgctgaaggtgtctgagatgaagctgcccaaggtgcctgagatggctgtgcctgaggtgcggctgcctgaggtgcagctgcccaaggtgtctgagatgaagctgcctgaggtgtctgaggtggccgtgcctgaggtgcggctgcctgaggtgcagctgcccaaggtgcctgagatgaaggtgcctgagatgaagctgcccaaggtgcctgagatgaagctgcctgagatgaagctgcctgaggtgcagctgcccaaggtgcctgagatggctgtgcctgatgtgcacctgcctgaggtgcagctgcccaaggtgcctgagatgaagctgcctgagatgaagctgcctgaggtgaagctgcccaaggtgcctgagatggctgtgcctgatgtgcacctgcctgaggtgcagctgcccaaggtgcctgagatgaagctgcccaagatgcctgagatggctgtgcctgaggtgcggctgcctgaggtgcagctgcccaaggtgtctgagatgaagctgcccaaggtgcctgagatggctgtgcctgatgtgcacctgcctgaggtgcagctgcccaaggtgtgtgagatgaaggtgcctgacatgaagctgcctgagatcaagctgcccaaggtgcctgagatggctgtgcctgatgtgcacctgcctgaggtgcagctgcccaaggtgtctgagatccggctgcctgagatgcaggtgcccaaggtgcctgatgtgcacctgcccaaggcccctgaggtgaagctgccccgggcccctgaggtgcagctgaaggccaccaaggccgagcaggccgagggcatggagtttggcttcaagatgcccaagatgaccatgcccaagctgggccgggcagagagccccagccggggcaagccaggagaggccggggctgaggtgtctgggaagctggtgaccctgccctgcctgcagcctgaggtggatggagaggcccacgtgggcgtgcccagcctgaccctgcccagcgtggagctggacctgcccggggccctgggcctgcagggccaggtgcctgctgccaagatgggcaagggggagcgggtggagggccctgaggtggccgccggcgtgcgggaggtgggcttccgggtgcccagcgtggagatcgtgaccccccagctgcctgctgtggagattgaggagggccgcctggagatgattgagaccaaggtgaagcccagcagcaagttcagcctgcccaagtttggcctgagcggccccaaggtggccaaggccgaggccgagggcgccggccgggccaccaagctgaaggtgtccaagtttgccatcagcctgcccaaggcccgggtgggcgctgaggccgaggccaagggggccggggaggccggcctgctgcctgccctggacctgagcatcccccagctgagcctggatgcccacctgcccagcggcaaggtggaggtggccggggctgacctgaagttcaagggccccaggtttgccctgcccaagtttggagtgcggggccgggacacagaagctgctgagctggtgcctggggtggccgagctggagggcaagggctggggctgggatggccgggtgaagatgcccaagctgaagatgcccagctttggcctggcccggggcaaggaggccgaggtgcagggcgaccgggccagccctggagagaaggccgagagcacagctgtgcagctgaagatccctgaggtggagctggtgaccctgggcgcccaggaggagggccgggcagagggcgctgtggccgtgtctggcatgcagctgagcggcctgaaggtgtccacagctggccaggtggtgacagagggccatgatgctggcctgaggatgccacccctgggcatcagcctgccccaggtggagctgaccggctttggagaggccggcaccccaggccagcaggcccagagcacagtgcccagcgctgagggcacagctggctacagagtgcaggtgccccaggtgaccctgagcctgcccggggcccaggtggccggcggggagctgctggtgggggagggcgtcttcaagatgcccaccgtgacagtgccccagctggagctggatgtgggcctgagccgggaggcccaggccggggaggccgccaccggggagggcggcctgcggctgaagctgcccaccctgggcgcccgggcccgggtgggcggggagggcgctgaggagcagcccccaggagctgagaggaccttctgcctgagcctgcctgatgtggagctgagccccagcggcggcaaccacgccgagtaccaggtggccgagggggagggggaggccggccacaagctgaaggtgcggctgcccaggtttggcctggtgcgggccaaggagggcgctgaggagggggagaaggccaagagccccaagctgcggctgccccgggtgggcttcagccagagcgagatggtgactggagagggcagccccagccctgaggaggaggaggaggaggaggaggagggcagcggggagggcgccagcggccggcggggccgggtgcgggtgcggctgccccgggtgggcctggccgcccccagcaaggccagccggggccaggagggagatgctgcccccaagagccctgtgcgggagaagagccccaagttccgcttcccccgggtgtccctgagccccaaggcccggagcggcagcggggaccaggaggagggcggcctgcgggtgcggctgcccagcgtgggcttcagcgagactggagcccctggccctgccaggatggagggcgcccaggccgctgctgtgtag

SEQ ID NO: 163533 - DNA, 4191 bp, synthetic construct
  misc_feature 1..4191: note = Description of Artificial Sequence: Synthetic coding sequence
  source 1..4191: mol_type = other DNA
atggaggcccggagccgctctgctgaggagctgcggcgggcagagctggtggagatcatcgtggagacagaggcccagacaggagtgtctggcatcaacgtggccggcggcggcaaggagggcatctttgtgcgggagctgcgggaggacagccctgctgcccggagcctgagcctgcaggagggggaccagctgctgagcgcccgggtcttctttgagaacttcaagtatgaagatgccctgcggctgctgcagtgtgccgagccctacaaggtgtccttctgcctgaagaggacagtgcccaccggggacctggccctgcggcccggcaccgtgtctggctatgagatcaagggcccccgggccaaggtggccaagctgaacatccagagcctgagccctgtgaagaagaagaagatggtgcctggggccctgggcgtgcctgctgacctggcccctgtggatgtggagttctccttccccaagttcagccggctgcggcggggcctgaaggccgaggccgtgaagggccctgtgcctgctgccccagcccggcggcggctgcagctgccccggctgcgggtgcgggaggtggccgaggaggcccaggccgcccggctggccgccgccgcccccccacccaggaaggccaaggtggaggccgaggtggccgccggggcccgcttcaccgccccccaggtggagctggtgggcccccggctgcccggggctgaggtgggcgtgccccaggtgtctgcccccaaggccgcccccagcgctgaggccgccggcggctttgccctgcacctgcccaccctgggcctgggcgccccagcccccccagctgtggaggccccagctgtgggcatccaggtgccccaggtggagctgcctgccctgcccagcctgcccaccctgcccaccctgccctgcctggagacccgggagggcgctgtgtctgtggtggtgcccaccctggatgtggccgcccccaccgtgggcgtggacctggccctgcccggggctgaggtggaggcccggggggaggcccctgaggtggccctgaagatgccccggctgtccttccccaggtttggagcccgggccaaggaggtggccgaggccaaggtggccaaggtgtccccagaggcccgggtgaagggcccccggctgaggatgcccaccttcggcctgagcctgctggagcccaggcctgctgcccctgaggtggtggagagcaagctgaagctgcccaccatcaagatgcccagcctgggcattggagtgtctggccctgaggtgaaggtgcccaagggccctgaggtgaagctgcccaaggcccctgaggtgaagctgcccaaggtgcctgaggccgccctgcctgaggtgcggctgcctgaggtggagctgcccaaggtgtctgagatgaagctgcccaaggtgcctgagatggctgtgcctgaggtgcggctgcctgaggtggagctgcccaaggtgtctgagatgaagctgcccaaggtgcctgagatggctgtgcctgaggtgcggctgcctgaggtgcagctgctgaaggtgtctgagatgaagctgcccaaggtgcctgagatggctgtgcctgaggtgcggctgcctgaggtgcagctgcccaaggtgtctgagatgaagctgcctgaggtgtctgaggtggccgtgcctgaggtgcggctgcctgaggtgcagctgcccaaggtgcctgagatgaaggtgcctgagatgaagctgcccaaggtgcctgagatgaagctgcctgagatgaagctgcctgaggtgcagctgcccaaggtgcctgagatggctgtgcctgatgtgcacctgcctgaggtgcagctgcccaaggtgcctgagatgaagctgcctgagatgaagctgcctgaggtgaagctgcccaaggtgcctgagatggctgtgcctgatgtgcacctgcctgaggtgcagctgcccaaggtgcctgagatgaagctgcccaagatgcctgagatggctgtgcctgaggtgcggctgcctgaggtgcagctgcccaaggtgtctgagatgaagctgcccaaggtgcctgagatggctgtgcctgatgtgcacctgcctgaggtgcagctgcccaaggtgtgtgagatgaaggtgcctgacatgaagctgcctgagatcaagctgcccaaggtgcctgagatggctgtgcctgatgtgcacctgcctgaggtgcagctgcccaaggtgtctgagatccggctgcctgagatgcaggtgcccaaggtgcctgatgtgcacctgcccaaggcccctgaggtgaagctgccccgggcccctgaggtgcagctgaaggccaccaaggccgagcaggccgagggcatggagtttggcttcaagatgcccaagatgaccatgcccaagctgggccgggcagagagccccagccggggcaagccaggagaggccggggctgaggtgtctgggaagctggtgaccctgccctgcctgcagcctgaggtggatggagaggcccacgtgggcgtgcccagcctgaccctgcccagcgtggagctggacctgcccggggccctgggcctgcagggccaggtgcctgctgccaagatgggcaagggggagcgggtggagggccctgaggtggccgccggcgtgcgggaggtgggcttccgggtgcccagcgtggagatcgtgaccccccagctgcctgctgtggagattgaggagggccgcctggagatgattgagaccaaggtgaagcccagcagcaagttcagcctgcccaagtttggcctgagcggccccaaggtggccaaggccgaggccgagggcgccggccgggccaccaagctgaaggtgtccaagtttgccatcagcctgcccaaggcccgggtgggcgctgaggccgaggccaagggggccggggaggccggcctgctgcctgccctggacctgagcatcccccagctgagcctggatgcccacctgcccagcggcaaggtggaggtggccggggctgacctgaagttcaagggccccaggtttgccctgcccaagtttggagtgcggggccgggacacagaagctgctgagctggtgcctggggtggccgagctggagggcaagggctggggctgggatggccgggtgaagatgcccaagctgaaggtgtccacagctggccaggtggtgacagagggccatgatgctggcctgaggatgccacccctgggcatcagcctgccccaggtggagctgactggatttggagaggccggcaccccaggccagcaggcccagagcacagtgcccagcgctgagggcacagctggctacagagtgcaggtgccccaggtgaccctgagcctgcccggggcccaggtggccggcggggagctgctggtgggggagggcgtcttcaagatgcccaccgtgacagtgccccagctggagctggatgtgggcctgagccgggaggcccaggccggggaggccgccactggagagggcggcctgcggctgaagctgcccaccctgggcgcccgggcccgggtgggcggggagggcgctgaggagcagcccccaggagctgagaggaccttctgcctgagcctgcctgatgtggagctgagccccagcggcggcaaccacgccgagtaccaggtggccgagggggagggggaggccggccacaagctgaaggtgcggctgccccgcttcggcctggtgcgggccaaggagggcgctgaggagggggagaaggccaagagccccaagctgcggctgccccgggtgggcttcagccagagcgagatggtgactggagagggcagccccagccctgaggaggaggaggaggaggaggaggagggcagcggggagggcgccagcggcagaagaggccgggtgcgggtgcggctgccccgggtgggcctggccgcccccagcaaggccagccggggccaggagggagatgctgcccccaagagccctgtgcgggagaagagccccaagttccgcttcccccgggtgtccctgagccccaaggcccggagcggcagcggggaccaggaggagggcggcctgcgggtgcggctgcccagcgtgggcttcagcgagaccggggcccctggccctgccaggatggagggcgcccaggccgctgctgtgtag

SEQ ID NO: 163534 - DNA, 2214 bp, synthetic construct
  misc_feature 1..2214: note = Description of Artificial Sequence: Synthetic coding sequence
  source 1..2214: mol_type = other DNA
atggaggtggagcaggagcagaggaggaggaaggtggaggccggccgcaccaagctggcccacttccggcagaggaagaccaagggggacagcagccacagcgagaagaagacagccaagaggaagggcagcgctgtggatgcctctgtgcaggaggagagccctgtgaccaaggaggacagcgccctgtgtggcggcggggacatctgcaagagcaccagctgtgatgacaccccagatggagctgggggcgcctttgctgcccagcctgaggactgtgatggagagaagcgggaggacctggagcagctgcagcagaagcaggtgaatgaccaccccccagagcagtgtggcatgttcaccgtgtctgaccaccccccagagcagcacggcatgttcaccgtgggggaccaccccccagagcagaggggcatgttcaccgtgtctgaccaccccccagagcagaggggcatgttcaccatcagtgaccaccagcctgagcagaggggcatgttcaccgtgtctgaccacaccccagagcagaggggcatcttcaccatcagtgaccaccctgctgagcagaggggcatgttcaccaaggaatgtgagcaggagtgtgagctggccatcacagacctggagagcggccgggaggatgaagctggcctgcaccagagccaggccgtgcacggcctggagctggaggccctgcggctgagcctgagcaacatgcacacagcccagctggagctgacccaggccaacctgcagaaggagaaggagacagccctgacagagctgcgggagatgctgaacagccggcgggcccaggagctggccctgctgcagagccggcagcagcacgagctggagctgctgcgggagcagcacgcccgggagaaggaggaggtggtgctgcgctgtggccaggaggccgctgagctgaaggagaagctgcagagcgagatggagaagaatgcccagatcgtgaagaccctgaaggaggactgggagagcgagaaggacctgtgcctggagaacctgaggaaggagctgagcgccaagcaccagagcgagatggaggacctgcagaaccagttccagaaggagctggccgagcagagagctgagctggagaagatcttccaggacaagaaccaggccgagcgggccctgaggaacctggagagccaccaccaggccgccatcgagaagctgcgggaggacctgcagagcgagcacggccgctgcctggaggacctggagttcaagttcaaggagagcgagaaggagaagcagctggagctggagaacctgcaggccagctatgaggacctgaaggcccagagccaggaggagatccggcggctgtggagccagctggacagcgcccggaccagccggcaggagctgtctgagctgcacgagcagctgctggcccggaccagccgggtggaggacctggagcagctgaagcagcgggagaagacccagcatgaaagtgagctggagcagctgcgcatctactttgagaagaagctgagagatgctgagaagacctaccaggaggacctgaccctgctgcagcagaggctgcagggcgccagagaagatgccctgctggacagcgtggaggtgggcctgagctgtgtgggcctggaggagaagccagagaagggcaggaaggaccacgtggatgagctggagcctgagcggcacaaggagagcctgccccgcttccaggccgagctggaggagagccaccgccaccagctggaggccctggagagccccctgtgcatccagcacgagggccacgtgtctgaccgctgctgcgtggagaccagcgccctgggccacgagtggaggctggagcccagcgagggccacagccaggagctgccctgggtgcacctgcagggcgtgcaggatggagacctggaggccgacacagagcgggccgcccgggtgctgggcctggagacagagcacaaggtgcagctgagcctgctgcagacagagctgaaggaggagattgagctgctgaagattgaaaatagaaacctgtatggcaagctgcagcacgagacccggctgaaggatgacctggagaaggtgaagcacaacctgattgaggaccaccagaaggagctgaacaatgccaagcagaagacagagctgatgaagcaggagttccagaggaaggagacctag

SEQ ID NO: 163535 - DNA, 10011 bp, synthetic construct
  misc_feature 1..10011: note = Description of Artificial Sequence: Synthetic coding sequence
  source 1..10011: mol_type = other DNA
atggaggtggagcaggagcagaggaggaggaaggtggaggccggccgcaccaagctggcccacttccggcagaggaagaccaagggggacagcagccacagcgagaagaagacagccaagaggaagggcagcgctgtggatgcctctgtgcaggaggagagccctgtgaccaaggaggacagcgccctgtgtggcggcggggacatctgcaagagcaccagctgtgatgacaccccagatggagctgggggcgcctttgctgcccagcctgaggactgtgatggagagaagcgggaggacctggagcagctgcagcagaagcaggtgaatgaccaccccccagagcagtgtggcatgttcaccgtgtctgaccaccccccagagcagcacggcatgttcaccgtgggggaccaccccccagagcagaggggcatgttcaccgtgtctgaccaccccccagagcagcacggcatgttcaccgtgtctgaccaccccccagagcagaggggcatgttcaccatcagtgaccaccagcctgagcagaggggcatgttcaccgtgtctgaccacaccccagagcagaggggcatcttcaccatcagtgaccaccctgctgagcagaggggcatgttcaccaaggaatgtgagcaggagtgtgagctggccatcacagacctggagagcggcagagaagatgaggccggcctgcaccagagccaggccgtgcacggcctggagctggaggccctgcggctgagcctgagcaacatgcacacagcccagctggagctgacccaggccaacctgcagaaggagaaggagacagccctgacagagctgcgggagatgctgaacagcagaagagcccaggagctggccctgctgcagagccggcagcagcacgagctggagctgctgcgggagcagcacgcccgggagaaggaggaggtggtgctgcgctgtggccaggaggccgctgagctgaaggagaagctgcagagcgagatggagaagaatgcccagatcgtgaagaccctgaaggaggactgggagagcgagaaggacctgtgcctggagaacctgaggaaggagctgagcgccaagcaccagagcgagatggaggacctgcagaaccagttccagaaggagctggccgagcagagagctgagctggagaagatcttccaggacaagaaccaggccgagcgggccctgaggaacctggagagccaccaccaggccgccatcgagaagctgcgggaggacctgcagagcgagcacggccgctgcctggaggacctggagttcaagttcaaggagagcgagaaggagaagcagctggagctggagaacctgcaggccagctatgaggacctgaaggcccagagccaggaggagatccggcggctgtggagccagctggacagcgcccggaccagccggcaggagctgtctgagctgcacgagcagctgctggcccggaccagccgggtggaggacctggagcagctgaagcagcgggagaagacccagcacgagagcgagctggagcagctgcgcatctactttgagaagaagctgagagatgctgagaagacctaccaggaggacctgaccctgctgcagcagaggctgcagggcgcccgggaggatgccctgctggacagcgtggaggtgggcctgagctgtgtgggcctggaggagaagccagagaagggcaggaaggaccacgtggatgagctggagcctgagcggcacaaggagagcctgccccgcttccaggccgagctggaggagagccaccgccaccagctggaggccctggagagccccctgtgcatccagcacgagggccacgtgtctgaccgctgctgcgtggagaccagcgccctgggccacgagtggaggctggagcccagcgagggccacagccaggagctgccctgggtgcacctgcagggcgtgcaggatggagacctggaggccgacacagaaagagctgcccgggtgctgggcctggagacagagcacaaggtgcagctgagcctgctgcagacagagctgaaggaggagattgagctgctgaagattgagaacagaaacctgtatggcaagctgcagcacgagacccggctgaaggatgacctggagaaggtgaagcacaacctgattgaggaccaccagaaggagctgaacaatgccaagcagaagacagagctgatgaagcaggagttccagaggaaggagacagactggaaggtgatgaaggaggagctgcagcgggaggccgaggagaagctgaccctgatgctgctggagctgcgggagaaggccgagagcgagaagcagaccatcatcaacaagtttgagctgcgggaggccgagatgaggcagctgcaggaccagcaggccgcccagatcctggacctggagaggagcctgacagagcagcagggccgcctgcagcagctggagcaggacctgaccagtgatgatgccctgcactgcagccagtgtggccgggagcccccaacagcccaggatggagagctggccgccctgcacgtgaaggaggactgtgccctgcagctgatgctggcccggagccgcttcctggaggagaggaaggagatcacagagaagttctctgctgagcaggatgccttcctgcaggaggcccaggagcagcacgcccgggagctgcagctgctgcaggagcggcaccagcagcagctgctgtctgtgacagctgagctggaggcccggcaccaggccgccctgggggagctgacagccagcctggagagcaagcagggcgccctgctggccgcccgggtggccgagctgcagaccaagcacgccgctgacctgggcgccctggagaccaggcacctgagcagcctggacagcctggagagctgctacctgtctgagttccagaccatccgggaggagcaccggcaggccctggagctgctgcgggctgactttgaggagcagctgtggaagaaggacagcctgcaccagaccatcctgacccaggagctggagaagctgaagaggaagcatgaaggagagctgcagagcgtgcgggaccacctgaggacagaggtgtccacagagctggccggcaccgtggcccacgagctgcagggcgtgcaccagggcgagtttggcagcgagaagaagacagccctgcacgagaaggaggagaccctgcggctgcagagcgcccaggcccagcccttccaccaggaggagaaggagagcctgagcctgcagctgcagaagaagaaccaccaggtgcagcagctgaaggaccaggtgctgagcctgagccatgaaattgaggagtgccgctctgagctggaggtgctgcagcagaggcgggagagagaaaatcgggagggcgccaacctgctgtccatgctgaaggcagatgtgaacctgagccacagcgagcggggggccctgcaggatgccctgcggcggctgctgggcctgtttggagagaccctgcgggctgctgtgaccctgcggagcagaattggagagcgggtgggcctgtgcctggatgatgctggggccggcctggccctgagcacagccccagccctggaggagacctggagcgatgtggccctgcctgagctggacaggaccctgtctgaatgtgccgagatgagctctgtggccgagatcagcagccacatgagggagagcttcctgatgagccctgagagcgtgagagaatgtgagcagcccatcagaagagtcttccagagcctgagcctggccgtggatggcctgatggagatggccctggacagcagccggcagctggaggaggcccggcagatccacagcagatttgagaaggagttctccttcaagaatgaggagacagcccaggtggtgaggaagcaccaggagctgctggagtgcctgaaggaggagagcgctgccaaggccgagctggccctggagctgcacaagacccagggcaccctggagggcttcaaggtggagacagctgacctgaaggaggtgctggccggcaaggaggacagcgagcaccggctggtgctggagctggagagcctgcggcggcagctgcagcaggccgcccaggagcaggccgccctgcgggaggagtgcacccggctgtggagcagaggagaggccacagccacagatgctgaggcccgggaggccgccctgaggaaggaggtggaggacctgaccaaggagcagagcgagaccaggaagcaggccgagaaggacagaagtgccctgctgagccagatgaagatcctggagagcgagctggaggagcagctgagccagcaccggggctgtgccaagcaggccgaggccgtgacagccctggagcagcaggtggccagcctggacaagcacctgaggaaccagaggcagttcatggatgagcaggccgctgagcgggagcacgagcgggaggagttccagcaggagatccagaggctggagggccagctgcggcaggccgccaagccccagccctggggcccccgggacagccagcaggcccccctggatggagaggtggagctgctgcagcagaagctgcgggagaagctggatgagttcaatgagctggccatccagaaggagagcgctgaccggcaggtgctgatgcaggaggaggagatcaagaggctggaggagatgaacatcaacatcaggaagaaggtggcccagctgcaggaggaggtggagaagcagaagaacatcgtgaagggcctggagcaggacaaggaggtgctgaagaagcagcagatgagcagcctgctgctggccagcaccctgcagagcaccctggatgctggccgctgcccagagccccccagcggcagccccccagagggccctgagatccagctggaggtgacccagagggccctgctgcggcgggagagcgaggtgctggacctgaaggagcagctggagaagatgaagggggacctggagagcaagaatgaggagatcctgcacctgaacctgaagctggacatgcagaacagccagacagctgtgtccctgcgggagctggaggaggagaacaccagcctgaaggtgatctacaccaggagcagcgagattgaggagctgaaggccaccatcgagaacctgcaggagaaccagaagaggctgcagaaggagaaggccgaggagattgagcagctgcatgaagtcatcgagaagctgcagcacgagctgagcctgatgggccctgtggtgcatgaggtgtctgacagccaggccggcagcctgcagagcgagctgctgtgcagccaggccggcggcccccggggccaggccctgcagggcgagctggaggccgccctggaggccaaggaggccctgagccggctgctggccgaccaggagaggaggcacagccaggccctggaggccctgcagcagaggctgcagggcgctgaggaggccgctgagctgcagctggccgagctggagagaaatgtggccctgcgggaggccgaggtggaggacatggccagccgcatccaggagtttgaagctgccctgaaggccaaggaggccaccatcgccgagaggaacctggagattgatgccctgaaccagaggaaggccgcccacagcgctgagctggaggccgtgctgctggccctggcccgcatccggcgggccctggagcagcagcccctggccgccggggccgcccctcctgagctgcagtggctgcgggcccagtgtgcccggctgagccggcagctgcaggtgctgcaccagcgcttcctgcgctgccaggtggagctggaccggcggcaggcccggcgggccacagcccacaccagggtgcctggggcccacccccagcccaggatggatggaggagccaaggcccaggtgactggagatgtggaggccagccatgatgctgccctggagcctgtggtgcctgacccccagggcgacctgcagcctgtgctggtgaccctgaaggatgcccccctgtgcaagcaggagggcgtgatgtctgtgctgactgtgtgccagaggcagctgcagagcgagctgctgctggtgaagaatgagatgaggctgagcctggaggatggcggcaagggcaaggagaaggtgctggaggactgccagctgcccaaggtggacctggtggcccaggtgaagcagctgcaggagaagctgaaccggctgctgtacagcatgaccttccagaatgtggatgctgctgacaccaagagcctgtggcccatggccagcgcccacctgctggagagctcctggagcgatgacagctgtgatggagaggagccagacatcagcccccacatcgacacctgtgatgccaacacagccactggaggagtgacagatgtgatcaagaaccaggccattgatgcctgtgatgccaacaccacccctgggggcgtgacagatgtgatcaagaactgggacagcctcatcccagatgagatgccagacagccccatccaggagaagtctgagtgccaggacatgagcctgagcagccccacctctgtgctgggcggcagccgccaccagagccacacagctgaggccggccccaggaagagccctgtgggcatgctggacctgagctcctggagcagccctgaggtgctgaggaaggactggaccctggagccctggcccagcctgcctgtgaccccccacagcggggccctgagcctgtgcagcgctgacaccagcctgggggacagagctgacaccagcctgccccagacccagggccctggcctgctgtgcagccctggggtgtctgctgctgccctggccctgcagtgggccgagagccccccagcagatgaccaccacgtgcagaggacagctgtggagaaggatgtggaggacttcatcaccaccagctttgacagccaggagaccctgagcagccccccacctggcctggagggcaaggctgacagaagtgagaagagtgatggcagcggctttggagcccggctgagccctggcagcggcggccctgaggcccagacagctggccctgtgaccccagccagcatcagcggccgcttccagcccctgcctgaggccatgaaggagaaggaggtgcggcccaagcacgtgaaggccctgctgcagatggtgagagatgagagccaccagatcctggccctgtctgagggcctggcccctccttctggagagccccacccccccaggaaggaggatgagatccaggacatcagcctgcatggaggcaagacccaggaggtgcccacagcctgcccagactggaggggggacctgctgcaggtggtgcaggaggcctttgagaaggagcaggagatgcagggcgtggagctgcagccccggctgagcggcagtgacctgggcggccacagcagcctgctggagcggctggagaagatcatccgggagcagggcgacctgcaggagaagagcctggagcacctgcggctgcctgacaggagcagcctgctgtctgagatccaggccctgcgggcccagctgaggatgacccacctgcagaaccaggagaagctgcagcacctgaggacagccctgaccagcgctgaggcccggggcagccagcaggagcaccagctgcggcggcaggtggagctgctggcctacaaggtggagcaggagaagtgcatcgccggggacctgcagaagaccctgtctgaggagcaggagaaggccaacagcgtgcagaagctgctggccgctgagcagacagtggtgcgggacctgaagagtgacctgtgtgagagccggcagaagtctgagcagctgagccgcagcctgtgtgaggtgcagcaggaggtgctgcagctgcgctccatgctgagcagcaaagaaaatgagctgaaggccgccctgcaggagctggagagcgagcagggcaagggccgggccctgcagagccagctggaggaggagcagctgcggcacctgcagcgggagagccagagcgccaaggccctggaggagctgcgggccagcctggagacccagagggcccagagcagccggctgtgtgtggccctgaagcatgagcagacagccaaggacaacctgcagaaggagctgcgcatcgagcacagccgctgtgaggccctgctggcccaggagaggagccagctgtctgagctgcagaaggacctggccgctgagaagagcaggaccctggagctgtctgaggccctgcggcatgagcggctgctgacagagcagctgagccagaggacccaggaggcctgtgtgcaccaggacacccaggcccaccacgccctgctgcagaagctgaaggaggagaagagccgggtggtggacctgcaggccatgctggagaaggtgcagcagcaggccctgcacagccagcagcagctggaggccgaggcccagaagcactgtgaggccctgcggcgggagaaggaggtgtctgccaccctgaagagcacagtggaggccctgcacacccagaagcgggagctgcgctgcagcctggagcgggagcgggagaagccagcctggctgcaggccgagctggagcagagccacccccggctgaaggagcaggagggcaggaaggccgcccggcgctctgctgaggcccggcagagccctgctgctgctgagcagtggaggaagtggcagagggacaaggagaagctgcgggagctggagctgcagaggcagagggacctgcacaagatcaagcagctgcagcagacagtgcgggacctggagagcaaggatgaggtgcccggcagccggctgcacctgggcagcgcccggcgggctgctggcagtgatgctgaccacctgcgggagcagcagcgggagctggaggccatgaggcagaggctgctgtctgctgcccggctgctgaccagcttcaccagccaggccgtggacagaacagtgaatgactggaccagcagcaatgagaaggctgtgatgagcctgctgcacaccctggaggagctgaagagtgacctgagccggcccaccagcagccagaagaagatggctgctgagctgcagttccagtttgtggatgtgctgctgaaggacaacgtgtccctgaccaaggccctgagcacagtgacccaggagaagctggagctgagcagagctgtgtccaagctggagaagctgctgaagcaccacctgcagaagggctgcagccccagccgctctgagaggtctgcctggaagccagatgaaacagccccccagagcagcctgcggcggccagaccccggccgcctgcccccagctgccagcgaggaggcccacaccagcaatgtgaagatggagaagctgtacctgcactacctgcgggcagagagcttcaggaaggccctgatctaccagaagaagtacctgctgctgctgattggaggcttccaggacagcgagcaggagaccctgtccatgattgcccacctgggcgtcttccccagcaaggccgagaggaagatcaccagccggcccttcacccgcttcagaacagctgtgcgggtggtgattgccatcctgcggctgcgcttcctggtgaagaagtggcaggaggtggacaggaagggggccctggcccagggcaaggcccccaggcctggcccccgggcccggcagccccagagcccccccaggacccgggagagcccccccaccagagatgtgcccagcggccacacccgggaccctgcccggggccgccgcctggccgccgccgccagcccccacagcggcggccgggccacccccagccccaacagccggctggagaggagcctgacagccagccaggaccctgagcacagcctgacagagtacatccaccacctggaggtgatccagcagaggctgggcggcgtgctgcctgacagcaccagcaagaagagctgccaccccatgatcaagcagtag

SEQ ID NO: 163536 - DNA, 6075 bp, synthetic construct
  misc_feature 1..6075: note = Description of Artificial Sequence: Synthetic coding sequence
  source 1..6075: mol_type = other DNA
atggccactggaggcggcccctttgaagatggcatgaatgaccaggacctgcccaactggagcaatgaaaatgtggatgaccggctgaacaacatggactggggcgcccagcagaagaaggccaacagaagcagcgagaagaacaagaagaagtttggagtggagagtgacaagagggtgaccaatgacatcagccctgagagcagccctggggtgggcagaagaaggaccaagaccccccacaccttcccccacagccgctacatgagccagatgtctgtgcctgagcaggccgagctggagaagctgaagcagaggatcaacttcagtgacctggaccagaggagcattggaagtgacagccagggccgggccacagctgccaacaacaagaggcagctgtctgagaacaggaagcccttcaacttcctgcccatgcagatcaacaccaacaagagcaaggatgccagcaccaacccccccaaccgggagaccatcggcagcgcccagtgcaaggagctgtttgccagcgccctgagcaatgacctgctgcagaactgccaggtgtctgaggaggatggccgcggggagcccgccatggagagcagccagatcgtgtcccggctggtgcagatccgggactacatcaccaaggccagctccatgagggaggacctggtggagaagaatgaaagaagtgccaacgtggagcggctgacccacctgattgaccacctgaaggagcaggagaagagctacatgaagttcctgaagaagatcctggcccgggacccccagcaggagcccatggaggagattgagaacctgaagaagcagcacgacctgctgaagaggatgctgcagcagcaggagcagctgcgggccctgcagggccggcaggccgccctgctggccctgcagcacaaggccgagcaggccatcgctgtgatggatgacagcgtggtggccgagacagctggcagcctgagcggcgtgtccatcaccagcgagctgaatgaggagctgaatgacctgatccagcgcttccacaaccagctgcgggacagccagcccccagctgtgcctgacaacagacggcaggccgagagcctgagcctgacccgggaggtgtcccagagcaggaagcccagcgccagcgagcggctgcctgatgagaaggtggagctgttcagcaagatgagggtgctgcaggagaagaagcagaagatggacaagctgctgggggagctgcacaccctgcgggaccagcacctgaacaacagcagcagcagcccccagaggtctgtggaccagaggagcaccagcgcccccagcgcctctgtgggcctggcccctgtggtgaatggagagagcaacagcctgaccagctctgtgccctaccccacagccagcctggtgtcccagaatgaaagtgaaaatgaaggccacctgaaccccagcgagaagctgcagaagctgaatgaggtgaggaagaggctgaatgagctgcgggagctggtgcactactatgagcagaccagtgacatgatgacagatgctgtgaatgaaaataggaaggatgaggagacagaggagagtgaatatgattctgaacatgagaacagcgagcctgtgaccaacatccggaacccccaggtggccagcacctggaatgaggtgaacagccacagcaatgcccagtgtgtgagcaacaacagagatggccgcacagtgaacagcaactgtgagatcaacaacagatctgctgccaacatccgggccctgaacatgccacccagcctggactgccgctacaaccgggagggggagcaggagatccacgtggcccagggagaagatgatgaggaggaggaggaggaggccgaggaggagggcgtgtctggggccagcctgagcagccacaggagcagcctggtggatgagcacccagaagatgctgagtttgagcagaagatcaaccggctgatggccgccaagcagaagctgcggcagctgcaggacctggtggccatggtgcaggatgatgatgctgcccagggcgtcatcagcgccagcgccagcaacctggatgacttctacccagctgaggaggacaccaagcagaacagcaacaacaccagaggaaatgccaacaagacccagaaggacaccggggtgaatgagaaggcccgggagaagttctatgaggccaagctgcagcagcagcagcgggagctgaagcagctgcaggaggagaggaagaagctgattgacatccaggagaagatccaggccctgcagacagcctgcccagacctgcagctgtctgctgcctctgtgggcaactgccccaccaagaagtacatgcctgctgtgaccagcacccccaccgtgaaccagcacgagaccagcaccagcaagtctgtgtttgagcctgaggacagcagcatcgtggacaatgagctgtggagcgagatgagaagacatgagatgctgcgggaggagctgcggcagaggaggaagcagctggaggccctgatggccgagcaccagaggcggcagggcctggccgagacagccagccctgtggccgtgtccctgcggagtgatggcagcgagaacctgtgcaccccccagcagagcaggacagagaagaccatggccacctggggcggcagcacccagtgtgccctggatgaggagggagatgaagatggctacctgtctgagggcatcgtgaggacagatgaggaggaggaggaggagcaggatgccagcagcaatgacaacttctctgtgtgccccagcaacagcgtgaaccacaacagctacaacgggaaggagaccaagaaccgctggaagaacaactgccccttcagcgcagatgagaactaccggcccctggccaagacccggcagcagaacatctccatgcagaggcaggagaacctgcgctgggtgtctgagctgtcctatgtggaggagaaggagcagtggcaggagcagatcaaccagctgaagaagcagctggacttctctgtgtccatctgccagaccctgatgcaggaccagcagaccctgagctgcctgctgcagaccctgctgaccggcccctacagcgtgatgcccagcaatgtggccagcccccaggtgcacttcatcatgcaccagctgaaccagtgctacacccagctgacctggcagcagaacaacgtgcagaggctgaagcagatgctgaatgagctgatgaggcagcagaaccagcaccctgagaagccaggcggcaaggagcggggcagcagcgccagccacccccccagccccagcctcttctgccccttctccttccccacccagcctgtgaacctcttcaacatccctggcttcaccaacttcagcagctttgcccctggcatgaacttcagccccctcttccccagcaactttggagacttcagccagaacatcagcacccccagcgagcagcagcagcccctggcccagaacagcagcggcaagacagagtacatggccttccccaagccctttgagagcagcagcagcattggagctgagaagcccaggaacaagaagctgcctgaggaggaggtggagagcagcaggaccccctggctgtatgagcaggagggggaggtggagaagcccttcatcaagacaggcttctctgtgtctgtggagaagagcaccagcagcaacaggaagaaccagctggacaccaatggaagaagacggcagtttgatgaggagagcctggagagcttcagctccatgccagaccctgtggaccccaccaccgtgaccaagaccttcaagaccaggaaggccagcgcccaggccagcctggccagcaaggacaagacccccaagagcaagagcaagaagaggaacagcacccagctgaagagccgggtgaagaacatccgctatgagagcgcctccatgagcagcacctgtgagccctgcaagagcaggaacagacattctgcccagacagaggagcctgtgcaggccaaggtgttcagcaggaagaaccacgagcagctggagaagatcatcaagtgcaacagaagcacagagatcagcagcgagactggaagtgacttctccatgtttgaggccctgcgggacaccatctacagcgaggtggccaccctcatcagccagaatgaaagccggccccacttcctgattgagctgttccacgagctgcagctgctgaacacagactacctgcggcagagggccctgtatgccctgcaggacatcgtgagccgccacatcagcgagagccatgagaagggggagaatgtgaagtctgtgaacagcggcacctggatcgccagcaacagcgagctgacccccagcgagagcctggccaccacagatgatgagacctttgagaagaactttgagcgggagacccacaagatcagcgagcagaatgatgctgacaatgcctctgtgctgtctgtgagcagcaactttgagccctttgccacagatgacctgggcaacacagtcatccacctggaccaggccctggccaggatgagagaatatgaaagaatgaagacagaggccgagagcaacagcaacatgcgctgcacctgccgcatcattgaagatggagatggagctggagctggcaccaccgtgaacaacctggaggagacccctgtgattgaaaatagaagcagccagcagcctgtgtctgaggtgtccaccatcccctgccccagaattgacacccagcagctggaccggcagatcaaggccatcatgaaggaggtgatccccttcctgaaggagcacatggatgaggtgtgcagcagccagctgctgacctctgtgcggaggatggtgctgaccctgacccagcagaatgatgagagcaaggagtttgtgaagttcttccacaagcagctgggcagcatcctgcaggacagcctggccaagtttgctggcaggaagctgaaggactgtggggaggacctgctggtggagatcagcgaggtgctcttcaatgagctggccttcttcaagctgatgcaggacctggacaacaacagcatcaccgtgaagcagcgctgcaagaggaagattgaggccactggagtcatccagagctgtgccaaggaggccaagaggatcctggaggaccacggcagccctgctggggagattgatgatgaggacaaggacaaggatgaaacagaaacagtgaagcagacccagaccagcgaggtgtatgatggccccaagaatgtgcggagtgacatcagtgaccaggaggaggatgaggagagcgagggctgccctgtgtccatcaacctgagcaaggccgagacccaggccctgaccaactacggcagcggggaggatgaaaatgaagatgaggagatggaggagtttgaggagggccctgtggatgtgcagaccagcctgcaggccaacacagaggccacagaagaaaatgaacatgatgagcaggtgctgcagagggacttcaagaagacagctgagagcaagaatgtgcccctggagcgggaggccaccagcaagaatgaccagaacaactgccctgtgaagccctgctacctgaacatcctggaggatgagcagcccctgaacagcgctgcccacaaggagagcccccccaccgtggacagcacccagcagcccaaccccctgcccctgcggctgcctgagatggagcccctggtgccccgggtgaaggaggtgaagagcgcccaggagaccccagagagcagcctggccggcagcccagacacagagagccctgtgctggtgaatgactatgaagctgagagcggcaacatcagccagaagagtgatgaagaagattttgtgaaggtggaggacctgcccctgaagctgaccatctacagcgaggccgacctgaggaagaagatggtggaggaggagcagaagaaccacctgtctggagagatctgtgagatgcagacagaggagctggccggcaacagcgagaccctgaaggagcctgagaccgtgggcgcccagagcatctag

SEQ ID NO: 163537 - DNA, 1590 bp, synthetic construct
  misc_feature 1..1590: note = Description of Artificial Sequence: Synthetic coding sequence
  source 1..1590: mol_type = other DNA
atggccactggaggcggcccctttgaagatggcatgaatgaccaggacctgcccaactggagcaatgaaaatgtggatgaccggctgaacaacatggactggggcgcccagcagaagaaggccaacagaagcagcgagaagaacaagaagaagtttggagtggagagtgacaagagggtgaccaatgacatcagccctgagagcagccctggggtgggcagaagaaggaccaagaccccccacaccttcccccacagccgctacatgagccagatgtctgtgcctgagcaggccgagctggagaagctgaagcagaggatcaacttcagtgacctggaccagaggagcattggaagtgacagccagggccgggccacagctgccaacaacaagaggcagctgtctgagaacaggaagcccttcaacttcctgcccatgcagatcaacaccaacaagagcaaggatgccagcaccaacccccccaaccgggagaccatcggcagcgcccagtgcaaggagctgtttgccagcgccctgagcaatgacctgctgcagaactgccaggtgtctgaggaggatggccgcggggagcccgccatggagagcagccagatcgtgtcccggctggtgcagatccgggactacatcaccaaggccagctccatgagggaggacctggtggagaagaatgaaagaagtgccaacgtggagcggctgacccacctgattgaccacctgaaggagcaggagaagagctacatgaagttcctgaagaagatcctggcccgggagaatgaggaggaggatgtgaggaccattgattctgctgtgggcagcggctctgtggccgagagcaccagcctgaacattgatgtgcagagcgaggccagtgacaccacagcccgggacccccagcaggagcccatggaggagattgagaacctgaagaagcagcacgacctgctgaagaggatgctgcagcagcaggagcagctgcgggccctgcagggccggcaggccgccctgctggccctgcagcacaaggccgagcaggccatcgctgtgatggatgattctgtggtggccgagacagctggcagcctgtctggagtgtccatcaccagcgagctgaatgaggagctgaatgacctgatccagcgcttccacaaccagctgcgggacagccagcccccagctgtgcctgacaacagacggcaggccgagagcctgagcctgacccgggaggtgtcccagagcaggaagcccagcgccagcgagcggctgcctgatgagaaggtggagctgttcagcaagatgagggtgctgcaggagaagaagcagaagatggacaagctgctgggggagctgcacaccctgcgggaccagcacctgaacaacagcagcagcagcccccagaggtctgtggaccagaggagcaccagcgcccccagcgcctctgtgggcctggcccctgtggtgaatggagagagcaacagcctgaccagctctgtgccctaccccacagccagcctggtgtcccagaatgaaagtgaaaatgaaggccacctgaaccccagcgagaagctgtag

SEQ ID NO: 163538 - DNA, 2172 bp, synthetic construct
  misc_feature 1..2172: note = Description of Artificial Sequence: Synthetic coding sequence
  source 1..2172: mol_type = other DNA
atgagcagcacctgtgagccctgcaagagcaggaacagacattctgcccagacagaggagcctgtgcaggccaaggtgttcagcaggaagaaccacgagcagctggagaagatcatcaagtgcaacagaagcacagagatcagcagcgcccacgcccggcgcatcctgcagcagagcaacagaaatgcctgcaatgaggcccctgagaccggcagtgacttctccatgtttgaggccctgcgggacaccatctacagcgaggtggccaccctcatcagccagaatgaaagccggccccacttcctgattgagctgttccacgagctgcagctgctgaacacagactacctgcggcagagggccctgtatgccctgcaggacatcgtgagccgccacatcagcgagagccatgagaagggagaaaatgtgaagtctgtgaacagcggcacctggatcgccagcaacagcgagctgaccccatctgagagcctggccaccacagatgatgagacctttgagaagaactttgagcgggagacccacaagatcagcgagcagaatgatgctgacaatgcctctgtgctgtctgtgagcagcaactttgagccctttgccacagatgacctgggcaacacagtcatccacctggaccaggccctggccaggatgagagaatatgaaagaatgaagacagaagctgagagcaacagcaacatgcgctgcacctgccgcatcattgaagatggagatggagctggggccggcaccaccgtgaacaacctggaggagacccctgtgattgagaacagaagcagccagcagcctgtgtctgaggtgtccaccatcccctgccccagaattgacacccagcagctggaccggcagatcaaggccatcatgaaggaggtgatccccttcctgaaggagcacatggatgaggtgtgcagcagccagctgctgacctctgtgcggaggatggtgctgaccctgacccagcagaatgatgagagcaaggagtttgtgaagttcttccacaagcagctgggcagcatcctgcaggacagcctggccaagtttgctggcaggaagctgaaggactgtggggaggacctgctggtggagatcagcgaggtgctcttcaatgagctggccttcttcaagctgatgcaggacctggacaacaacagcatcaccgtgaagcagcgctgcaagaggaagattgaggccaccggggtcatccagagctgtgccaaggaggccaagaggatcctggaggaccacggcagccctgctggggagattgatgatgaggacaaggacaaggatgaaacagagaccgtgaagcagacccagaccagcgaggtgtatgatggccccaagaatgtgcggagtgacatcagtgaccaggaggaggatgaggagagcgagggctgccctgtgtccatcaacctgagcaaggccgagacccaggccctgaccaactacggcagcggagaagatgaaaatgaagatgaggagatggaggagtttgaggagggccctgtggatgtgcagaccagcctgcaggccaacacagaggccacagaggagaatgaacatgatgagcaggtgctgcagagggacttcaagaagacagctgagagcaagaatgtgcccctggagcgggaggccaccagcaagaatgaccagaacaactgccctgtgaagccctgctacctgaacatcctggaggatgagcagcccctgaacagcgctgcccacaaggagagccccccaacagtggacagcacccagcagcccaaccccctgcccctgcggctgcctgagatggagcccctggtgccccgggtgaaggaggtgaagagcgcccaggagaccccagagagcagcctggccggcagcccagacacagagagccctgtgctggtgaatgactatgaggccgagagcggcaacatcagccagaagagtgatgaggaggactttgtgaaggtggaggacctgcccctgaagctgaccatctacagcgaggccgacctgaggaagaagatggtggaggaggagcagaagaaccacctgagcggggagatctgtgagatgcagacagaggagctggccggcaacagcgagaccctgaaggagcctgagaccgtgggcgcccagagcatctag

SEQ ID NO: 163539 - DNA, 2295 bp, synthetic construct
  misc_feature 1..2295: note = Description of Artificial Sequence: Synthetic coding sequence
  source 1..2295: mol_type = other DNA
tgaaaagccagcgcccaggccagcctggccagcaaggacaagacccccaagagcaagagcaagaagaggaacagcacccagctgaagagccgggtgaagaacatccgctatgaaagtgcctccatgagcagcacctgtgagccctgcaagagcaggaacagacacagcgcccagacagaggagcctgtgcaggccaaggtgttcagcaggaagaaccacgagcagctggagaagatcatcaagtgcaacagaagcacagagatcagcagcgcccacgcccggcgcatcctgcagcagagcaacagaaatgcctgcaatgaggcccctgagactggaagtgacttctccatgtttgaggccctgcgggacaccatctacagcgaggtggccaccctcatcagccagaatgaaagccggccccacttcctgattgagctgttccacgagctgcagctgctgaacacagactacctgcggcagagggccctgtatgccctgcaggacatcgtgagccgccacatcagcgagagccatgagaagggggagaatgtgaagtctgtgaacagcggcacctggatcgccagcaacagcgagctgacccccagcgagagcctggccaccacagatgatgagacctttgagaagaactttgagcgggagacccacaagatcagcgagcagaatgatgctgacaatgcctctgtgctgtctgtgagcagcaactttgagccctttgccacagatgacctgggcaacacagtcatccacctggaccaggccctggccaggatgagagaatatgaaagaatgaagacagaggccgagagcaacagcaacatgcgctgcacctgccgcatcattgaagatggagatggagctggagctggcaccaccgtgaacaacctggaggagacccctgtgattgaaaatagaagcagccagcagcctgtgtctgaggtgtccaccatcccctgccccagaattgacacccagcagctggaccggcagatcaaggccatcatgaaggaggtgatccccttcctgaaggagcacatggatgaggtgtgcagcagccagctgctgacctctgtgcggaggatggtgctgaccctgacccagcagaatgatgagagcaaggagtttgtgaagttcttccacaagcagctgggcagcatcctgcaggacagcctggccaagtttgctggcaggaagctgaaggactgtggggaggacctgctggtggagatcagcgaggtgctcttcaatgagctggccttcttcaagctgatgcaggacctggacaacaacagcatcaccgtgaagcagcgctgcaagaggaagattgaggccactggagtcatccagagctgtgccaaggaggccaagaggatcctggaggaccacggcagccctgctggggagattgatgatgaggacaaggacaaggatgaaacagaaacagtgaagcagacccagaccagcgaggtgtatgatggccccaagaatgtgcggagtgacatcagtgaccaggaggaggatgaggagagcgagggctgccctgtgtccatcaacctgagcaaggccgagacccaggccctgaccaactacggcagcggggaggatgaaaatgaagatgaggagatggaggagtttgaggagggccctgtggatgtgcagaccagcctgcaggccaacacagaggccacagaagaaaatgaacatgatgagcaggtgctgcagagggacttcaagaagacagctgagagcaagaatgtgcccctggagcgggaggccaccagcaagaatgaccagaacaactgccctgtgaagccctgctacctgaacatcctggaggatgagcagcccctgaacagcgctgcccacaaggagagcccccccaccgtggacagcacccagcagcccaaccccctgcccctgcggctgcctgagatggagcccctggtgccccgggtgaaggaggtgaagagcgcccaggagaccccagagagcagcctggccggcagcccagacacagagagccctgtgctggtgaatgactatgaagctgagagcggcaacatcagccagaagagtgatgaagaagattttgtgaaggtggaggacctgcccctgaagctgaccatctacagcgaggccgacctgaggaagaagatggtggaggaggagcagaagaaccacctgtctggagagatctgtgagatgcagacagaggagctggccggcaacagcgagaccctgaaggagcctgagaccgtgggcgcccagagcatctag

SEQ ID NO: 163540 - DNA, 1227 bp, synthetic construct
  misc_feature 1..1227: note = Description of Artificial Sequence: Synthetic coding sequence
  source 1..1227: mol_type = other DNA
atggccactggaggcggcccctttgaagatggcatgaatgaccaggacctgcccaactggagcaatgaaaatgtggatgaccggctgaacaacatggactggggcgcccagcagaagaaggccaacagaagcagcgagaagaacaagaagaagtttggagtggagagtgacaagagggtgaccaatgacatcagccctgagagcagccctggggtgggcagaagaaggaccaagaccccccacaccttcccccacagccgctacatgagccagatgtctgtgcctgagcaggccgagctggagaagctgaagcagaggatcaacttcagtgacctggaccagaggagcattggaagtgacagccagggccgggccacagctgccaacaacaagaggcagctgtctgagaacaggaagcccttcaacttcctgcccatgcagatcaacaccaacaagagcaaggatgccagcaccaacccccccaaccgggagaccatcggcagcgcccagtgcaaggagctgtttgccagcgccctgagcaatgacctgctgcagaactgccaggtgtctgaggaggatggccgcggggagcccgccatggagagcagccagatcgtgtcccggctggtgcagatccgggactacatcaccaaggccagctccatgagggaggacctggtggagaagaatgaaagaagtgccaacgtggagcggctgacccacctgattgaccacctgaaggagcaggagaagagctacatgaagttcctgaagaagatcctggcccgggacccccagcaggagcccatggaggagattgagaacctgaagaagcagcacgacctgctgaagaggatgctgcagcagcaggagcagctgcgggccctgcagggccggcaggccgccctgctggccctgcagcacaaggccgagcaggccatcgctgtgatggatgacagcgtggtggccgagacagctggcagcctgagcggcgtgtccatcaccagcgagctgaatgaggagctgaatgacctgatccagcgcttccacaaccagctgcgggacagccagcccccagctgtgcctgacaacagacggcaggccgagagcctgagcctgacccgggaggtgtcccagagcaggaagcccagcgccagcgagcggctgcctgatgagaaggtggagctgttcagcaagatgagggtgctgcaggagaagaagcagtag

SEQ ID NO: 163541 - DNA, 1569 bp, synthetic construct
  misc_feature 1..1569: note = Description of Artificial Sequence: Synthetic coding sequence
  source 1..1569: mol_type = other DNA
atggctgtgaacaagggcctgaccctgctggatggagacctgcctgagcaggagaatgtgctgcagagggtgctgcagctgcctgtggtgtctggcacctgtgagtgcttccagaagacctacaccagcaccaaggaggcccaccccctggtggcctctgtgtgcaatgcctatgagaagggcgtgcagagcgccagcagcctggccgcctggagcatggagcctgtggtgcggcggctgagcacccagttcaccgctgccaatgagctggcctgccggggcctggaccacctggaggagaagatcccagccctgcagtacccacctgagaagatcgccagcgagctgaaggacaccatcagcacccggctgcggagcgccaggaacagcatctctgtgcccatcgccagcaccagtgacaaggtgctgggcgccgccctggccggctgtgagctggcctggggcgtggcccgggacacagctgagtttgctgccaacaccagggctggccgcctggccagcggcggcgctgacctggccctgggcagcattgagaaggtggtggagtacctgctgcccccagacaaggaggagagcgccccagcccctggccaccagcaggcccagaagagccccaaggccaagcccagcctgctgagccgggtgggcgccctgaccaacaccctgagccgctacacagtgcagaccatggcccgggccctggagcagggccacacagtggccatgtggatccctggggtggtgcccctgagcagcctggcccagtggggcgcctctgtggccatgcaggccgtgtccagaagaagaagtgaggtgcgggtgccctggctgcacagcctggccgccgcccaggaggaggaccacgaggaccagacagacacagaaggagaggacacagaggaggaggaggagctggagacagaggagaacaagttcagcgaggtggccgccctgcccggcccccggggcctgctgggcggcgtggcccacaccctgcagaagaccctgcagaccaccatctctgctgtgacctgggccccagctgctgtgctgggcatggccggccgggtgctgcacctgaccccagccccagctgtgagcagcaccaagggccgggccatgagcctgagtgatgccctgaagggcgtgacagacaacgtggtggacacagtggtgcactacgtgcccctgccccggctgagcctgatggagcctgagagcgagttccgggacatcgacaaccccccagctgaggtggagcggcgggaggccgagcggcgggccagcggggcccccagcgctggccctgagcccgccccccggctggcccagcccaggaggagcctgcggagcgcccagagccctggggcccctcctggccctggcctggaggatgaggtggccaccccagctgccccccggcccggcttccctgctgtgccccgggagaagcccaagagaagagtgtctgacagcttcttccggcccagcgtgatggagcccatcctgggccgcacccactacagccagctgaggaagaagagctag

SEQ ID NO: 163542 - DNA, 1569 bp, synthetic construct; identical to SEQ ID NO: 163541
  misc_feature 1..1569: note = Description of Artificial Sequence: Synthetic coding sequence
  source 1..1569: mol_type = other DNA

SEQ ID NO: 163543 - DNA, 1314 bp, synthetic construct
  misc_feature 1..1314: note = Description of Artificial Sequence: Synthetic coding sequence
  source 1..1314: mol_type = other DNA
atggcctctgtggccgtggacccccagcccagcgtggtgaccagggtggtgaacctgcccctggtgagcagcacctatgacctgatgagcagcgcctacctgagcaccaaggaccagtacccctacctgaagtctgtgtgtgagatggctgaaaatggagtgaagaccatcacctctgtggccatgaccagcgccctgcccatcatccagaagctggagccccagattgctgtggccaacacctacgcctgcaagggcctggaccgcatcgaggagcggctgcccatcctgaaccagcccagcacccagatcgtggccaatgccaagggagctgtgactggagccaaggatgctgtgaccaccaccgtgactggagccaaggacagcgtggccagcaccatcactggagtgatggacaagaccaagggagctgtgacaggctctgtggagaagaccaagtctgtggtgtctggcagcatcaacacagtgctgggcagcaggatgatgcagctggtgagcagcggcgtggagaatgccctgaccaagtctgagctgctggtggagcagtacctgcccctgacagaggaggagctggagaaggaggccaagaaggtggagggctttgacctggtgcagaagcccagctactacgtgcggctgggcagcctgagcaccaagctgcacagccgggcctaccagcaggccctgagccgggtgaaggaggccaagcagaagagccagcagaccatcagccagctgcacagcacagtgcacctgattgaatttgccaggaagaatgtgtacagcgccaaccagaagatccaggatgcccaggacaagctgtacctgtcctgggtggagtggaagaggagcatcggctatgatgacacagatgagagccactgtgccgagcacatcgagagcaggaccctggccatcgccaggaacctgacccagcagctgcagaccacctgccacaccctgctgagcaacatccagggcgtgccccagaacatccaggaccaggccaagcacatgggcgtgatggccggggacatctacagcgtcttcagaaatgctgccagcttcaaggaggtgtctgacagcctgctgaccagcagcaagggccagctgcagaagatgaaggagagcctggatgatgtgatggactacctggtgaacaacacccccctgaactggctggtgggccccttctacccccagctgacagagagccagaatgcccaggaccagggcgctgagatggacaagagcagccaggagacccagaggtctgagcacaagacccactag

SEQ ID NO: 163544 - DNA, 333 bp, synthetic construct
  misc_feature 1..333: note = Description of Artificial Sequence: Synthetic coding sequence
  source 1..333: mol_type = other DNA
atggcctctgtggccgtggacccccagcccagcgtggtgaccagggtggtgaacctgcccctggtgagcagcacctatgacctgatgagcagcgcctacctgagcaccaaggaccagtacccctacctgaagtctgtgtgtgagatggctgaaaatggagtgaagaccatcacctctgtggccatgaccagcgccctgcccatcatccagaagctggagccccagattgctgtggccaacacctacgcctgcaagggcctggaccgcatcgaggagcggctgcccatcctgaaccagcccagcacccaggtgtccctgggccagaagtgctag

SEQ ID NO: 163545 - DNA, 381 bp, synthetic construct
  misc_feature 1..381: note = Description of Artificial Sequence: Synthetic coding sequence
  source 1..381: mol_type = other DNA
atggcctctgtggccgtggacccccagcccagcgtggtgaccagggtggtgaacctgcccctggtgagcagcacctatgacctgatgagcagcgcctacctgagcaccaaggaccagtacccctacctgaagtctgtgtgtgagatggctgaaaatggagtgaagaccatcacctctgtggccatgaccagcgccctgcccatcatccagaagctggagccccagattgctgtggccaacacctacgcctgcaagggcctggaccgcatcgaggagcggctgcccatcctgaaccagcccagcacccaggccaacacctgcttccccaacctggacctggatgtgtgcctgaagaacaacggccacttcctgaccagctag

SEQ ID NO: 163546 - DNA, 1071 bp, synthetic construct
  misc_feature 1..1071: note = Description of Artificial Sequence: Synthetic coding sequence
  source 1..1071: mol_type = other DNA
atggcctctgtggccgtggacccccagcccagcgtggtgaccagggtggtgaacctgcccctggtgagcagcacctatgacctgatgagcagcgcctacctgagcaccaaggaccagtacccctacctgaagtctgtgtgtgagatggctgaaaatggagtgaagaccatcacctctgtggccatgaccagcgccctgcccatcatccagaagctggagccccagattgctgtggccaacacctacgcctgcaagggcctggaccgcatcgaggagcggctgcccatcctgaaccagcccagcacccagatcgtggccaatgccaagggagctgtgactggagccaaggatgctgtgaccaccaccgtgactggagccaaggacagcgtggccagcaccatcactggagtgatggacaagaccaagggagctgtgacaggctctgtggagaagaccaagtctgtgaagaagaagcagaagaagctgaaggacctgatctggttccgcagccagctgcacagcacagtgcacctgattgaatttgccaggaagaatgtgtacagcgccaaccagaagatccaggatgcccaggacaagctgtacctgtcctgggtggagtggaagaggagcatcggctatgatgacacagatgagagccactgtgccgagcacatcgagagcaggaccctggccatcgccaggaacctgacccagcagctgcagaccacctgccacaccctgctgagcaacatccagggcgtgccccagaacatccaggaccaggccaagcacatgggcgtgatggccggggacatctacagcgtcttcagaaatgctgccagcttcaaggaggtgtctgacagcctgctgaccagcagcaagggccagctgcagaagatgaaggagagcctggatgatgtgatggactacctggtgaacaacacccccctgaactggctggtgggccccttctacccccagctgacagagagccagaatgcccaggaccagggcgctgagatggacaagagcagccaggagacccagaggtctgagcacaagacccactag

SEQ ID NO: 163547 - DNA, 378 bp, synthetic construct
  misc_feature 1..378: note = Description of Artificial Sequence: Synthetic coding sequence
  source 1..378: mol_type = other DNA
atggcctctgtggccgtggacccccagcccagcgtggtgaccagggtggtgaacctgcccctggtgagcagcacctatgacctgatgagcagcgcctacctgagcaccaaggaccagtacccctacctgaagtctgtgtgtgagatggctgaaaatggagtgaagaccatcacctctgtggccatgaccagcgccctgcccatcatccagaagctggagccccagattgctgtggccaacacctacgcctgcaagggcctggaccgcatcgaggagcggctgcccatcctgaaccagcccagcacccagatcgtggccaatgccaagggagctgtgactggagccaaggatgctgtgaccaccaccgtgactggatag

SEQ ID NO: 163548 - DNA, 735 bp, synthetic construct
  misc_feature 1..735: note = Description of Artificial Sequence: Synthetic coding sequence
  source 1..735: mol_type = other DNA
atgggccccccatctgctgccccccggggcggccaccggccctggcagggcctgctgatcacagccagcctgctgaccttctggcacccccccaccaccgtgcagttcaccatcgaggccctgcccagcagcgctgctgagggcaaggatgtgctgctgctggcctgcaacatcagcgagaccatccaggcctactactggcacaagggcaagacagctgagggcagccccctgattgctggctacatcacagacatccaggccaacatccctggagctgcctacagcggccgggagaccgtgtaccccaacggcagcctgctcttccagaacatcaccctggaggatgctggcagctacaccctgcggaccatcaatgccagctatgacagcgaccaggccaccggccagctgcacgtgcaccagaacaacgtgcccggcctgcctgtgggcgctgtggccggcatcgtgactggagtgctggtgggcgtggccctggtggccgccctggtgtgcttcctgctgctgagcaggacaggccgggccagcatccagagggacctgcgggagcagcccccaccagccagcaccccaggccacggccccagccacaggagcaccttcagcgcccccctgcccagccccaggacagccacccccatctatgaggagctgctgtacagtgatgccaacatctactgccagattgaccacaaggcagatgtggtgtcctag

SEQ ID NO: 163549 - DNA, 1269 bp, synthetic construct
  misc_feature 1..1269: note = Description of Artificial Sequence: Synthetic coding sequence
  source 1..1269: mol_type = other DNA
atgtctgcagatggagctgaggctgatggcagcacccaggtgacagtggaggagcctgtgcagcagcccagcgtggtggacagagtggcctccatgcccctcatcagcagcacctgtgacatggtgtctgctgcctatgccagcaccaaggagagctacccccacatcaagacagtgtgtgatgctgctgagaagggcgtgaggaccctgacagctgctgctgtgtctggggcccagcccatcctgagcaagctggagccccagatcgccagcgcctctgaatatgcccaccggggcctggacaagctggaggagaacctgcccatcctgcagcagcccacagagaaggtgtctggggcccaggagatggtgagcagcgccaaggacacagtggccacccagctgtctgaggccgtggatgccaccagaggagctgtgcagagcggcgtggacaagaccaagtctgtggtgactggaggagtgcagagcgtgatgggcagccggctgggccagatggtgctgtctggagtggacacagtgctgggcaagtctgaggagtgggccgacaaccacctgcccctgacagatgctgagctggcccgcatcgccaccagcctggatggctttgatgtggcctctgtgcagcagcagaggcaggagcagagctactttgtgcggctgggcagcctgtctgagcggctgcggcagcacgcctatgagcacagcctgggcaagctgcgggccaccaagcagagggcccaggaggccctgctgcagctgagccaggtgctgagcctgatggagaccgtgaagcagggcgtggaccagaagctggtggagggccaggagaagctgcaccagatgtggctgtcctggaaccagaagcagctgcagggccctgagaaggagccccccaagccagagcaggtggagagccgggccctgaccatgttccgggacatcgcccagcagctgcaggccacctgcaccagcctgggcagcagcatccagggcctgcccaccaacgtgaaggaccaggtgcagcaggcccggcggcaggtggaggacctgcaggccaccttcagcagcatccacagcttccaggacctgagcagcagcatcctggcccagagccgggagcgggtggccagcgcccgggaggccctggaccacatggtggagtatgtggcccagaacacccctgtgacctggctggtgggcccctttgcccctggcatcacagagaaggcccctgaggagaagaagtag

SEQ ID NO: 163550 - DNA, 1392 bp, synthetic construct
  misc_feature 1..1392: note = Description of Artificial Sequence: Synthetic coding sequence
  source 1..1392: mol_type = other DNA
atgtctgaggaggaggccgcccagatccccaggagctctgtgtgggagcaggaccagcagaatgtggtgcagagggtggtggccctgcccctggtgcgggccacctgcacagctgtgtgtgatgtgtacagcgctgccaaggacagacaccccctgctgggcagcgcctgccgcctggccgagaactgtgtgtgtggcctgaccacccgggccctggaccacgcccagcccctgctggagcacctgcagccccagctggccaccatgaacagcctggcctgccggggcctggacaagctggaggagaagctgcccttcctgcagcagcccagcgagaccgtggtgaccagcgccaaggatgtggtggccagctctgtgactggagtggtggacctggcccggcggggccgccgctggagcgtggagctgaagaggtctgtgtcccatgctgtggatgtggtgctggagaagtctgaggagctggtggaccacttcctgcccatgacagaggaggagctggccgccctggccgctgaggccgagggccctgaggtgggctctgtggaggaccagaggcggcagcagggctactttgtgcggctgggcagcctgagcgcccgcatccgccacctggcctatgagcacagcgtgggcaagctgcggcagagcaagcaccgggcccaggacaccctggcccagctgcaggagaccctggagctgattgaccacatgcagtgtggggtgacccccacagccccagcctgccctgggaaggtgcatgagctgtggggcgagtggggccagaggcctcctgagagcagaagaagaagccaggccgagctggagaccctggtgctgagccgcagcctgacccaggagctgcagggcaccgtggaggccctggagagctctgtgcggggcctgcctgctggggcccaggagaaggtggccgaggtgcggcgctctgtggatgccctgcagacagcctttgctgatgcccgctgcttcagagatgtgcctgctgctgccctggccgagggccggggccgggtggcccacgcccacgcctgtgtggatgagctgctggagctggtggtgcaggccgtgcccctgccctggctggtgggcccctttgcccccatcctggtggagaggcctgagcccctgcctgacctggccgacctggtggatgaagtcatcggcggccctgacccccgctgggcccacctggactggccagcccagcagagggcctgggaggccgagcacagagatggcagcggaaatggagatggagacaggatgggcgtggccggggacatctgtgagcaggagcctgagacccccagctgccctgtgaagcacaccctgatgcctgagctggacttctag

SEQ ID NO: 163551 - DNA, 3768 bp, synthetic construct
  misc_feature 1..3768: note = Description of Artificial Sequence: Synthetic coding sequence
  source 1..3768: mol_type = other DNA
atgaatggctatgcagagttcccccccagccccagcaaccccaccaaggagcctgtggagccccagcccagccaggtgcccctgcaggaggatgtggacatgagcagcggcagcagcggccacgagaccaatgaaaactgcagcacaggccgggacagccagggcagtgactgtgatgattctgggaaggagctgggcatgctggtggagcccccagatgcccggcagagcccagacaccttcagcctgatgatggccaagtctgagcacaaccccagcaccagcggctgcagcagtgaccagagcagcaaggtggacacccacaaggagctgatcaagaccctgaaggagctgaaggtgcacctgcctgctgacaagaaggccaagggcaaggccagcaccctggccaccctgaagtatgccctgcggtctgtgaagcaggtgaaggccaatgaggagtactaccagctgctgatgagcagcgagggccacccctgtggggctgatgtgcccagctacacagtggaggagatggagagcgtgaccagcgagcacatcgtgaagaatgctgacatgtttgctgtggccgtgtccctggtgtctgggaagatcctgtacatcagtgaccaggtggccagcatcttccactgcaagagagatgccttcagtgatgccaagtttgtggagttcctggcccctcatgatgtgggcgtcttccacagcttcaccagcccctacaagctgcccctgtggagcatgtgcagcggggctgacagcttcacccaggagtgcatggaggagaagagcttcttctgccgggtgtctgtgaggaagagccatgaaaatgagatccgctaccaccccttcaggatgaccccctacctggtgaaggtgcgggaccagcagggcgctgagagccagctgtgctgcctgctgctggccgagcgggtgcacagcggctatgaggccccccgcatccccccagagaagaggatcttcaccaccacccacacccccaactgcctcttccaggatgtggatgaaagagctgtgcccctgctgggctacctgccccaggacctgattgagacccctgtgctggtgcagctgcaccccagcgaccggcccctgatgctggccatccacaagaagatcctgcagagcggcggccagccctttgactacagccccatccgcttccgggccagaaatggagagtacatcaccctggacacctcctggagcagcttcatcaacccctggagcaggaagatctccttcatcatcggccgccacaaggtgcgggtgggccccctgaatgaagatgtgtttgctgcccacccctgcacagaggagaaggccctgcaccccagcatccaggagctgacagagcagatccaccggctgctgctgcagcctgtgccccacagcggcagcagcggctacggcagcctgggcagcaatggcagccatgagcacctgatgagccagaccagcagcagtgacagcaatggacatgaggacagcagaagaagaagagctgagatctgcaagaatggaaacaagaccaagaacagaagccactacagccatgaaagtggagagcagaagaagaagtctgtgacagagatgcagaccaaccccccagctgagaagaaggctgtgcctgccatggagaaggacagcctgggcgtgtccttccctgaggagctggcctgcaagaaccagcccacctgcagctaccagcagatcagctgcctggacagcgtcatccgctacctggagagctgcaatgaggccgccaccctgaagaggaaatgtgagttccctgccaacgtgcctgccctgcggagcagtgacaagaggaaggccaccgtgtccccaggcccccacgccggggaggccgagccccccagccgggtgaacagcaggactggagtgggcacccacctgaccagcctggccctgcccgggaaggccgagagcgtggccagcctgaccagccagtgcagctacagcagcaccatcgtgcacgtgggggacaagaagccccagcctgagctggagatggtggaggatgctgccagcggccctgagagcctggactgcctggccggccctgccctggcctgtggcctgagccaggagaaggagcccttcaagaagctgggcctgaccaaggaggtgctggccgcccacacccagaaggaggagcagagcttcctgcagaagttcaaggagatcaggaagctgagcatcttccagagccactgccactactacctgcaggagaggagcaagggccagcccagcgagaggacagcccctggcctgaggaacaccagcggcatcgacagcccctggaagaagacaggcaagaacaggaagctgaagagcaagagggtgaagccccgggacagcagcgagagcactggaagtggcggccctgtgtctgcccggccccccctggtgggcctgaatgccacagcctggagccccagcgacaccagccagagcagctgcccagctgtgcccttccctgcccctgtgcctgctgcctacagcctgcctgtgtttcctgcccctggcaccgtggccgcccccccagcccctcctcatgccagcttcaccgtgcctgctgtgcctgtggacctgcagcaccagtttgctgtgcagcccccacccttccctgcccccctggcccctgtgatggccttcatgctgcccagctacagcttccccagcggcacccccaacctgccccaggccttcttccccagccagccccagttccccagccaccccaccctgaccagcgagatggccagcgccagccagcctgagttccccagcaggaccagcatcccccggcagccctgtgcctgcccagccacccgggccaccccaccttctgccatgggccgggccagccccccactcttccagagccgcagcagcagccccctgcagctgaacctgctgcagctggaggaggcccctgagggcggcaccggggccatgggcaccaccggggccacagaaacagctgctgtgggcgctgactgcaagccaggcaccagccgggaccagcagcccaaggcccccctgaccagagatgagcccagcgacacccagaacagtgatgccctgagcaccagcagcggcctgctgaacctgctgctgaatgaagacctgtgcagcgccagcggcagcgctgccagcgagagcctgggcagcggcagcctgggctgtgatgccagccccagcggggccggcagcagtgacaccagccacaccagcaagtacttcggcagcattgacagcagcgagaacaaccacaaggccaagatgaacacaggcatggaggagagcgagcacttcatcaagtgtgtgctgcaggaccccatctggctgctgatggctgatgctgacagctctgtgatgatgacctaccagctgcccagcaggaacctggaggccgtgctgaaggaggaccgggagaagctgaagctgctgcagaagctgcagccccgcttcacagagagccagaagcaggagctgcgggaggtgcaccagtggatgcagacaggaggcctgcctgctgccattgatgtggctgaatgtgtgtactgtgagaacaaggagaagggcaacatctgcatcccctatgaggaggacatccccagcctgggcctgtctgaggtgtctgacaccaaggaggatgaaaatggcagccccctgaaccacagaattgaggagcagacctag

SEQ ID NO: 163552 - DNA, 1215 bp, synthetic construct
  misc_feature 1..1215: note = Description of Artificial Sequence: Synthetic coding sequence
  source 1..1215: mol_type = other DNA
atgaatggctatgcagagttcccccccagccccagcaaccccaccaaggagcctgtggagccccagcccagccaggtgcccctgcaggaggatgtggacatgagcagcggcagcagcggccacgagaccaatgaaaactgcagcacaggccgggacagccagggcagtgactgtgatgattctgggaaggagctgggcatgctggtggagcccccagatgcccggcagagcccagacaccttcagcctgatgatggccaagtctgagcacaaccccagcaccagcggctgcagcagtgaccagagcagcaaggtggacacccacaaggagctgatcaagaccctgaaggagctgaaggtgcacctgcctgctgacaagaaggccaagggcaaggccagcaccctggccaccctgaagtatgccctgcggtctgtgaagcaggtgaaggccaatgaggagtactaccagctgctgatgagcagcgagggccacccctgtggggctgatgtgcccagctacacagtggaggagatggagagcgtgaccagcgagcacatcgtgaagaatgctgacatgtttgctgtggccgtgtccctggtgtctgggaagatcctgtacatcagtgaccaggtggccagcatcttccactgcaagagagatgccttcagtgatgccaagtttgtggagttcctggcccctcatgatgtgggcgtcttccacagcttcaccagcccctacaagctgcccctgtggagcatgtgcagcggggctgacagcttcacccaggagtgcatggaggagaagagcttcttctgccgggtgtctgtgaggaagagccatgaaaatgagatccgctaccaccccttcaggatgaccccctacctggtgaaggtgcgggaccagcagggcgctgagagccagctgtgctgcctgctgctggccgagcgggtgcacagcggctatgaggccccccgcatccccccagagaagaggatcttcaccaccacccacacccccaactgcctcttccaggatgtggatgagagccctgctgtgagaagagctgccttccgcctcttcagccacagcgtgtccaggcctgagaggagagtgcaccacgtgggccaccagctggtgcagctgcaccagcccatggagcaggagaacctgctgcaccactgggaggcccagagccagggcggcccctttgaatag

SEQ ID NO: 163553 - DNA, 1215 bp, synthetic construct; identical to SEQ ID NO: 163552
  misc_feature 1..1215: note = Description of Artificial Sequence: Synthetic coding sequence
  source 1..1215: mol_type = other DNA

SEQ ID NO: 163554 - DNA, 330 bp, synthetic construct
  misc_feature 1..330: note = Description of Artificial Sequence: Synthetic coding sequence
  source 1..330: mol_type = other DNA
atgaatggctatgcagagttcccccccagccccagcaaccccaccaaggagcctgtggagccccagcccagccaggtgcccctgcaggaggatgtggacatgagcagcggcagcagcggccacgagaccaatgaaaactgcagcacaggccgggacagccagggcagtgactgtgatgattctgggaaggagctgggcatgctggtggagcccccagatgcccggcagagcccagacaccttcagcctgatgatggccaagtctgagcacaaccccagcaccagcggctgcagcagtgaccagagcagcaaggtggacacccacaagtag

SEQ ID NO: 163555 - DNA, 1452 bp, synthetic construct
  misc_feature 1..1452: note = Description of Artificial Sequence: Synthetic coding sequence
  source 1..1452: mol_type = other DNA
atgaatggctatgcagagttcccccccagccccagcaaccccaccaaggagcctgtggagccccagcccagccaggtgcccctgcaggaggatgtggacatgagcagcggcagcagcggccacgagaccaatgaaaactgcagcacaggccgggacagccagggcagtgactgtgatgattctgggaaggagctgggcatgctggtggagcccccagatgcccggcagagcccagacaccttcagcctgatgatggccaagtctgagcacaaccccagcaccagcggctgcagcagtgaccagagcagcaaggtggacacccacaaggagctgatcaagaccctgaaggagctgaaggtgcacctgcctgctgacaagaaggccaagggcaaggccagcaccctggccaccctgaagtatgccctgcggtctgtgaagcaggtgaaggccaatgaggagtactaccagctgctgatgagcagcgagggccacccctgtggggctgatgtgcccagctacacagtggaggagatggagagcgtgaccagcgagcacatcgtgaagaatgctgacatgtttgctgtggccgtgtccctggtgtctgggaagatcctgtacatcagtgaccaggtggccagcatcttccactgcaagagagatgccttcagtgatgccaagtttgtggagttcctggcccctcatgatgtgggcgtcttccacagcttcaccagcccctacaagctgcccctgtggagcatgtgcagcggggctgacagcttcacccaggagtgcatggaggagaagagcttcttctgccgggtgtctgtgaggaagagccatgaaaatgagatccgctaccaccccttcaggatgaccccctacctggtgaaggtgcgggaccagcagggcgctgagagccagctgtgctgcctgctgctggccgagcgggtgcacagcggctatgaggccccccgcatccccccagagaagaggatcttcaccaccacccacacccccaactgcctcttccaggatgtggatgaaagagctgtgcccctgctgggctacctgccccaggacctgattgagacccctgtgctggtgcagctgcaccccagcgaccggcccctgatgctggccatccacaagaagatcctgcagagcggcggccagccctttgactacagccccatccgcttccgggccagaaatggagagtacatcaccctggacacctcctggagcagcttcatcaacccctggagcaggaagatctccttcatcatcggccgccacaaggtgcgggtgggccccctgaatgaagatgtgtttgctgcccacccctgcacagaggagaaggccctgcaccccagcatccaggagctgacagagcagatccaccggctgctgctgcaggtgggcgtggtgcctgcctgccccccaccaagatag

SEQ ID NO: 163556 - DNA, 2340 bp, synthetic construct
  misc_feature 1..2340: note = Description of Artificial Sequence: Synthetic coding sequence
  source 1..2340: mol_type = other DNA
atgatccccttcctgcccatgttcagcctgctgctgctgctgattgtgaaccccatcaatgccaacaaccactatgacaagatcctggcccacagccgcatccggggccgggaccagggccccaacgtgtgtgccctgcagcagatcctgggcaccaagaagaagtacttcagcacctgcaagaactggtacaagaagagcatctgtggccagaagaccaccgtgctgtatgagtgctgccccggctacatgaggatggagggcatgaagggctgcccagctgtgctgcccatcgaccacgtgtatggcaccctgggcatcgtgggcgccaccaccacccagcgctacagtgatgccagcaagctgcgggaggagattgagggcaagggcagcttcacctactttgcccccagcaatgaggcctgggacaacctggacagcgacatccggcggggcctggagagcaatgtgaatgtggagctgctgaatgccctgcacagccacatgatcaacaagaggatgctgaccaaggacctgaagaatggcatgatcatccccagcatgtacaacaacctgggcctcttcatcaaccactacccaaatggagtggtgacagtgaactgtgcccgcatcatccacggcaaccagatcgccaccaacggggtggtgcacgtgattgacagagtgctgacccagatcggcaccagcatccaggacttcattgaagcagaagatgacctgagcagcttccgggctgctgccatcaccagtgacatcctggaggccctgggcagagatggccacttcaccctgtttgcccccaccaatgaggcctttgagaagctgccccggggcgtgctggagcgcatcatgggagacaaggtggccagcgaggccctgatgaagtaccacatcctgaacaccctgcagtgcagcgagagcatcatgggcggcgctgtgtttgagaccctggagggcaacaccattgaaattggctgtgatggagacagcatcaccgtgaatggcatcaagatggtgaacaagaaggacatcgtgaccaacaatggagtcatccacctgattgaccaggtgctgatcccagattctgccaagcaggtgattgagctggccggcaagcagcagaccaccttcacagacctggtggcccagctgggcctggccagcgccctgcggccagatggagagtacaccctgctggcccctgtgaacaatgccttcagtgatgacaccctgtccatggaccagaggctgctgaagctgatcctgcagaaccacatcctgaaggtgaaggtgggcctgaatgagctgtacaacggccagatcctggagaccatcggcggcaagcagctgcgggtgtttgtgtacagaacagctgtgtgcatcgagaacagctgcatggagaagggcagcaagcagggcagaaatggagccatccacatcttccgggagatcatcaagccagctgagaagagcctgcacgagaagctgaagcaggacaagcgcttcagcaccttcctgagcctgctggaggccgctgacctgaaggagctgctgacccagcccggggactggaccctgtttgtgcccaccaatgatgccttcaagggcatgaccagcgaggagaaggagatcctgatccgggacaagaatgccctgcagaacatcatcctgtaccacctgaccccaggagtcttcatcggcaaaggatttgagcccggggtgaccaacatcctgaagaccacccagggcagcaagatcttcctgaaggaggtgaatgacaccctgctggtgaatgagctgaagagcaaggagagtgacatcatgaccaccaacggggtcatccacgtggtggacaagctgctgtacccagctgacacccctgtgggcaatgaccagctgctggagatcctgaacaagctgatcaagtacatccagatcaagtttgtgcggggcagcaccttcaaggagatccctgtgacagtgtacaagcccatcatcaagaagtacaccaagatcattgatggagtgcctgtggagatcacagagaaggagacccgggaggagcgcatcatcactggacctgagatcaagtacacccgcatcagcactggaggaggagaaacagaggagaccctgaagaagctgctgcaggaggaggtgaccaaggtgaccaagttcatcgagggcggagatggccacctgtttgaagatgaggagatcaagaggctgctgcagggcgacacccctgtgaggaagctgcaggccaacaagaaggtgcagggcagcagaagaaggctgcgggagggccgcagccagtag

SEQ ID NO: 163557 - DNA, 2430 bp, synthetic construct
  misc_feature 1..2430: note = Description of Artificial Sequence: Synthetic coding sequence
  source 1..2430: mol_type = other DNA
atgatccccttcctgcccatgttcagcctgctgctgctgctgattgtgaaccccatcaatgccaacaaccactatgacaagatcctggcccacagccgcatccggggccgggaccagggccccaacgtgtgtgccctgcagcagatcctgggcaccaagaagaagtacttcagcacctgcaagaactggtacaagaagagcatctgtggccagaagaccaccgtgctgtatgagtgctgccccggctacatgaggatggagggcatgaagggctgcccagctgtgctgcccatcgaccacgtgtatggcaccctgggcatcgtgggcgccaccaccacccagcgctacagtgatgccagcaagctgcgggaggagattgagggcaagggcagcttcacctactttgcccccagcaatgaggcctgggacaacctggacagcgacatccggcggggcctggagagcaatgtgaatgtggagctgctgaatgccctgcacagccacatgatcaacaagaggatgctgaccaaggacctgaagaatggcatgatcatccccagcatgtacaacaacctgggcctcttcatcaaccactacccaaatggagtggtgacagtgaactgtgcccgcatcatccacggcaaccagatcgccaccaacggggtggtgcacgtgattgacagagtgctgacccagatcggcaccagcatccaggacttcattgaagcagaagatgacctgagcagcttccgggctgctgccatcaccagtgacatcctggaggccctgggcagagatggccacttcaccctgtttgcccccaccaatgaggcctttgagaagctgccccggggcgtgctggagcgcatcatgggagacaaggtggccagcgaggccctgatgaagtaccacatcctgaacaccctgcagtgcagcgagagcatcatgggcggcgctgtgtttgagaccctggagggcaacaccattgaaattggctgtgatggagacagcatcaccgtgaatggcatcaagatggtgaacaagaaggacatcgtgaccaacaatggagtcatccacctgattgaccaggtgctgatcccagattctgccaagcaggtgattgagctggccggcaagcagcagaccaccttcacagacctggtggcccagctgggcctggccagcgccctgcggccagatggagagtacaccctgctggcccctgtgaacaatgccttcagtgatgacaccctgtccatggaccagaggctgctgaagctgatcctgcagaaccacatcctgaaggtgaaggtgggcctgaatgagctgtacaacggccagatcctggagaccatcggcggcaagcagctgcgggtgtttgtgtacagaacagctgtgtgcatcgagaacagctgcatggagaagggcagcaagcagggcagaaatggagccatccacatcttccgggagatcatcaagccagctgagaagagcctgcacgagaagctgaagcaggacaagcgcttcagcaccttcctgagcctgctggaggccgctgacctgaaggagctgctgacccagcccggggactggaccctgtttgtgcccaccaatgatgccttcaagggcatgaccagcgaggagaaggagatcctgatccgggacaagaatgccctgcagaacatcatcctgtaccacctgaccccaggagtcttcatcggcaaaggatttgagcccggggtgaccaacatcctgaagaccacccagggcagcaagatcttcctgaaggaggtgaatgacaccctgctggtgaatgagctgaagagcaaggagagtgacatcatgaccaccaacggggtcatccacgtggtggacaagctgctgtacccagctgacacccctgtgggcaatgaccagctgctggagatcctgaacaagctgatcaagtacatccagatcaagtttgtgcggggcagcaccttcaaggagatccctgtgacagtgtaccggcccaccctgaccaaggtgaagattgaaggagagcctgagttccgcctcatcaaggagggggagaccatcacagaggtgatccacggggagcccatcatcaagaagtacaccaagatcattgatggagtgcctgtggagatcacagagaaggagacccgggaggagcgcatcatcactggacctgagatcaagtacacccgcatcagcactggaggaggagaaacagaggagaccctgaagaagctgctgcaggaggaggtgaccaaggtgaccaagttcatcgagggcggagatggccacctgtttgaagatgaggagatcaagaggctgctgcagggcgacacccctgtgaggaagctgcaggccaacaagaaggtgcagggcagcagaagaaggctgcgggagggccgcagccagtag

SEQ ID NO: 163558 - DNA, 2511 bp, synthetic construct
  misc_feature 1..2511: note = Description of Artificial Sequence: Synthetic coding sequence
  source 1..2511: mol_type = other DNA
atgatccccttcctgcccatgttcagcctgctgctgctgctgattgtgaaccccatcaatgccaacaaccactatgacaagatcctggcccacagccgcatccggggccgggaccagggccccaacgtgtgtgccctgcagcagatcctgggcaccaagaagaagtacttcagcacctgcaagaactggtacaagaagagcatctgtggccagaagaccaccgtgctgtatgagtgctgccccggctacatgaggatggagggcatgaagggctgcccagctgtgctgcccatcgaccacgtgtatggcaccctgggcatcgtgggcgccaccaccacccagcgctacagtgatgccagcaagctgcgggaggagattgagggcaagggcagcttcacctactttgcccccagcaatgaggcctgggacaacctggacagcgacatccggcggggcctggagagcaatgtgaatgtggagctgctgaatgccctgcacagccacatgatcaacaagaggatgctgaccaaggacctgaagaatggcatgatcatccccagcatgtacaacaacctgggcctcttcatcaaccactacccaaatggagtggtgacagtgaactgtgcccgcatcatccacggcaaccagatcgccaccaacggggtggtgcacgtgattgacagagtgctgacccagatcggcaccagcatccaggacttcattgaagcagaagatgacctgagcagcttccgggctgctgccatcaccagtgacatcctggaggccctgggcagagatggccacttcaccctgtttgcccccaccaatgaggcctttgagaagctgccccggggcgtgctggagcgcatcatgggagacaaggtggccagcgaggccctgatgaagtaccacatcctgaacaccctgcagtgcagcgagagcatcatgggcggcgctgtgtttgagaccctggagggcaacaccattgaaattggctgtgatggagacagcatcaccgtgaatggcatcaagatggtgaacaagaaggacatcgtgaccaacaatggagtcatccacctgattgaccaggtgctgatcccagattctgccaagcaggtgattgagctggccggcaagcagcagaccaccttcacagacctggtggcccagctgggcctggccagcgccctgcggccagatggagagtacaccctgctggcccctgtgaacaatgccttcagtgatgacaccctgtccatggaccagaggctgctgaagctgatcctgcagaaccacatcctgaaggtgaaggtgggcctgaatgagctgtacaacggccagatcctggagaccatcggcggcaagcagctgcgggtgtttgtgtacagaacagctgtgtgcatcgagaacagctgcatggagaagggcagcaagcagggcagaaatggagccatccacatcttccgggagatcatcaagccagctgagaagagcctgcacgagaagctgaagcaggacaagcgcttcagcaccttcctgagcctgctggaggccgctgacctgaaggagctgctgacccagcccggggactggaccctgtttgtgcccaccaatgatgccttcaagggcatgaccagcgaggagaaggagatcctgatccgggacaagaatgccctgcagaacatcatcctgtaccacctgaccccaggagtcttcatcggcaaaggatttgagcccggggtgaccaacatcctgaagaccacccagggcagcaagatcttcctgaaggaggtgaatgacaccctgctggtgaatgagctgaagagcaaggagagtgacatcatgaccaccaacggggtcatccacgtggtggacaagctgctgtacccagctgacacccctgtgggcaatgaccagctgctggagatcctgaacaagctgatcaagtacatccagatcaagtttgtgcggggcagcaccttcaaggagatccctgtgacagtgtacaccaccaagatcatcaccaaggtggtggagcccaagatcaaggtgattgagggcagcctgcagcccatcatcaagacagagggccccaccctgaccaaggtgaagattgaaggagagcctgagttccgcctcatcaaggagggggagaccatcacagaggtgattcatggagagcccatcatcaagaagtacaccaagatcattgatggagtgcctgtggagatcacagagaaggagacccgggaggagcgcatcatcaccggccctgagatcaagtacacccgcatcagcactggaggaggagaaacagaggagaccctgaagaagctgctgcaggaggaggtgaccaaggtgaccaagttcattgaaggaggagatggccacctgtttgaagatgaggagatcaagaggctgctgcagggcgacacccctgtgaggaagctgcaggccaacaagaaggtgcagggcagcagaagaaggctgcgggagggccgcagccagtag

SEQ ID NO: 163559 - DNA, 2427 bp, synthetic construct
  misc_feature 1..2427: note = Description of Artificial Sequence: Synthetic coding sequence
  source 1..2427: mol_type = other DNA
atgatccccttcctgcccatgttcagcctgctgctgctgctgattgtgaaccccatcaatgccaacaaccactatgacaagatcctggcccacagccgcatccggggccgggaccagggccccaacgtgtgtgccctgcagcagatcctgggcaccaagaagaagtacttcagcacctgcaagaactggtacaagaagagcatctgtggccagaagaccaccgtgctgtatgagtgctgccccggctacatgaggatggagggcatgaagggctgcccagctgtgctgcccatcgaccacgtgtatggcaccctgggcatcgtgggcgccaccaccacccagcgctacagtgatgccagcaagctgcgggaggagattgagggcaagggcagcttcacctactttgcccccagcaatgaggcctgggacaacctggacagcgacatccggcggggcctggagagcaatgtgaatgtggagctgctgaatgccctgcacagccacatgatcaacaagaggatgctgaccaaggacctgaagaatggcatgatcatccccagcatgtacaacaacctgggcctcttcatcaaccactacccaaatggagtggtgacagtgaactgtgcccgcatcatccacggcaaccagatcgccaccaacggggtggtgcacgtgattgacagagtgctgacccagatcggcaccagcatccaggacttcattgaagcagaagatgacctgagcagcttccgggctgctgccatcaccagtgacatcctggaggccctgggcagagatggccacttcaccctgtttgcccccaccaatgaggcctttgagaagctgccccggggcgtgctggagcgcatcatgggagacaaggtggccagcgaggccctgatgaagtaccacatcctgaacaccctgcagtgcagcgagagcatcatgggcggcgctgtgtttgagaccctggagggcaacaccattgaaattggctgtgatggagacagcatcaccgtgaatggcatcaagatggtgaacaagaaggacatcgtgaccaacaatggagtcatccacctgattgaccaggtgctgatcccagattctgccaagcaggtgattgagctggccggcaagcagcagaccaccttcacagacctggtggcccagctgggcctggccagcgccctgcggccagatggagagtacaccctgctggcccctgtgaacaatgccttcagtgatgacaccctgtccatggaccagaggctgctgaagctgatcctgcagaaccacatcctgaaggtgaaggtgggcctgaatgagctgtacaacggccagatcctggagaccatcggcggcaagcagctgcgggtgtttgtgtacagaacagctgtgtgcatcgagaacagctgcatggagaagggcagcaagcagggcagaaatggagccatccacatcttccgggagatcatcaagccagctgagaagagcctgcacgagaagctgaagcaggacaagcgcttcagcaccttcctgagcctgctggaggccgctgacctgaaggagctgctgacccagcccggggactggaccctgtttgtgcccaccaatgatgccttcaagggcatgaccagcgaggagaaggagatcctgatccgggacaagaatgccctgcagaacatcatcctgtaccacctgaccccaggagtcttcatcggcaaaggatttgagcccggggtgaccaacatcctgaagaccacccagggcagcaagatcttcctgaaggaggtgaatgacaccctgctggtgaatgagctgaagagcaaggagagtgacatcatgaccaccaacggggtcatccacgtggtggacaagctgctgtacccagctgacacccctgtgggcaatgaccagctgctggagatcctgaacaagctgatcaagtacatccagatcaagtttgtgcggggcagcaccttcaaggagatccctgtgacagtgtacaccaccaagatcatcaccaaggtggtggagcccaagatcaaggtgattgagggcagcctgcagcccatcatcaagacagagggccccaccctgaccaaggtgaagattgaaggagagcctgagttccgcctcatcaaggagggggagaccatcacagaggtgattcatggagagcccatcatcaagaagtacaccaagatcattgatggagtgcctgtggagatcacagagaaggagacccgggaggagcgcatcatcaccggccctgagatcaagtacacccgcatcagcactggaggaggagaaacagaggagaccctgaagaagctgctgcaggaggacacccctgtgaggaagctgcaggccaacaagaaggtgcagggcagcagaagaaggctgcgggagggccgcagccagtag

SEQ ID NO: 163560 - DNA, 834 bp, synthetic construct
  misc_feature 1..834: note = Description of Artificial Sequence: Synthetic coding sequence
  source 1..834: mol_type = other DNA
atgaggatggagggcatgaagggctgcccagctgtgctgcccatcgaccacgtgtatggcaccctgggcatcgtgggcgccaccaccacccagcgctacagtgatgccagcaagctgcgggaggagattgagggcaagggcagcttcacctactttgcccccagcaatgaggcctgggacaacctggacagcgacatcagaagaggcctggagagcaatgtgaatgtggagctgctgaatgccctgcacagccacatgatcaacaagaggatgctgaccaaggacctgaagaatggcatgatcatccccagcatgtacaacaacctgggcctcttcatcaaccactaccccaacggggtggtgacagtgaactgtgcccgcatcatccacggcaaccagatcgccaccaatggagtggtgcacgtgattgacagagtgctgacccagatcggcaccagcatccaggacttcatcgaggctgaagatgacctgagcagcttccgggccgccgccatcaccagtgacatcctggaggccctgggcagagatggccacttcaccctgtttgcccccaccaatgaggcctttgagaagctgccccggggcgtgctggagcgcatcatgggagacaaggtggccagcgaggccctgatgaagtaccacatcctgaacaccctgcagtgcagcgagagcatcatgggcggcgctgtgtttgagaccctggagggcaacaccatcgagatcggctgtgatggagacagcatcaccgtgaatggcatcaagatggtgaacaagaaggacatcgtgaccaactggtgtgacccctttgattag

SEQ ID NO: 163561 - DNA, 2346 bp, synthetic construct
  misc_feature 1..2346: note = Description of Artificial Sequence: Synthetic coding sequence
  source 1..2346: mol_type = other DNA
atgatccccttcctgcccatgttcagcctgctgctgctgctgattgtgaaccccatcaatgccaacaaccactatgacaagatcctggcccacagccgcatccggggccgggaccagggccccaacgtgtgtgccctgcagcagatcctgggcaccaagaagaagtacttcagcacctgcaagaactggtacaagaagagcatctgtggccagaagaccaccgtgctgtatgagtgctgccccggctacatgaggatggagggcatgaagggctgcccagctgtgctgcccatcgaccacgtgtatggcaccctgggcatcgtgggcgccaccaccacccagcgctacagtgatgccagcaagctgcgggaggagattgagggcaagggcagcttcacctactttgcccccagcaatgaggcctgggacaacctggacagcgacatccggcggggcctggagagcaatgtgaatgtggagctgctgaatgccctgcacagccacatgatcaacaagaggatgctgaccaaggacctgaagaatggcatgatcatccccagcatgtacaacaacctgggcctcttcatcaaccactacccaaatggagtggtgacagtgaactgtgcccgcatcatccacggcaaccagatcgccaccaacggggtggtgcacgtgattgacagagtgctgacccagatcggcaccagcatccaggacttcattgaagcagaagatgacctgagcagcttccgggctgctgccatcaccagtgacatcctggaggccctgggcagagatggccacttcaccctgtttgcccccaccaatgaggcctttgagaagctgccccggggcgtgctggagcgcatcatgggagacaaggtggccagcgaggccctgatgaagtaccacatcctgaacaccctgcagtgcagcgagagcatcatgggcggcgctgtgtttgagaccctggagggcaacaccattgaaattggctgtgatggagacagcatcaccgtgaatggcatcaagatggtgaacaagaaggacatcgtgaccaacaatggagtcatccacctgattgaccaggtgctgatcccagattctgccaagcaggtgattgagctggccggcaagcagcagaccaccttcacagacctggtggcccagctgggcctggccagcgccctgcggccagatggagagtacaccctgctggcccctgtgaacaatgccttcagtgatgacaccctgtccatggaccagaggctgctgaagctgatcctgcagaaccacatcctgaaggtgaaggtgggcctgaatgagctgtacaacggccagatcctggagaccatcggcggcaagcagctgcgggtgtttgtgtacagaacagctgtgtgcatcgagaacagctgcatggagaagggcagcaagcagggcagaaatggagccatccacatcttccgggagatcatcaagccagctgagaagagcctgcacgagaagctgaagcaggacaagcgcttcagcaccttcctgagcctgctggaggccgctgacctgaaggagctgctgacccagcccggggactggaccctgtttgtgcccaccaatgatgccttcaagggcatgaccagcgaggagaaggagatcctgatccgggacaagaatgccctgcagaacatcatcctgtaccacctgaccccaggagtcttcatcggcaaaggatttgagcccggggtgaccaacatcctgaagaccacccagggcagcaagatcttcctgaaggaggtgaatgacaccctgctggtgaatgagctgaagagcaaggagagtgacatcatgaccaccaacggggtcatccacgtggtggacaagctgctgtacccagctgacacccctgtgggcaatgaccagctgctggagatcctgaacaagctgatcaagtacatccagatcaagtttgtgcggggcagcaccttcaaggagatccctgtgacagtgtaccggcccaccctgaccaaggtgaagattgaaggagagcctgagttccgcctcatcaaggagggggagaccatcacagaggtgatccacggggagcccatcatcaagaagtacaccaagatcattgatggagtgcctgtggagatcacagagaaggagacccgggaggagcgcatcatcactggacctgagatcaagtacacccgcatcagcactggaggaggagaaacagaggagaccctgaagaagctgctgcaggaggacacccctgtgaggaagctgcaggccaacaagaaggtgcagggcagcagaagaaggctgcgggagggccgcagccagtag

SEQ ID NO: 163562 - DNA, 2250 bp, synthetic construct
  misc_feature 1..2250: note = Description of Artificial Sequence: Synthetic coding sequence
  source 1..2250: mol_type = other DNA
atgatccccttcctgcccatgttcagcctgctgctgctgctgattgtgaaccccatcaatgccaacaaccactatgacaagatcctggcccacagccgcatccggggccgggaccagggccccaacgtgtgtgccctgcagcagatcctgggcaccaagaagaagtacttcagcacctgcaagaactggtacaagaagagcatctgtggccagaagaccaccgtgctgtatgagtgctgccccggctacatgaggatggagggcatgaagggctgcccagctgtgctgcccatcgaccacgtgtatggcaccctgggcatcgtgggcgccaccaccacccagcgctacagtgatgccagcaagctgcgggaggagattgagggcaagggcagcttcacctactttgcccccagcaatgaggcctgggacaacctggacagcgacatccggcggggcctggagagcaatgtgaatgtggagctgctgaatgccctgcacagccacatgatcaacaagaggatgctgaccaaggacctgaagaatggcatgatcatccccagcatgtacaacaacctgggcctcttcatcaaccactacccaaatggagtggtgacagtgaactgtgcccgcatcatccacggcaaccagatcgccaccaacggggtggtgcacgtgattgacagagtgctgacccagatcggcaccagcatccaggacttcattgaagcagaagatgacctgagcagcttccgggctgctgccatcaccagtgacatcctggaggccctgggcagagatggccacttcaccctgtttgcccccaccaatgaggcctttgagaagctgccccggggcgtgctggagcgcatcatgggagacaaggtggccagcgaggccctgatgaagtaccacatcctgaacaccctgcagtgcagcgagagcatcatgggcggcgctgtgtttgagaccctggagggcaacaccattgaaattggctgtgatggagacagcatcaccgtgaatggcatcaagatggtgaacaagaaggacatcgtgaccaacaatggagtcatccacctgattgaccaggtgctgatcccagattctgccaagcaggtgattgagctggccggcaagcagcagaccaccttcacagacctggtggcccagctgggcctggccagcgccctgcggccagatggagagtacaccctgctggcccctgtgaacaatgccttcagtgatgacaccctgtccatggaccagaggctgctgaagctgatcctgcagaaccacatcctgaaggtgaaggtgggcctgaatgagctgtacaacggccagatcctggagaccatcggcggcaagcagctgcgggtgtttgtgtacagaacagctgtgtgcatcgagaacagctgcatggagaagggcagcaagcagggcagaaatggagccatccacatcttccgggagatcatcaagccagctgagaagagcctgcacgagaagctgaagcaggacaagcgcttcagcaccttcctgagcctgctggaggccgctgacctgaaggagctgctgacccagcccggggactggaccctgtttgtgcccaccaatgatgccttcaagggcatgaccagcgaggagaaggagatcctgatccgggacaagaatgccctgcagaacatcatcctgtaccacctgaccccaggagtcttcatcggcaaaggatttgagcccggggtgaccaacatcctgaagaccacccagggcagcaagatcttcctgaaggaggtgaatgacaccctgctggtgaatgagctgaagagcaaggagagtgacatcatgaccaccaacggggtcatccacgtggtggacaagctgctgtacccagctgacacccctgtgggcaatgaccagctgctggagatcctgaacaagctgatcaagtacatccagatcaagtttgtgcggggcagcaccttcaaggagatccctgtgacagtgtacagccctgagatcaagtacacccgcatcagcactggaggaggagaaacagaggagaccctgaagaagctgctgcaggaggaggtgaccaaggtgaccaagttcatcgagggcggagatggccacctgtttgaagatgaggagatcaagaggctgctgcagggcgacacccctgtgaggaagctgcaggccaacaagaaggtgcagggcagcagaagaaggctgcgggagggccgcagccagtag

SEQ ID NO: 163563 - DNA, 399 bp, synthetic construct
  misc_feature 1..399: note = Description of Artificial Sequence: Synthetic coding sequence
  source 1..399: mol_type = other DNA
atgagcaacaagttcctgggcacctggaagctggtgtccagtgaaaattttgatgactacatgaaggccctgggcgtgggcctggccaccaggaagctgggcaacctggccaagcccaccgtcatcatcagcaagaagggggacatcatcaccatcagaacagagagcaccttcaagaacacagagatctccttcaagctgggccaggagtttgaggagaccacagctgacaacaggaagaccaagagcatcgtgaccctgcagaggggcagcctgaaccaggtgcagcgctgggatggcaaggagaccaccatcaagaggaagctggtgaatggcaagatggtggccgagtgcaagatgaagggcgtggtgtgcacccgcatctatgagaaggtgtag

SEQ ID NO: 163564 - DNA, 483 bp, synthetic construct
  misc_feature 1..483: note = Description of Artificial Sequence: Synthetic coding sequence
  source 1..483: mol_type = other DNA
atgctgctgctgctgctgagcatcatcgtgctgcacgtggccgtgctggtgctgctgtttgtgtccaccatcgtgtcccagtggatcgtgggcaatggccacgccacagacctgtggcagaactgcagcaccagcagcagtggaaatgtgcaccactgcttcagcagcagccccaatgagtggctgcagagcgtgcaggccaccatgatcctgagcatcatcttcagcatcctgagcctcttcctgttcttctgccagctgttcaccctgaccaagggcggccgcttctacatcaccggcatcttccagatcctggccggcctgtgtgtgatgtctgctgctgccatctacacagtgcgccaccctgagtggcacctgaacagcgactacagctatggctttgcctacatcctggcctgggtggccttccccctggccctgctgtctggagtcatctacgtgatcctgaggaagcgggagtag

SEQ ID NO: 163565 - DNA, 357 bp, synthetic construct
  misc_feature 1..357: note = Description of Artificial Sequence: Synthetic coding sequence
  source 1..357: mol_type = other DNA
atgctgctgctgctgctgagcatcatcgtgctgcacgtggccgtgctggtgctgctgtttgtgtccaccatcgtgtcccagtggatcgtgggcaatggccacgccacagacctgtggcagaactgcagcaccagcagcagtggaaatgtgcaccactgcttcagcagcagccccaatgagtggctgcagagcgtgcaggccaccatgatcctgagcatcatcttcagcatcctgagcctcttcctgttcttctgccagctgttcaccctgaccaagggcggccgcttctacatcaccggcatcttccagatcctggccgagagcaacagcagccagatgtgtggctacagagactag

SEQ ID NO: 163566 - DNA, 483 bp, synthetic construct; identical to SEQ ID NO: 163564
  misc_feature 1..483: note = Description of Artificial Sequence: Synthetic coding sequence
  source 1..483: mol_type = other DNA

SEQ ID NO: 163567 - DNA, 450 bp, synthetic construct
  misc_feature 1..450: note = Description of Artificial Sequence: Synthetic coding sequence
  source 1..450: mol_type = other DNA
atgctgctgctgctgctgagcatcatcgtgctgcacgtggccgtgctggtgctgctgtttgtgtccaccatcgtgtcccagtggatcgtgggcaatggccacgccacagacctgtggcagaactgcagcaccagcagcagtggaaatgtgcaccactgcttcagcagcagccccaatgagtggctgcagagcgtgcaggccaccatgatcctgagcatcatcttcagcatcctgagcctcttcctgttcttctgccagctgttcaccctgaccaagggcggccgcttctacatcaccggcatcttccagatcctggccggcctgtgtgtgatgtctgctgctgccatctacacagtgcgccaccctgagtggcacctgaacagcgactacagcttccccctggccctgctgagcggggtcatctacgtgatcctgaggaagcgggagtag

SEQ ID NO: 163568 - DNA, 1413 bp, synthetic construct
  misc_feature 1..1413: note = Description of Artificial Sequence: Synthetic coding sequence
  source 1..1413: mol_type = other DNA
atgagccaccaccccagcggcctgcgggccggcttcagcagcaccagctacagaaggacctttggacctccacccagcctgagccctggggccttctcctacagcagcagcagccgcttcagcagcagccggctgctgggcagcgccagccccagcagctctgtgcggctgggcagcttccgcagccccagggctggagctggggccctgctgcggctgcccagcgagcggctggacttctccatggccgaggccctgaaccaggagttcctggccaccaggagcaatgagaagcaggagctgcaggagctgaatgacagatttgccaacttcatcgagaaggtgcgcttcctggagcagcagaatgctgccctgcggggggagctgagccaggcccggggccaggagcccgcccgggctgaccagctgtgccagcaggagctgcgggagctgcggcgggagctggagctgctgggccgggagcgggacagagtgcaggtggagagagatggcctggccgaggacctggccgccctgaagcagaggctggaggaggagaccaggaagagagaagatgctgagcacaacctggtgctcttcaggaaggatgtggatgatgccaccctgagccggctggagctggagaggaagattgagagcctgatggatgaaattgagttcctgaagaagctgcacgaggaggagctgcgggacctgcaggtgtctgtggagagccagcaggtgcagcaggtggaggtggaggccaccgtgaagccagagctgacagctgccctgcgggacatccgggcccagtatgagagcattgctgccaagaacctgcaggaggccgaggagtggtacaagagcaaatatgctgacctgagtgatgctgccaacagaaaccacgaggccctgcggcaggccaagcaggagatgaatgaaagccggcggcagatccagagcctgacctgtgaggtggatggcctgcggggcaccaatgaggccctgctgcggcagctgcgggagctggaggagcagtttgccctggaggccggcggctaccaggccggggccgcccggctggaggaggagctgcggcagctgaaggaggagatggcccggcacctgcgggagtaccaggagctgctgaatgtgaagatggccctggacattgaaattgccacctacaggaagctgctggagggggaggagagccgcatctctgtgcctgtgcacagctttgccagcctgaacatcaagaccaccgtgcctgaggtggagcccccccaggacagccacagcaggaagacagtgctgatcaagaccatcgagaccagaaatggagaggtggtgacagagagccagaaggagcagaggtctgagctggacaagagcagcgcccacagctactag

SEQ ID NO: 163569 - DNA, 603 bp, synthetic construct
  misc_feature 1..603: note = Description of Artificial Sequence: Synthetic coding sequence
  source 1..603: mol_type = other DNA
atgggccaggagttctcctgggaggaggccgaggccgccggggagattgatgtggccgagctgcaggagtggtacaagaagtttgtgatggagtgccccagcggcaccctcttcatgcatgagttcaagcgcttcttcaaggtgacagatgatgaggaggccagccagtatgtggagggcatgttccgggcctttgacaagaatggagacaacaccatcgacttcctggagtatgtggccgccctgaacctggtgctgcggggcaccctggagcacaagctgaagtggaccttcaagatctatgacaaggatggaaatggctgcatcgaccggctggagctgctgaacatcgtggagggcatctaccagctgaagaaggcctgcagaagagagctgcagacagagcagggccagctgctgaccccagaggaggtggtggaccgcatcttcctgctggtggatgaaaatggagatggccagctgagcctgaatgaatttgtggagggcgcccggcgggacaagtgggtgatgaagatgctgcagatggacatgaaccccagctcctggctggcccagcagaggaggaagagcgccatgttttag

SEQ ID NO: 163570 - DNA, 1104 bp, synthetic construct
  misc_feature 1..1104: note = Description of Artificial Sequence: Synthetic coding sequence
  source 1..1104: mol_type = other DNA
atgtggagcgagggccgctatgaatatgagcgcatcccccgggagcgggccccacccaggagccaccccagtgatggctacaaccggctggtgaacatcgtgcccaagaagccacccctgctggacaggcctggagagggcagctacaaccgctactacagccacgtggactacagagattatgatgagggccgctccttcagccatgacagaagaagtggccccccccacagaggagatgagagcggctaccgctggaccagagatgaccacagcgccagccggcagcctgagtacagagacatgagagatggcttccggaggaagagcttctacagcagccactacgcccgggagaggagcccctacaagagggacaacaccttcttccgggagagccctgtgggcaggaaggacagcccccacagccgcagcggcagctctgtgagcagccgcagctacagccctgagaggagcaagagctacagcttccaccagagccagcacaggaagtctgtgcggcctggggccagctacaagaggcagaatgaaggcaaccctgagcgggacaaggagaggcctgtgcagagcctgaagaccagccgggacaccagccccagcagcggcagcgctgtgagcagcagcaaggtgctggacaagcccagccggctgacagagaaggagctggccgaggccgccagcaagtgggccgctgagaagctggagaagagtgatgagagcaacctgcctgagatcagtgaatatgaagctggcagcacagcccccctcttcacagaccagcctgaggagcctgagagcaacaccacccatggaattgagctgtttgaggacagccagctgaccaccaggagcaaggccatcgccagcaagaccaaggagattgagcaggtgtaccggcaggactgtgagaccttcggcatggtggtgaagatgctgattgagaaggaccccagcctggagaagagcatccagtttgccctgcggcagaacctgcatgaaattggagagcgctgtgtggaggagctgaagcacttcatcgccgagtatgacaccagcacccaggactttggagagcccttctag

SEQ ID NO: 163571 - DNA, 1377 bp, synthetic construct
  misc_feature 1..1377: note = Description of Artificial Sequence: Synthetic coding sequence
  source 1..1377: mol_type = other DNA
atgtggagcgagggccgctatgaatatgagcgcatcccccgggagcgggccccacccaggagccaccccagtgatggctacaaccggctggtgaacatcgtgcccaagaagccacccctgctggacaggcctggagagggcagctacaaccgctactacagccacgtggactacagagattatgatgagggccgctccttcagccatgacagaagaagtggccccccccacagaggagatgagagcggctaccgctggaccagagatgaccacagcgccagccggcagcctgagtacagagacatgagagatggcttccggaggaagagcttctacagcagccactacgcccgggagaggagcccctacaagagggacaacaccttcttccgggagagccctgtgggcaggaaggacagcccccacagccgcagcggcagctctgtgagcagccgcagctacagccctgagaggagcaagagctacagcttccaccagagccagcacaggaagtctgtgcggcctggggccagctacaagaggcagaatgaaggcaaccctgagcgggacaaggagaggcctgtgcagagcctgaagaccagccgggacaccagccccagcagcggcagcgctgtgagcagcagcaaggtgctggacaagcccagccggctgacagagaaggagctggccgaggccgccagcaagtgggccgctgagaagctggagaagagtgatgagagcaacctgcctgagatcagtgaatatgaagctggcagcacagcccccctcttcacagaccagcctgaggagcctgagagcaacaccacccatggaattgagctgtttgaggacagccagctgaccaccaggagcaaggccatcgccagcaagaccaaggagattgagcaggtgtaccggcaggactgtgagaccttcggcatggtggtgaagatgctgattgagaaggaccccagcctggagaagagcatccagtttgccctgcggcagaacctgcatgaaattgaatctgctggccagacctggcagcaggtgccccctgtgaggaacacagagatggaccatgatggcaccccagaaaatgaaggagaggagacagcccagagcgccccccagcccccccaggccccccagcccctgcagcccaggaagaagagggtgcggaggaccacccagctgcggaggaccactggagccccagacatcacctggggcatgctgaagaagaccacccaggaggccgagcgcatcctgctgcggacccagacccccttcaccccagagaacctcttcctggccatgctgtctgtggtgcactgcaacagcaggaaggatgtgaagccagagaacaagcagtag

SEQ ID NO: 163572 - DNA, 1125 bp, synthetic construct
  misc_feature 1..1125: note = Description of Artificial Sequence: Synthetic coding sequence
  source 1..1125: mol_type = other DNA
atggcctacagaagagatgagatgtggagcgagggccgctatgaatatgaaagaatcccccgggagcgggccccacccaggagccaccccagtgatggctacaaccggctggtgaacatcgtgcccaagaagccacccctgctggacaggcctggagagggcagctacaaccgctactacagccacgtggactacagagattatgatgagggccgctccttcagccatgaccggcgcagcggccccccccacagaggagatgaaagtggctaccgctggaccagagatgaccacagcgccagccggcagcctgagtacagagacatgagagatggcttccggaggaagagcttctacagcagccactacgcccgggagaggagcccctacaagagggacaacaccttcttccgggagagccctgtgggcaggaaggacagcccccacagccgcagcggcagctctgtgagcagccgcagctacagccctgagaggagcaagagctacagcttccaccagagccagcacaggaagtctgtgcggcctggggccagctacaagaggcagaatgaaggcaaccctgagcgggacaaggagaggcctgtgcagagcctgaagaccagccgggacaccagccccagcagcggcagcgctgtgagcagcagcaaggtgctggacaagcccagccggctgacagagaaggagctggccgaggccgccagcaagtgggccgctgagaagctggagaagagtgatgagagcaacctgcctgagatcagtgaatatgaggccggcagcacagcccccctcttcacagaccagcctgaggagcctgagagcaacaccacccacggcatcgagctgtttgaggacagccagctgaccaccaggagcaaggccatcgccagcaagaccaaggagattgagcaggtgtaccggcaggactgtgagaccttcggcatggtggtgaagatgctgattgagaaggaccccagcctggagaagagcatccagtttgccctgcggcagaacctgcacgagatcggggagcgctgtgtggaggagctgaagcacttcatcgccgagtatgacaccagcacccaggactttggagagcccttctag

SEQ ID NO: 163573 - DNA, 1305 bp, synthetic construct
  misc_feature 1..1305: note = Description of Artificial Sequence: Synthetic coding sequence
  source 1..1305: mol_type = other DNA
atgtggagcgagggccgctatgaatatgagcgcatcccccgggagcgggccccacccaggagccaccccagtgatgaaagtggctaccgctggaccagagatgaccacagcgccagccggcagcctgagtacagagacatgagagatggcttccggaggaagagcttctacagcagccactacgcccgggagaggagcccctacaagagggacaacaccttcttccgggagagccctgtgggcaggaaggacagcccccacagccgcagcggcagctctgtgagcagccgcagctacagccctgagaggagcaagagctacagcttccaccagagccagcacaggaagtctgtgcggcctggggccagctacaagaggcagaatgaaggcaaccctgagcgggacaaggagaggcctgtgcagagcctgaagaccagccgggacaccagccccagcagcggcagcgctgtgagcagcagcaaggtgctggacaagcccagccggctgacagagaaggagctggccgaggccgccagcaagtgggccgctgagaagctggagaagagtgatgagagcaacctgcctgagatcagtgaatatgaggccggcagcacagcccccctcttcacagaccagcctgaggagcctgagagcaacaccacccacggcatcgagctgtttgaggacagccagctgaccaccaggagcaaggccatcgccagcaagaccaaggagattgagcaggtgtaccggcaggactgtgagaccttcggcatggtggtgaagatgctgattgagaaggaccccagcctggagaagagcatccagtttgccctgcggcagaacctgcacgagattgagagcgctggccagacctggcagcaggtgccccctgtgaggaacacagagatggaccatgatggcaccccagaaaatgaaggagaggagacagcccagagcgccctgtttggcttccagcatgatgccagcaaccacaccatcgtgggcctgggccccaaccaggtgcctgagatgaaggagaccaccctgcaggccccccagcccccccaggccccccagcccctgcagcccaggaagaagagggtgcggaggaccacccagctgcggaggaccactggagccccagacatcacctggggcatgctgaagaagaccacccaggaggccgagcgcatcctgctgcggacccagacccccttcaccccagagaacctcttcctggccatgctgtctgtggtgcactgcaacagcaggaaggatgtgaagccagagaacaagcagtag

SEQ ID NO: 163574 - DNA, 1047 bp, synthetic construct
  misc_feature 1..1047: note = Description of Artificial Sequence: Synthetic coding sequence
  source 1..1047: mol_type = other DNA
atgtggagcgagggccgctatgaatatgagcgcatcccccgggagcgggccccacccaggagccaccccagtgatggctacaaccggctggtgaacatcgtgcccaagaagccacccctgctggacaggcctggagagggcagctacaaccgctactacagccacgtggactacagagattatgatgagggccgctccttcagccatgacagaagaagtggccccccccacagaggagatgagagcggctaccgctggaccagagatgaccacagcgccagccggcagcctgagtacagagacatgagagatggcttccggaggaagagcttctacagcagccactacgcccgggagaggagcccctacaagagggacaacaccttcttccgggagagccctgtgggcaggaaggacagcccccacagccgcagcggcagctctgtgagcagccgcagctacagccctgagaggagcaagagctacagcttccaccagagccagcacaggaacaaggagaggcctgtgcagagcctgaagaccagccgggacaccagccccagcagcggcagcgctgtgagcagcagcaaggtgctggacaagcccagccggctgacagagaaggagctggccgaggccgccagcaagtgggccgctgagaagctggagaagagtgatgagagcaacctgcctgagatcagtgaatatgaggccggcagcacagcccccctcttcacagaccagcctgaggagcctgagagcaacaccacccacggcatcgagctgtttgaggacagccagctgaccaccaggagcaaggccatcgccagcaagaccaaggagattgagcaggtgtaccggcaggactgtgagaccttcggcatggtggtgaagatgctgattgagaaggaccccagcctggagaagagcatccagtttgccctgcggcagaacctgcacgagatcggggagcgctgtgtggaggagctgaagcacttcatcgccgagtatgacaccagcacccaggactttggagagcccttctag

SEQ ID NO: 163575 - DNA, 486 bp, synthetic construct
  misc_feature 1..486: note = Description of Artificial Sequence: Synthetic coding sequence
  source 1..486: mol_type = other DNA
atggcctacagaagagatgagatgtggagcgagggccgctatgaatatgaaagaatcccccgggagcgggccccacccaggagccaccccagtgatggctacaaccggctggtgaacatcgtgcccaagaagccacccctgctggacaggcctggagagggcagctacaaccgctactacagccacgtggactacagagattatgatgagggccgctccttcagccatgaccggcgcagcggccccccccacagaggagatgaaagtggctaccgctggaccagagatgaccacagcgccagccggcagcctgagtacagagacatgagagatggcttccggaggaagagcttctacagcagccactacgcccgggagaggagcccctacaagagggacaacaccttcttccgggagagccctgtgggcaggaaggacagcccccacagccgcagcggcagctctgtgagcagccgcagctactag

SEQ ID NO: 163576 - DNA, 507 bp, synthetic construct
  misc_feature 1..507: note = Description of Artificial Sequence: Synthetic coding sequence
  source 1..507: mol_type = other DNA
atgtggagcgagggccgctatgaatatgagcgcatcccccgggagcgggccccacccaggagccaccccagtgatggctacaaccggctggtgaacatcgtgcccaagaagccacccctgctggacaggcctggagagggcagctacaaccgctactacagccacgtggactacagagattatgatgagggccgctccttcagccatgacagaagaagtggccccccccacagaggagatgagagcggctaccgctggaccagagatgaccacagcgccagccggcagcctgagtacagagacatgagagatggcttccggaggaagagcttctacagcagccactacgcccgggagaggagcccctacaagagggacaacaccttcttccgggagagccctgtgggcaggaaggacagcccccacagccgcagcggcagctctgtgagcagccgcagctacagccctgagaggagcaagagctacagcttccaccagagccagtag

SEQ ID NO: 163577 - DNA, 960 bp, synthetic construct
  misc_feature 1..960: note = Description of Artificial Sequence: Synthetic coding sequence
  source 1..960: mol_type = other DNA
atggcctacagaagagatgagatgtggagcgagggccgctatgaatatgaaagaatcccccgggagcgggccccacccaggagccaccccagtgatgagagcggctaccgctggaccagagatgaccacagcgccagccggcagcctgagtacagagacatgagagatggcttccggaggaagagcttctacagcagccactacgcccgggagaggagcccctacaagagggacaacaccttcttccgggagagccctgtgggcaggaaggacagcccccacagccgcagcggcagctctgtgagcagccgcagctacagccctgagaggagcaagagctacagcttccaccagagccagcacaggaagtctgtgcggcctggggccagctacaagaggcagaatgaaggcaaccctgagcgggacaaggagaggcctgtgcagagcctgaagaccagccgggacaccagccccagcagcggcagcgctgtgagcagcagcaaggtgctggacaagcccagccggctgacagagaaggagctggccgaggccgccagcaagtgggccgctgagaagctggagaagagtgatgagagcaacctgcctgagatcagtgaatatgaagctggcagcacagcccccctcttcacagaccagcctgaggagcctgagagcaacaccacccatggaattgagctgtttgaggacagccagctgaccaccaggagcaaggccatcgccagcaagaccaaggagattgagcaggtgtaccggcaggactgtgagaccttcggcatggtggtgaagatgctgattgagaaggaccccagcctggagaagagcatccagtttgccctgcggcagaacctgcatgaaattggagagcgctgtgtggaggagctgaagcacttcatcgccgagtatgacaccagcacccaggactttggagagcccttctag

SEQ ID NO: 163578 - DNA, 5271 bp, synthetic construct
  misc_feature 1..5271: note = Description of Artificial Sequence: Synthetic coding sequence
  source 1..5271: mol_type = other DNA
atgaacagcctcttcaggaagaggaacaagggcaagtacagccccaccgtgcagaccaggagcatcagcaacaaggagctgtctgagctgattgagcagctgcagaagaatgctgaccaggtggagaagaacatcgtggacacagaggccaagatgcagagcgacctggcccggctgcaggagggccggcagcctgagcacagagatgtgaccctgcagaaggtgctggacagcgagaagctgctgtatgtgctggaggctgatgctgccatcgccaagcacatgaagcacccccagggcgacatgattgctgaggacatccggcagctgaaggagcgggtgaccaacctgcggggcaagcacaagcagatctaccgcctggccgtgaaggaggtggacccccaggtgaactgggccgccctggtggaggagaagctggacaagctgaacaaccagagctttggaacagacctgcccctggtggaccaccaggtggaggagcacaacatcttccacaatgaggtgaaggccatcggcccccacctggccaaggatggagacaaggagcagaacagcgagctgcgggccaagtaccagaagctgctggccgccagccaggcccggcagcagcacctgagcagcctgcaggactacatgcagcgctgcaccaatgagctgtactggctggaccagcaggccaagggccgcatgcagtatgactggagcgacaggaacctggactaccccagcagaagacggcagtatgagaacttcatcaacagaaacctggaggccaaggaggagcgcatcaacaagctgcacagcgagggggaccagctgctggccgctgagcaccctggcaggaacagcattgaggcccacatggaggccgtgcacgccgactggaaggagtacctgaacctgctgatctgtgaggagagccacctgaagtacatggaggactaccaccagttccatgaagatgtgaaggatgcccaggagctgctgaggaaggtggacagcgacctgaaccagaagtatggccctgacttcaaggaccgctaccagatcgagctgctgctgcgggagctggatgaccaggagaaggtgctggacaagtatgaagatgtggtgcagggcctgcagaagaggggccagcaggtggtgcccctgaagtaccgccgggagacccccctgaagcccatccctgtggaggccctgtgtgactttgaaggagagcagggcctcatcagccggggctacagctacaccctgcagaagaacaatggagagagctgggagctgatggacagcgctggcaacaagctgattgccccagctgtgtgcttcgtcatccccccaacagatcctgaggccctggccctggccgacagcctgggcagccagtacagatctgtgcggcagaaggccgccggcagcaagaggaccctgcagcagagatatgaggtgctgaagacagagaaccctggagatgccagtgacctgcagggccggcagctgctggccggcctggacaaggtggccagtgacctggaccggcaggagaaggccatcaccggcatcctgcggccccccctggagcagggccgggctgtgcaggacagcgctgagcgggccaaggacctgaagaacatcaccaatgagctgctgagaattgagcctgagaagaccaggagcacagctgagggggaggccttcatccaggccctgcccggcagcggcaccacccccctgctgcggaccagggtggaggacaccaacagaaaatatgagcacctgctgcagctgctggacctggcccaggagaaggtggatgtggccaaccggctggagaagagcctgcagcagagctgggagctgctggccacccatgagaaccacctgaaccaggatgacacagtgcctgagagcagccgggtgctggacagcaagggccaggagctggccgccatggcctgtgagctgcaggcccagaagagcctgctgggggaggtggagcagaacctgcaggccgccaagcagtgcagcagcaccctggccagccgcttccaggagcactgcccagacctggagcggcaggaggccgaggtgcacaagctgggccagcgcttcaacaacctgcggcagcaggtggagcggcgggcccagagcctgcagagcgccaaggccgcctatgagcacttccaccggggccatgaccacgtgctgcagttcctggtgtccatccccagctatgagccccaggagacagacagcctgagccagatggagaccaagctgaagaaccagaagaacctgctggatgaaattgccagccgggagcaggaggtgcagaagatctgtgccaacagccagcagtaccagcaggccgtgaaggactatgagctggaggccgagaagctgcggagcctgctggacctggagaatggccgccgcagccacgtgtccaagagggcccggctgcagagccctgccaccaaggtgaaggaggaggaggccgccctggccgccaagttcacagaggtgtatgccatcaaccggcagaggctgcagaacctggagtttgccctgaacctgctgcggcagcagcctgaggtggaggtgacccatgagaccctgcagaggaacagaccagattctggagtggaggaggcctggaagatcaggaaggagctggatgaggagacagaaagaagacggcagctggagaatgaggtgaagagcacccaggaggagatctggaccctgaggaaccagggcccccaggagagcgtggtgaggaaggaggtgctgaagaaggtgcctgaccctgtgctggaggagagcttccagcagctgcagaggaccctggccgaggagcagcacaagaaccagctgctgcaggaggagctggaggccctgcagctgcagctgcgggccctggagcaggagaccagagatggcggccaggagtatgtggtgaaggaggtgctgcgcatcgagccagaccgggcccaggctgatgaggtgctgcagctgcgggaggagctggaggccctgcggcggcagaagggggcccgggaggccgaggtgctgctgctgcagcagagggtggccgccctggccgaggagaagagccgggcccaggagaaggtgacagagaaggaggtggtgaagctgcagaatgacccccagctggaggccgagtaccagcagctgcaggaggaccaccagaggcaggaccagctgcgggagaagcaggaggaggagctgtccttcctgcaggacaagctgaagaggctggagaaggagcgggccatggccgagggcaagatcaccgtgaaggaggtgctgaaggtggagaaggatgctgccacagagcgggaggtgtctgacctgacccggcagtatgaagatgaagctgccaaggcccgggccagccagcgggagaagacagagctgctgaggaagatctgggccctggaggaggagaatgccaaggtggtggtgcaggagaaggtgcgggagatcgtgcggccagaccccaaggccgagagcgaggtggccaacctgcggctggagctggtggagcaggagaggaagtacagaggagctgaggagcagctgcggagctaccagagcgagctggaggccctgcggcggcggggcccccaggtggaggtgaaggaggtgaccaaggaggtgatcaagtacaagacagatcctgagatggagaaggagctgcagaggctgcgggaggagatcgtggacaagaccaggctcatcgagcgctgtgacctggagatctaccagctgaagaaggagatccaggccctgaaggacaccaagccccaggtgcagaccaaggaggtggtgcaggagatcctgcagttccaggaggacccccagaccaaggaggaggtggccagcctgcgggccaagctgtctgaggagcagaagaagcaggtggacctggagcgggagcgggccagccaggaggagcagatcgccaggaaggaggaggagctgagccgggtgaaggagcgggtggtgcagcaggaggtggtgcgctatgaggaggagcccggcctgcgggcagaggccagcgcctttgctgagagcattgatgtggagctgcggcagattgacaagctgcgggcagagctgcggcggctgcagaggagaagaacagagctggagcggcagctggaggagctggagcgggagcggcaggcccggcgggaggccgagcgggaggtgcagaggctgcagcagaggctggccgccctggagcaggaggaggccgaggcccgggagaaggtgacccacacccagaaggtggtgctgcagcaggacccccagcaggcccgggagcacgccctgctgcggctgcagctggaggaggagcagcaccggcggcagctgctggagggggagctggagaccctgcggaggaagctggccgccctggagaaggccgaggtgaaggagaaggtggtgctgtctgagagcgtgcaggtggagaagggggacacagagcaggagatccagaggctgaagagcagcctggaggaggagagccgcagcaagcgggagctggatgtggaggtgtcccggctggaggcccggctgtctgagctggagttccacaacagcaagagcagcaaggagctggacttcctgcgggaggagaaccacaagctgcagctggagcggcagaacctgcagctggagacccggcggctgcagagcgagatcaacatggccgccacagagacccgggacctgaggaacatgacagtggccgacagcggcaccaaccacgacagccggctgtggagcctggagcgggagctggatgacctgaagaggctgagcaaggacaaggacctggagattgatgagctgcagaagaggctgggctctgtggccgtgaagcgggagcagcgggagaaccacctgcggcgcagcatcgtggtgatccacccagacaccggccgggagctgagccctgaggaggcccacagagctggcctgattgactggaacatgtttgtgaagctgcggagccaggagtgtgactgggaggagatctctgtgaagggccccaacggggagagcagcgtcatccatgacaggaagagcggcaagaagttcagcattgaggaggccctgcagagcggccgcctgaccccagcccagtatgaccgctacgtgaacaaggacatgagcatccaggagctggccgtgctggtgtctggccagaagtag

SEQ ID NO: 163579 - DNA, 4440 bp, synthetic construct
  misc_feature 1..4440: note = Description of Artificial Sequence: Synthetic coding sequence
  source 1..4440: mol_type = other DNA
atggccaagaggagccggggccctggccgccgctgcctgctggccctggtgctcttctgtgcctggggcaccctggccgtggtggcccagaagccaggggccggctgccccagccgctgcctgtgcttccgcaccaccgtgcgctgcatgcacctgctgctggaggccgtgcctgctgtggccccccagaccagcatcctggacctgcgcttcaaccgcatccgggagatccagcccggggccttccggcggctgaggaacctgaacaccctgctgctgaacaacaaccagatcaagaggatccccagcggggcctttgaggacctggagaacctgaagtacctgtacctgtacaagaatgagatccagagcattgaccggcaggccttcaagggcctggccagcctggagcagctgtacctgcacttcaaccagatcgagaccctggaccctgacagcttccagcacctgcccaagctggagcggctcttcctgcacaacaaccgcatcacccacctggtgcccggcaccttcaaccacctggagagcatgaagaggctgcggctggacagcaacaccctgcactgtgactgtgagatcctgtggctggccgacctgctgaagacctatgcagagagcggaaatgcccaggccgccgccatctgtgagtacccccggcgcatccagggccgctctgtggccaccatcaccccagaggagctgaactgtgagcggccccgcatcaccagcgagccccaggatgctgatgtgaccagcggcaacacagtgtacttcacctgcagagctgagggcaaccccaagccagagatcatctggctgaggaacaacaatgagctgtccatgaagacagacagccggctgaacctgctggatgatggcaccctgatgatccagaacacccaggagacagaccagggcatctaccagtgcatggccaagaatgtggccggggaggtgaagacccaggaggtgaccctgcgctacttcggcagccctgcccggcccaccttcgtcatccagccccagaacacagaggtgctggtgggggagagcgtgaccctggagtgcagcgccaccggccaccccccaccccgcatctcctggaccaggggggacaggacccccctgcctgtggacccccgggtgaacatcacccccagcggcggcctgtacatccagaatgtggtgcagggcgacagcggggagtatgcctgcagcgccaccaacaacatcgacagcgtgcacgccacagccttcatcatcgtgcaggccctgccccagttcaccgtgaccccccaggacagagtggtgattgagggccagacagtggacttccagtgtgaggccaagggcaaccccccacctgtgattgcctggaccaagggcggcagccagctgtctgtggacagaagacacctggtgctgagcagcggcaccctgcgcatcagcggcgtggccctgcatgaccagggccagtatgagtgccaggccgtgaacatcatcggcagccagaaggtggtggcccacctgactgtgcagccccgggtgacccctgtgtttgccagcatccccagcgacaccaccgtggaggtgggcgccaacgtgcagctgccctgcagcagccagggcgagcctgagcccgccatcacctggaacaaggatggagtgcaggtgacagagagcggcaagttccacatcagccctgagggcttcctgaccatcaatgatgtgggccctgcagatgctggccgctatgaatgtgtggccaggaacaccatcggcagcgcctctgtgtccatggtgctgtctgtgaatgtgcctgatgtgtccagaaatggagacccctttgtggccaccagcatcgtggaggccatcgccaccgtggaccgggccatcaacagcaccaggacccacctgtttgacagccggcccaggagccccaatgacctgctggccctcttccgctacccccgggacccctacacagtggagcaggcccgggccggggagatctttgagaggaccctgcagctgatccaggagcacgtgcagcacggcctgatggtggacctgaatggcaccagctaccactacaatgacctggtgagcccccagtacctgaacctgattgccaacctgagcggctgcacagcccacagaagagtgaacaactgcagcgacatgtgcttccaccagaagtaccgcacccatgatggcacctgcaacaacctgcagcaccccatgtggggcgccagcctgacagcctttgagcggctgctgaagtctgtgtatgaaaatggcttcaacaccccccggggcatcaacccccaccggctgtacaacggccacgccctgcccatgccccggctggtgtccaccaccctgattggaacagaaacagtgaccccagatgagcagttcacccacatgctgatgcagtggggccagttcctggaccatgacctggacagcacagtggtggccctgagccaggcccgcttcagtgatggccagcactgcagcaatgtgtgcagcaatgaccccccctgcttctctgtgatgatccccccaaatgacagccgggcccggagcggggcccgctgcatgttctttgtgcgcagcagccctgtgtgtggcagcggcatgaccagcctgctgatgaacagcgtgtacccccgggagcagatcaaccagctgaccagctacattgatgccagcaatgtgtatggcagcacagaacatgaggcccggagcatccgggacctggccagccaccggggcctgctgcggcagggcatcgtgcagaggtctgggaagcccctgctgccctttgccactggaccacccacagagtgcatgagagatgaaaatgaaagccccatcccctgcttcctggccggggaccaccgggccaatgagcagctgggcctgacctccatgcacaccctgtggttccgggagcacaaccgcatcgccacagagctgctgaagctgaacccccactgggatggagacaccatctactatgagaccaggaagatcgtgggcgctgagatccagcacatcacctaccagcactggctgcccaagatcctgggggaggtgggcatgaggaccctgggggagtaccacggctatgaccccggcatcaatgccggcatcttcaatgcctttgccacagctgccttccgcttcggccacaccctggtgaaccccctgctgtaccgcctggatgagaacttccagcccatcgcccaggaccacctgcccctgcacaaggccttcttcagccccttccgcatcgtgaatgaaggaggcatcgaccccctgctgcggggcctgtttggagtggccggcaagatgagggtgcccagccagctgctgaacacagagctgacagagcggctcttctccatggcccacacagtggccctggacctggccgccatcaacatccagaggggccgggaccacggcatccccccctaccatgactacagagtgtactgcaacctgtctgctgcccacacctttgaggacctgaagaatgagatcaagaaccctgagatccgggagaagctgaagaggctgtatggcagcaccctgaacatcgacctcttccctgccctggtggtggaggacctggtgcccggcagccggctgggccccaccctgatgtgcctgctgagcacccagttcaagaggctgagagatggagaccggctgtggtatgagaaccctggggtcttctccccagcccagctgacccagatcaagcagaccagcctggcccgcatcctgtgtgacaatgctgacaacatcaccagggtgcagagtgatgtgttccgggtggccgagttcccccacggctacggcagctgtgatgagatcccccgggtggacctgcgggtgtggcaggactgctgtgaggactgcaggacccggggccagttcaatgccttctcctaccacttccggggcagaagaagcctggagttctcctaccaggaggacaagcccaccaagaagacccggcccaggaagatccccagcgtgggccggcagggcgagcacctgagcaacagcaccagcgccttcagcaccaggagtgatgccagcggcaccaatgacttccgggagtttgtgctggagatgcagaagaccatcacagacctgcggacccagatcaagaagctggagagccggctgagcaccacagaatgtgtggatgctggaggagagagccacgccaacaacaccaagtggaagaaggatgcctgcaccatctgtgagtgcaaggatggccaggtgacctgctttgtggaggcctgccccccagccacctgtgctgtgcctgtgaacatccctggggcctgctgccctgtgtgcctgcagaagagagctgaggagaagccctag

SEQ ID NO: 163580 - DNA, 2172 bp, synthetic construct
  misc_feature 1..2172: note = Description of Artificial Sequence: Synthetic coding sequence
  source 1..2172: mol_type = other DNA
tgaagaggccctggccgccgctgcctgctggccctggtgctcttctgtgcctggggcaccctggccgtggtggcccagaagccaggggccggctgccccagccgctgcctgtgcttccgcaccaccgtgcgctgcatgcacctgctgctggaggccgtgcctgctgtggccccccagaccagcatcctggacctgcgcttcaaccgcatccgggagatccagcccggggccttccggcggctgaggaacctgaacaccctgctgctgaacaacaaccagatcaagaggatccccagcggggcctttgaggacctggagaacctgaagtacctgtacctgtacaagaatgagatccagagcattgaccggcaggccttcaagggcctggccagcctggagcagctgtacctgcacttcaaccagatcgagaccctggaccctgacagcttccagcacctgcccaagctggagcggctcttcctgcacaacaaccgcatcacccacctggtgcccggcaccttcaaccacctggagagcatgaagaggctgcggctggacagcaacaccctgcactgtgactgtgagatcctgtggctggccgacctgctgaagacctatgcagagagcggaaatgcccaggccgccgccatctgtgagtacccccggcgcatccagggccgctctgtggccaccatcaccccagaggagctgaactgtgagcggccccgcatcaccagcgagccccaggatgctgatgtgaccagcggcaacacagtgtacttcacctgcagagctgagggcaaccccaagccagagatcatctggctgaggaacaacaatgagctgtccatgaagacagacagccggctgaacctgctggatgatggcaccctgatgatccagaacacccaggagacagaccagggcatctaccagtgcatggccaagaatgtggccggggaggtgaagacccaggaggtgaccctgcgctacttcggcagccctgcccggcccaccttcgtcatccagccccagaacacagaggtgctggtgggggagagcgtgaccctggagtgcagcgccaccggccaccccccaccccgcatctcctggaccaggggggacaggacccccctgcctgtggacccccgggtgaacatcacccccagcggcggcctgtacatccagaatgtggtgcagggcgacagcggggagtatgcctgcagcgccaccaacaacatcgacagcgtgcacgccacagccttcatcatcgtgcaggccctgccccagttcaccgtgaccccccaggacagagtggtgattgagggccagacagtggacttccagtgtgaggccaagggcaaccccccacctgtgattgcctggaccaagggcggcagccagctgtctgtggacagaagacacctggtgctgagcagcggcaccctgcgcatcagcggcgtggccctgcatgaccagggccagtatgagtgccaggccgtgaacatcatcggcagccagaaggtggtggcccacctgactgtgcagccccgggtgacccctgtgtttgccagcatccccagcgacaccaccgtggaggtgggcgccaacgtgcagctgccctgcagcagccagggcgagcctgagcccgccatcacctggaacaaggatggagtgcaggtgacagagagcggcaagttccacatcagccctgagggcttcctgaccatcaatgatgtgggccctgcagatgctggccgctatgaatgtgtggccaggaacaccatcggcagcgcctctgtgtccatggtgctgtctgtgaatgtgcctgatgtgtccagaaatggagacccctttgtggccaccagcatcgtggaggccatcgccaccgtggaccgggccatcaacagcaccaggacccacctgtttgacagccggcccaggagccccaatgacctgctggccctcttccgctacccccgggacccctacacagtggagcaggcccgggccggggagatctttgagaggaccctgcagctgatccaggagcacgtgcagcacggcctgatggtggacctgaatggcaccagccagtgccagagcctcttcttcctgctgcacggcctgagcaatggagtggagcacgcctctgtgaagagccacagctag

SEQ ID NO: 163581 - DNA, 771 bp, synthetic construct
  misc_feature 1..771: note = Description of Artificial Sequence: Synthetic coding sequence
  source 1..771: mol_type = other DNA
atggctgctgctgtgggccgcctgctgcgggcctctgtggcccggcacgtgtctgccatcccctggggcatcagcgccacagctgccctgcggcctgctgcctgtggccgcaccagcctgaccaacctgctgtgcagcggcagcagccaggccaagctgttcagcaccagcagcagctgccacgccccagctgtgacccagcacgccccctacttcaagggcacagctgtggtgaatggagagttcaaggacctgagcctggatgacttcaagggcaagtacctggtgctcttcttctaccccctggacttcacctttgtgtgccccacagagatcgtggccttcagtgacaaggccaatgagttccatgatgtgaactgtgaggtggtggccgtgtctgtggacagccacttcagccacctggcctggatcaacacccccaggaagaatggaggcctgggccacatgaacatcgccctgctgagtgacctgaccaagcagatcagccgggactatggagtgctgctggagggcagcggcctggccctgcggggcctcttcatcatcgaccccaacggggtcatcaagcacctgtctgtgaatgacctgcctgtgggccgctctgtggaggagaccctgcggctggtgaaggccttccagtatgtggagacccatggagaggtgtgcccagccaactggaccccagacagccccaccatcaagcccagccctgctgccagcaaggagtacttccagaaggtgaaccagtag

SEQ ID NO: 163582 - DNA, 717 bp, synthetic construct
  misc_feature 1..717: note = Description of Artificial Sequence: Synthetic coding sequence
  source 1..717: mol_type = other DNA
atggctgctgctgtgggccgcctgctgcgggcctctgtggcccggcacgtgtctgccatcccctggggcatcagcgccacagctgccctgcggcctgctgcctgtggccgcaccagcctgaccaacctgctgtgcagcggcagcagccaggccccctacttcaagggcacagctgtggtgaatggagagttcaaggacctgagcctggatgacttcaagggcaagtacctggtgctcttcttctaccccctggacttcacctttgtgtgccccacagagatcgtggccttcagtgacaaggccaatgagttccatgatgtgaactgtgaggtggtggccgtgtctgtggacagccacttcagccacctggcctggatcaacacccccaggaagaatggaggcctgggccacatgaacatcgccctgctgagtgacctgaccaagcagatcagccgggactatggagtgctgctggagggcagcggcctggccctgcggggcctcttcatcatcgaccccaacggggtcatcaagcacctgtctgtgaatgacctgcctgtgggccgctctgtggaggagaccctgcggctggtgaaggccttccagtatgtggagacccatggagaggtgtgcccagccaactggaccccagacagccccaccatcaagcccagccctgctgccagcaaggagtacttccagaaggtgaaccagtag

SEQ ID NO: 163583 - DNA, 645 bp, synthetic construct
  misc_feature 1..645: note = Description of Artificial Sequence: Synthetic coding sequence
  source 1..645: mol_type = other DNA
atgggcctggccggcgtgtgtgccctgcggcgctctgctggctacatcctggtgggcggggccggcggccagagcgctgctgctgctgcccggcgctacagcgagggggagtgggccagcggcggcgtgcgctccttcagcagagctgctgctgccatggcccccatcaaggtgggagatgccatcccagctgtggaggtgtttgaaggagagcccggcaacaaggtgaacctggccgagctgttcaagggcaagaagggcgtgctgtttggagtgcctggggccttcaccccaggctgcagcaagacccacctgcccggctttgtggagcaggccgaggccctgaaggccaagggcgtgcaggtggtggcctgcctgtctgtgaatgatgcctttgtgactggagagtggggccgggcccacaaggccgagggcaaggtgcggctgctggccgaccccaccggggccttcggcaaggagacagacctgctgctggatgacagcctggtgtccatctttggaaacagaaggctgaagcgcttctccatggtggtgcaggacggcatcgtgaaggccctgaatgtggagccagatggcaccggcctgacctgcagcctggcccccaacatcatcagccagctgtag

SEQ ID NO: 163584 - DNA, 378 bp, synthetic construct
  misc_feature 1..378: note = Description of Artificial Sequence: Synthetic coding sequence
  source 1..378: mol_type = other DNA
atgggcctggccggcgtgtgtgccctgcggcgctctgctggctacatcctggtgggcggggccggcggccagagcgctgctgctgctgcccggcgctacagcgagggggagtgggccagcggcggcgtgcgctccttcagcagagctgctgctgccatggcccccatcaaggtgcggctgctggccgaccccactggagccttcggcaaggagacagacctgctgctggatgacagcctggtgtccatcttcggcaacagaaggctgaagcgcttctccatggtggtgcaggacggcatcgtgaaggccctgaatgtggagccagatggcaccggcctgacctgcagcctggcccccaacatcatcagccagctgtag

SEQ ID NO: 163585 - DNA, 513 bp, synthetic construct
  misc_feature 1..513: note = Description of Artificial Sequence: Synthetic coding sequence
  source 1..513: mol_type = other DNA
atgggcctggccggcgtgtgtgccctgcggcgctctgctggctacatcctggtgggcggggccggcggccagagcgctgctgctgctgcccggcgctacagcgagggggagtgggccagcggcggcgtgcgctccttcagcagagctgctgctgccatggcccccatcaaggtgggagatgccatcccagctgtggaggtgtttgaaggagagcccggcaacaaggtgaacctggccgagctgttcaagggcaagaagggcgtgctgtttggagtgcctggggccttcaccccaggctgcagcaaggtgcggctgctggccgaccccaccggggccttcggcaaggagacagacctgctgctggatgacagcctggtgtccatctttggaaacagaaggctgaagcgcttctccatggtggtgcaggacggcatcgtgaaggccctgaatgtggagccagatggcaccggcctgacctgcagcctggcccccaacatcatcagccagctgtag

SEQ ID NO: 163586 - DNA, 675 bp, synthetic construct
  misc_feature 1..675: note = Description of Artificial Sequence: Synthetic coding sequence
  source 1..675: mol_type = other DNA
atgcctgggggcctgctgctgggagatgtggcccccaactttgaggccaacaccaccgtgggccgcatccgcttccatgacttcctgggggacagctggggcatcctcttcagccacccccgggacttcacccctgtgtgcaccacagagctgggccgggccgccaagctggcccctgagtttgccaagagaaatgtgaagctgattgccctgagcattgattctgtggaggaccacctggcctggagcaaggacatcaatgcctacaactgtgaggagcccacagagaagctgcccttccccatcattgatgacaggaaccgggagctggccatcctgctgggcatgctggaccctgctgagaaggatgagaagggcatgcctgtgacagcccgggtggtgtttgtgtttggaccagacaagaagctgaagctgagcatcctgtacccagccaccactggaagaaactttgatgagatcctgcgggtggtgatcagcctgcagctgacagctgagaagagggtggccacccctgtggactggaaggatggagacagcgtgatggtgctgcccaccatccctgaggaggaggccaagaagctgttccccaagggcgtcttcaccaaggagctgcccagcggcaagaagtacctgcgctacaccccccagccctag

SEQ ID NO: 163587 - DNA, 3852 bp, synthetic construct
  misc_feature 1..3852: note = Description of Artificial Sequence: Synthetic coding sequence
  source 1..3852: mol_type = other DNA
atgtggggcagtgaccggctggccggggccggcggcggcggcgctgctgtgacagtggccttcaccaatgcccgggactgcttcctgcacctgccccggcggctggtggcccagctgcacctgctgcagaaccaggccatcgaggtggtgtggagccaccagcctgccttcctgtcctgggtggagggccgccacttcagtgaccagggagaaaatgtggccgagatcaaccggcaggtgggccagaagctgggcctgagcaatggaggccaggtgttcctgaagccctgcagccacgtggtgtcctgccagcaggtggaggtggagcccctgtctgcagatgactgggagatcctggagctgcatgctgtgtccctggagcagcacctgctggaccagatccgcatcgtgttccccaaggccatcttccctgtgtgggtggaccagcagacctacatcttcatccagatcgtggccctgatcccagctgccagctatggccgcctggagacagacaccaagctgctgatccagcccaagacccggcgggccaaggagaacaccttcagcaaggcagatgctgagtacaagaagctgcacagctatggccgggaccagaagggcatgatgaaggagctgcagaccaagcagctgcagagcaacacagtgggcatcacagagagcaatgaaaatgaaagtgagatccctgtggacagcagctctgtggccagcctgtggaccatgattggcagcatcttctccttccagagcgagaagaagcaggagacctcctggggcctgacagagatcaatgccttcaagaacatgcagagcaaggtggtgcccctggacaacatcttccgggtgtgcaagagccagccccccagcatctacaatgccagcgccaccagcgtcttccacaagcactgtgccatccacgtgttcccctgggaccaggagtactttgatgtggagcccagcttcaccgtgacctacggcaagctggtgaagctgctgagccccaagcagcagcagagcaagaccaagcagaatgtgctgagccctgagaaggagaagcagatgtctgagcccctggaccagaagaagatccgcagtgaccacaatgaagaagatgagaaggcctgtgtgctgcaggtggtgtggaatggcctggaggagctgaacaatgccatcaagtacaccaagaatgtggaggtgctgcacctgggcaaggtgtggatcccagatgacctgaggaagaggctgaacatcgagatgcatgctgtggtgcgcatcacccctgtggaggtgacccccaagatccccaggagcctgaagctgcagccccgggagaacctgcccaaggacatcagcgaggaggacatcaagacagtgttctacagctggctgcagcagagcaccaccaccatgctgcccctggtgatcagcgaggaggagttcatcaagctggagaccaaggatggcctgaaggagttcagcctgagcatcgtgcacagctgggagaaggagaaggacaagaacatcttcctgctgagccccaacctgctgcagaagaccaccatccaggtgctgctggaccccatggtgaaggaggagaacagcgaggagattgacttcatcctgcccttcctgaagctgagcagcctgggcggcgtgaacagcctgggcgtgagcagcctggagcacatcacccacagcctgctgggccggcccctgagccggcagctgatgagcctggtggccggcctgagaaatggagccctgctgctgaccggcggcaaaggaagtggcaagagcaccctggccaaggccatctgcaaggaggcctttgacaagctggatgcccacgtggagcgggtggactgcaaggccctgcggggcaagaggctggagaacatccagaagaccctggaggtggccttcagcgaggccgtgtggatgcagcccagcgtggtgctgctggatgacctggacctgattgctggcctgcctgctgtgcctgagcacgagcacagcccagatgctgtgcagagccagaggctggcccacgccctgaatgacatgatcaaggagttcatctccatgggcagcctggtggccctgattgccaccagccagagccagcagagcctgcaccccctgctggtgtctgcccagggcgtgcacatcttccagtgtgtgcagcacatccagccccccaaccaggagcagagatgtgagatcctgtgcaacgtcatcaagaacaagctggactgtgacatcaacaagttcacagacctggacctgcagcacgtggccaaggagaccggcggctttgtggcccgggacttcaccgtgctggtggaccgggccatccacagccggctgagccggcagagcatcagcacccgggagaagctggtgctgaccaccctggacttccagaaggccctgcggggcttcctgcctgccagcctgcggtctgtgaacctgcacaagccccgggacctgggctgggacaagattggaggcctgcacgaggtgcggcagatcctgatggacaccatccagctgcctgccaagtacccagagctgtttgccaacctgcccatccggcagaggacaggcatcctgctgtatggccccccaggcaccgggaagaccctgctggccggggtcatcgcccgggagagcaggatgaacttcatctctgtgaagggccctgagctgctgagcaagtacatcggggccagcgagcaggccgtgcgggacatcttcatccgggcccaggccgccaagccctgcatcctcttctttgatgaatttgagagcatcgccccccggcggggccatgacaacacaggagtgacagacagagtggtgaaccagctgctgacccagctggatggagtggagggcctgcagggcgtgtatgtgctggccgccaccagcaggccagacctgattgatcctgccctgctgcggcccggccgcctggacaagtgtgtgtactgccccccaccagaccaggtgtcccggctggagatcctgaatgtgctgagtgacagcctgcccctggctgatgatgtggacctgcagcacgtggcctctgtgacagacagcttcaccggggctgacctgaaggccctgctgtacaatgcccagctggaggccctgcacggcatgctgctgagcagcggcctgcaggacggcagcagcagcagtgacagcgacctgagcctgagctccatggtgttcctgaaccacagcagcggcagtgatgacagcgctggagatggagaatgtggcctggaccagagcctggtgtccctggagatgtctgagatcctgcctgatgagagcaagttcaacatgtaccgcctgtacttcggcagcagctatgagagcgagctgggcaatggcaccagcagtgacctgagcagccagtgcctgagcgcccccagctccatgacccaggacctgcccggggtgcctgggaaggaccagctgttcagccagccccctgtgctgaggacagccagccaggagggctgccaggagctgacccaggagcagagggaccagctgcgggctgacatcagcatcatcaagggccgctaccgcagccagagcggagaagatgagagcatgaaccagcccggccccatcaagacccggctggccatcagccagagccacctgatgacagccctgggccacacccggcccagcatcagtgaagatgactggaagaactttgctgagctgtatgagagcttccagaaccccaagaggaggaagaaccagagcggcaccatgttccggcccggccagaaggtgaccctggcctag

SEQ ID NO: 163588 - DNA, 3681 bp, synthetic construct
  misc_feature 1..3681: note = Description of Artificial Sequence: Synthetic coding sequence
  source 1..3681: mol_type = other DNA
atgtggggcagtgaccggctggccggggccggcggcggcggcgctgctgtgacagtggccttcaccaatgcccgggactgcttcctgcacctgccccggcggctggtggcccagctgcacctgctgcagaaccaggccatcgaggtggtgtggagccaccagcctgccttcctgtcctgggtggagggccgccacttcagtgaccagggagaaaatgtggccgagatcaaccggcaggtgggccagaagctgggcctgagcaatggaggccaggtgttcctgaagccctgcagccacgtggtgtcctgccagcaggtggaggtggagcccctgtctgcagatgactgggagatcctggagctgcatgctgtgtccctggagcagcacctgctggaccagatccgcatcgtgttccccaaggccatcttccctgtgtgggtggaccagcagacctacatcttcatccagatcgtggccctgatcccagctgccagctatggccgcctggagacagacaccaagctgctgatccagcccaagacccggcgggccaaggagaacaccttcagcaaggcagatgctgagtacaagaagctgcacagctatggccgggaccagaagggcatgatgaaggagctgcagaccaagcagctgcagagcaacacagtgggcatcacagagagcaatgaaaatgaaagtgagatccctgtggacagcagctctgtggccagcctgtggaccatgattggcagcatcttctccttccagagcgagaagaagcaggagacctcctggggcctgacagagatcaatgccttcaagaacatgcagagcaaggtggtgcccctggacaacatcttccgggtgtgcaagagccagccccccagcatctacaatgccagcgccaccagcgtcttccacaagcactgtgccatccacgtgttcccctgggaccaggagtactttgatgtggagcccagcttcaccgtgacctacggcaagctggtgaagctgctgagccccaagcagcagcagagcaagaccaagcagaatgtgctgagccctgagaaggagaagcagatgtctgagcccctggaccagaagaagatccgcagtgaccacaatgaagaagatgagaaggcctgtgtgctgcaggtggtgtggaatggcctggaggagctgaacaatgccatcaagtacaccaagaatgtggaggtgctgcacctgggcaaggtgtggatcccagatgacctgaggaagaggctgaacatcgagatgcatgctgtggtgcgcatcacccctgtggaggtgacccccaagatccccaggagcctgaagctgcagccccgggagaacctgcccaaggacatcagcgaggaggacatcaagacagtgttctacagctggctgcagcagagcaccaccaccatgctgcccctggtgatcagcgaggaggagttcatcaagctggagaccaaggatggcctgaaggagttcagcctgagcatcgtgcacagctgggagaaggagaaggacaagaacatcttcctgctgagccccaacctgctgcagaagaccaccatccaggtgctgctggaccccatggtgaaggaggagaacagcgaggagattgacttcatcctgcccttcctgaagctgagcagcctgggcggcgtgaacagcctgggcgtgagcagcctggagcacatcacccacagcctgctgggccggcccctgagccggcagctgatgagcctggtggccggcctgagaaatggagccctgctgctgaccggcggcaaaggaagtggcaagagcaccctggccaaggccatctgcaaggaggcctttgacaagctggatgcccacgtggagcgggtggactgcaaggccctgcgggccctgaatgacatgatcaaggagttcatctccatgggcagcctggtggccctgattgccaccagccagagccagcagagcctgcaccccctgctggtgtctgcccagggcgtgcacatcttccagtgtgtgcagcacatccagccccccaaccaggagcagagatgtgagatcctgtgcaacgtcatcaagaacaagctggactgtgacatcaacaagttcacagacctggacctgcagcacgtggccaaggagactggaggctttgtggcccgggacttcaccgtgctggtggaccgggccatccacagccggctgagccggcagagcatcagcacccgggagaagctggtgctgaccaccctggacttccagaaggccctgcggggcttcctgcctgccagcctgcggtctgtgaacctgcacaagccccgggacctgggctgggacaagattggaggcctgcacgaggtgcggcagatcctgatggacaccatccagctgcctgccaagtacccagagctgtttgccaacctgcccatccggcagaggacaggcatcctgctgtatggccccccaggcaccgggaagaccctgctggccggcgtgattgcccgggagagcaggatgaacttcatctctgtgaagggccctgagctgctgagcaagtacatcggggccagcgagcaggccgtgcgggacatcttcatccgggcccaggccgccaagccctgcatcctcttctttgatgaatttgagagcatcgccccccggcggggccatgacaacacaggagtgacagacagagtggtgaaccagctgctgacccagctggatggagtggagggcctgcagggcgtgtatgtgctggccgccaccagcaggccagacctgattgatcctgccctgctgcggcccggccgcctggacaagtgtgtgtactgccccccaccagaccaggtgtcccggctggagatcctgaatgtgctgagtgacagcctgcccctggctgatgatgtggacctgcagcacgtggcctctgtgacagacagcttcaccggggctgacctgaaggccctgctgtacaatgcccagctggaggccctgcacggcatgctgctgagcagcggcctgcaggacggcagcagcagcagtgacagcgacctgagcctgagctccatggtgttcctgaaccacagcagcggcagtgatgattctgctggagatggagaatgtggcctggaccagagcctggtgtccctggagatgtctgagatcctgcctgatgagagcaagttcaacatgtaccgcctgtacttcggcagcagctatgaaagtgagctgggcaatggcaccagcagtgacctgagcagccagtgcctgagcgcccccagctccatgacccaggacctgcccggggtgcctgggaaggaccagctgttcagccagccccctgtgctgaggacagccagccaggagggctgccaggagctgacccaggagcagagggaccagctgcgggctgacatcagcatcatcaagggccgctaccgcagccagagcggggaggatgagagcatgaaccagcccggccccatcaagacccggctggccatcagccagagccacctgatgacagccctgggccacacccggcccagcatcagtgaagatgactggaagaactttgctgagctgtatgagagcttccagaaccccaagaggaggaagaaccagagcggcaccatgttccggcccggccagaaggtgaccctggcctag

SEQ ID NO: 163589 - DNA, 483 bp, synthetic construct
  misc_feature 1..483: note = Description of Artificial Sequence: Synthetic coding sequence
  source 1..483: mol_type = other DNA
atgagcctggtggccggcctgagaaatggagccctgctgctgactggaggcaagggcagcggcaagagcaccctggccaaggccatctgcaaggaggcctttgacaagctggatgcccacgtggagcgggtggactgcaaggccctgcggggcaagaggctggagaacatccagaagaccctggaggtggccttcagcgaggccgtgtggatgcagcccagcgtggtgctgctggatgacctggacctgattgctggcctgcctgctgtgcctgagcacgagcacagcccagatgctgtgcagagccagaggctggcccacgccctgaatgacatgatcaaggagttcatctccatgggcagcctggtggccctgattgccaccagccagagccagcagagcctgcaccccctgctggtgtctgcccagggcgtgcacatcttccagtgtgtgcagcacatccagccccccaaccagaactag

SEQ ID NO: 163590 - DNA, 1899 bp, synthetic construct
  misc_feature 1..1899: note = Description of Artificial Sequence: Synthetic coding sequence
  source 1..1899: mol_type = other DNA
atgtggggcagtgaccggctggccggggccggcggcggcggcgctgctgtgacagtggccttcaccaatgcccgggactgcttcctgcacctgccccggcggctggtggcccagctgcacctgctgcagaaccaggccatcgaggtggtgtggagccaccagcctgccttcctgtcctgggtggagggccgccacttcagtgaccagggagaaaatgtggccgagatcaaccggcaggtgggccagaagctgggcctgagcaatggaggccaggtgttcctgaagccctgcagccacgtggtgtcctgccagcaggtggaggtggagcccctgtctgcagatgactgggagatcctggagctgcatgctgtgtccctggagcagcacctgctggaccagatccgcatcgtgttccccaaggccatcttccctgtgtgggtggaccagcagacctacatcttcatccagatcgtggccctgatcccagctgccagctatggccgcctggagacagacaccaagctgctgatccagcccaagacccggcgggccaaggagaacaccttcagcaaggcagatgctgagtacaagaagctgcacagctatggccgggaccagaagggcatgatgaaggagctgcagaccaagcagctgcagagcaacacagtgggcatcacagagagcaatgaaaatgaaagtgagatccctgtggacagcagctctgtggccagcctgtggaccatgattggcagcatcttctccttccagagcgagaagaagcaggagacctcctggggcctgacagagatcaatgccttcaagaacatgcagagcaaggtggtgcccctggacaacatcttccgggtgtgcaagagccagccccccagcatctacaatgccagcgccaccagcgtcttccacaagcactgtgccatccacgtgttcccctgggaccaggagtactttgatgtggagcccagcttcaccgtgacctacggcaagctggtgaagctgctgagccccaagcagcagcagagcaagaccaagcagaatgtgctgagccctgagaaggagaagcagatgtctgagcccctggaccagaagaagatccgcagtgaccacaatgaagaagatgagaaggcctgtgtgctgcaggtggtgtggaatggcctggaggagctgaacaatgccatcaagtacaccaagaatgtggaggtgctgcacctgggcaaggtgtggatcccagatgacctgaggaagaggctgaacatcgagatgcatgctgtggtgcgcatcacccctgtggaggtgacccccaagatccccaggagcctgaagctgcagccccgggagaacctgcccaaggacatcagcgaggaggacatcaagacagtgttctacagctggctgcagcagagcaccaccaccatgctgcccctggtgatcagcgaggaggagttcatcaagctggagaccaaggatggcctgaaggagttcagcctgagcatcgtgcacagctgggagaaggagaaggacaagaacatcttcctgctgagccccaacctgctgcagaagaccaccatccaggtgctgctggaccccatggtgaaggaggagaacagcgaggagattgacttcatcctgcccttcctgaagctgagcagcctgggcggcgtgaacagcctgggcgtgagcagcctggagcacatcacccacagcctgctgggccggcccctgagccggcagctgatgagcctggtggccggcctgagaaatggagccctgctgctgaccggcggcaaaggaagtggcaagagcaccctggccaaggccatctgcaaggaggcctttgacaagctggatgcccacgtggagcgggtggactgcaaggccctgtag

SEQ ID NO: 163591 - DNA, 1041 bp, synthetic construct
  misc_feature 1..1041: note = Description of Artificial Sequence: Synthetic coding sequence
  source 1..1041: mol_type = other DNA
atggccccagctgctgccagccccccagaggtgatccgggccgcccagaaggatgagtactacagaggaggcctgcggtctgctgctggaggagccctgcacagcctggccggggccaggaagtggctggagtggaggaaggaggtggagctgctgagtgatgtggcctacttcggcctgaccaccctggccggctaccagaccctgggggaggagtatgtgtccatcatccaggtggaccccagccgcatccacgtgcccagcagcctgcggcggggcgtgctggtgaccctgcatgctgtgctgccctacctgctggacaaggccctgctgcccctggagcaggagctgcaggccgaccctgattctggccggcccctgcagggcagcctgggccctgggggccggggctgcagcggggcccggcgctggatgaggcaccacacagccaccctgacagagcagcagaggcgggccctgctgcgggctgtgtttgtgctgcggcagggcctggcctgcctgcagaggctgcacgtggcctggttctacatccatggagtcttctaccacctggccaagaggctgaccggcatcacctaccaggccctgcggccagaccccctgcgggtgctgatgtctgtggcccccagcgccctgcagctgcgggtgcgcagcctgcctggagaggacctgcgggcccgggtgtcctaccgcctgctgggcgtcatcagcctgctgcacctggtgctgtccatgggcctgcagctgtatggcttccggcagaggcagagggccaggaaggagtggaggctgcaccggggcctgagccaccggcgggccagcctggaggagagagctgtgtccaggaaccccctgtgcaccctgtgcctggaggagcggcggcaccccacagccaccccctgtggccacctgttctgctgggagtgcatcacagcctggtgcagcagcaaggccgagtgccccctgtgccgggagaagtttcctccccagaagctgatctacctgcggcactacagatag

SEQ ID NO: 163592 - DNA, 981 bp, synthetic construct
  misc_feature 1..981: note = Description of Artificial Sequence: Synthetic coding sequence
  source 1..981: mol_type = other DNA
atggccccagctgctgccagccccccagaggtgatccgggccgcccagaaggatgagtactacagaggaggcctgcggtctgctgctggaggagccctgcacagcctggccggggccaggaagtggctggagtggaggaaggaggtggagctgctgagtgatgtggcctacttcggcctgaccaccctggccggctaccagaccctgggggaggagtatgtgtccatcatccaggtggaccccagccgcatccacgtgcccagcagcctgcggcggggcgtgctggtgaccctgcatgctgtgctgccctacctgctggacaaggccctgctgcccctggagcaggagctgcaggccgaccctgattctggccggcccctgcagggcagcctgggccctgggggccggggctgcagcggggcccggcgctggatgaggcaccacacagccaccctgacagagcagcagaggcgggccctgctgcgggctgtgtttgtgctgcggcagggcctggcctgcctgcagaggctgcacgtggcctggttctacatccatggagtcttctaccacctggccaagaggctgaccggcatcacctacctgcgggtgcgcagcctgcctggagaggacctgcgggcccgggtgtcctaccgcctgctgggcgtcatcagcctgctgcacctggtgctgtccatgggcctgcagctgtatggcttccggcagaggcagagggccaggaaggagtggaggctgcaccggggcctgagccaccggcgggccagcctggaggagagagctgtgtccaggaaccccctgtgcaccctgtgcctggaggagcggcggcaccccacagccaccccctgtggccacctgttctgctgggagtgcatcacagcctggtgcagcagcaaggccgagtgccccctgtgccgggagaagtttcctccccagaagctgatctacctgcggcactacagatag

SEQ ID NO: 163593 - DNA, 744 bp, synthetic construct
  misc_feature 1..744: note = Description of Artificial Sequence: Synthetic coding sequence
  source 1..744: mol_type = other DNA
atggatgccttcacccgcttcaccaaccagacccagggccgggacaggctcttccgggccacccagtacacctgcatgctgctgcgctacctgctggagcccaaggccggcaaggagaaggtggtgatgaagctgaagaagctggagagctctgtgtccacaggcaggaagtggttccggctgggcaatgtggtgcacgccatccaggccacagagcagagcatccacgccacagacctggtgccccggctgtgcctgaccctggccaacctgaacagagtcatctacttcatctgtgacaccatcctgtgggtgcgctctgtgggcctgaccagcggcatcaacaaggagaagtggaggaccagggctgcccaccactactactacagcctgctgctgagcctggtgcgggacctgtatgagatcagcctgcagatgaagagggtgacctgtgaccgggccaagaaggagaagagcgccagccaggaccccctgtggttctctgtggccgaggaggagacagagtggctgcagagcttcctgctgctgctcttccgcagcctgaagcagcacccccccctgctgctggacacagtgaagaacctgtgtgacatcctgaaccccctggaccagctgggcatctacaagagcaaccctggcatcatcggcctgggcggcctggtgagcagcattgctggcatgatcaccgtggcctacccccagatgaagctgaagaccaggtag

SEQ ID NO: 163594 - DNA, 1209 bp, synthetic construct
  misc_feature 1..1209: note = Description of Artificial Sequence: Synthetic coding sequence
  source 1..1209: mol_type = other DNA
atgccctggaagctgtggaggggctctgtgggctgccctggggacctgagcagtgatggcctgctcttccggctgggcccccccaagccacccacagagctggagcctgagcctgagattgagggcctgctgacccctgtgctggaggccggagatgtggatgagggccctgtggcccggcccctgagccccacccggctgcagcctgccctgcccccagaggcccagagcgtgcctgagctggaggaggtggcccgggtgctggccgagatcccccggcccctgaagagaagaggctccatggagcaggccccagctgtggccctgccccccacccacaagaagcagtaccagcagatcatcagccgcctcttccaccgccacggcggccctggccctgggggccctgagcctgagctgagccccatcacagagggcagcgaggcccgggccggccccccagccccagcccccccagcccccatccccccaccagcccccagccagagcagccccccagagcagccccagagcatggagatgaggtctgtgctgaggaaggccggcagccccaggaaggcccggcgggcccggctgaaccccctggtgctgctgctggatgctgccctgactggagagctggaggtggtgcagcaggccgtgaaggagatgaatgaccccagccagcccaatgaggagggcatcacagccctgcacaatgccatctgtggggccaactacagcatcgtggacttcctgatcacagctggggccaacgtgaacagcccagacagccacggctggacccccctgcactgtgccgccagctgcaatgacaccgtcatctgcatggccctggtgcagcacggggccgccatctttgccaccaccctgagtgatggagccacagcctttgagaagtgtgacccctaccgggagggctacgccgactgtgccacctacctggctgatgtggagcagagcatgggcctgatgaacagcggggctgtgtatgccctgtgggactacagcgctgagtttggagatgagctgtccttccgggagggggagagcgtgacagtgctgcggagagatggccctgaggagacagactggtggtgggccgccctgcacggccaggagggctacgtgcccaggaactacttcggcctcttcccccgggtgaagccccagaggagcaaggtgtag

SEQ ID NO: 163595 - DNA, 507 bp, synthetic construct
  misc_feature 1..507: note = Description of Artificial Sequence: Synthetic coding sequence
  source 1..507: mol_type = other DNA
tgataccggggccgggacaggctcatccgggtgctgggctactgctgccagctggtgggcggcgtgctggtggagcagtgcccagcccggtctgaggtgggcacccggctgctggtggtgtccacccagctgagccactgcaggaccatcctgcggctgtttgatgacctggccatgtttgtgtacaccaagcagtatggcctgggcgcccaggaggaggatgcctttgtgcgctgtgtgtctgtgctgggcaacctggccgaccagctgtactacccctgtgagcacgtggcctgggccgcagatgcccgggtgctgcacgtggacagcagccgctggtggaccctgagcaccaccctgtgggccctgagcctgctgctgggcgtggcccggagcctgtggatgctgctgaagctgcggcagaggctgcggagccccacagcccccttcacctccatgtaccaggccgcccgggccggcggccaggccgaggccaccaccccctag

SEQ ID NO: 163596 - DNA, 1212 bp, synthetic construct
  misc_feature 1..1212: note = Description of Artificial Sequence: Synthetic coding sequence
  source 1..1212: mol_type = other DNA
atggccagccagcccccacctccacccaagccctgggagacccggcgcatccctggggccggccctggccctggccctggccccaccttccagagcgctgacctgggccccaccctgatgaccaggcctggccagcctgccctgaccagggtgcccccacccatcctgccccggcccagccagcagacaggcagcagctctgtgaacaccttccggcctgcctacagcagcttcagcagcggctacggggcctacggcaacagcttctacggcggctacagcccctacagctatggctacaacggcctgggctacaaccggctgcgggtggatgacctgccccccagcagatttgtgcagcaggccgaggagagcagcagaggagccttccagagcattgagagcatcgtgcacgcctttgcctctgtgtccatgatgatggatgccaccttctctgctgtgtacaacagcttccgggctgtgctggatgtggccaaccacttcagccggctgaagatccacttcaccaaggtgttcagcgcctttgccctggtgaggaccatccgctacctgtacagaaggctgcagaggatgctgggcctgcggcggggctctgaaaatgaagacctgtgggccgagagcgagggcaccgtggcctgcctgggcgctgaggacagagctgccaccagcgccaagtcctggcccatcttcctgttctttgctgtgatcctgggcggcccctacctgatctggaagctgctgagcacccacagtgatgaggtgacagacagcatcaactgggccagcggagaagatgaccacgtggtggcccgggcagaatatgactttgctgctgtgtctgaggaggagatctccttccgggccggggacatgctgaacctggccctgaaggagcagcagcccaaggtgcggggctggctgctggccagcctggatggccagaccaccggcctcatcccagccaactacgtgaagatcctgggcaagaggaagggcaggaagacagtggagagcagcaaggtgtccaagcagcagcagagcttcaccaaccccaccctgaccaagggggccaccgtggccgacagcctggatgagcaggaggccgcctttgaatctgtgtttgtggagaccaacaaggtgcctgtggccccagacagcatcggcaaggatggagagaagcaggacctgtag

SEQ ID NO: 163597 - DNA, 1134 bp, synthetic construct
  misc_feature 1..1134: note = Description of Artificial Sequence: Synthetic coding sequence
  source 1..1134: mol_type = other DNA
atggccagcagcgagcaggccgagcagcccagccagcccagcagcaccccaggctctgaaaatgtgctgccccgggagcccctgattgccacagctgtgaagttcctgcagaacagccgggtgcggcagagccccctggccacccggcgggccttcctgaagaagaagggcctgacagatgaggagattgacatggccttccagcagagcggcacagctgctgatgagcccagcagcctgggccctgccacccaggtggtgcctgtgcagcccccccacctgatcagccagccctacagccctgctggcagccgctggagggactatggagccctggccatcatcatggccggcatcgccttcggcttccaccagctgtacaagaagtacctgctgcccctcatcctgggcggccgggaggacaggaagcagctggagaggatggaggccggcctgtctgagctgagcggctctgtggcccagacagtgacccagctgcagaccaccctggcctctgtgcaggagctgctgatccagcagcagcagaagatccaggagctggcccacgagctggccgccgccaaggccaccaccagcaccaactggatcctggagagccagaacatcaatgagctgaagtctgagatcaacagcctgaagggcctgctgctgaacagacggcagttcccccccagccccagcgcccccaagatccccagctggcagatccctgtgaagagccccagccccagcagccctgctgctgtgaaccaccacagcagcagtgacatcagccctgtgtccaatgaaagcaccagcagcagccctgggaaggagggccacagccctgagggcagcacagtgacctaccacctgctgggcccccaggaggagggggagggcgtggtggatgtgaagggccaggtgaggatggaggtgcagggcgaggaggagaagcgggaggacaaggaggatgaagaagatgaggaggatgatgatgtgagccacgtggatgaggaggactgcctgggcgtgcagcgggaggacagaagaggaggagatggccagatcaatgagcaggtggagaagctgcggcggcctgagggcgccagcaatgaaagtgagcgggactag

SEQ ID NO: 163598 - DNA, 942 bp, synthetic construct
  misc_feature 1..942: note = Description of Artificial Sequence: Synthetic coding sequence
  source 1..942: mol_type = other DNA
atggccttccagcagagcggcacagctgctgatgagcccagcagcctgggccctgccacccaggtggtgcctgtgcagcccccccacctgatcagccagccctacagccctgctggcagccgctggagggactatggagccctggccatcatcatggccggcatcgccttcggcttccaccagctgtacaagaagtacctgctgcccctcatcctgggcggccgggaggacaggaagcagctggagaggatggaggccggcctgtctgagctgagcggctctgtggcccagacagtgacccagctgcagaccaccctggcctctgtgcaggagctgctgatccagcagcagcagaagatccaggagctggcccacgagctggccgccgccaaggccaccaccagcaccaactggatcctggagagccagaacatcaatgagctgaagtctgagatcaacagcctgaagggcctgctgctgaacagacggcagttcccccccagccccagcgcccccaagatccccagctggcagatccctgtgaagagccccagccccagcagccctgctgctgtgaaccaccacagcagcagtgacatcagccctgtgtccaatgaaagcaccagcagcagccctgggaaggagggccacagccctgagggcagcacagtgacctaccacctgctgggcccccaggaggagggggagggcgtggtggatgtgaagggccaggtgaggatggaggtgcagggcgaggaggagaagcgggaggacaaggaggatgaagaagatgaggaggatgatgatgtgagccacgtggatgaggaggactgcctgggcgtgcagcgggaggacagaagaggaggagatggccagatcaatgagcaggtggagaagctgcggcggcctgagggcgccagcaatgaaagtgagcgggactag

SEQ ID NO: 163599 - DNA, 1041 bp, synthetic construct
  misc_feature 1..1041: note = Description of Artificial Sequence: Synthetic coding sequence
  source 1..1041: mol_type = other DNA
atggagaagctgcggctgctgggcctgcgctaccaggagtatgtgaccaggcaccctgctgccacagcccagctggagacagctgtgcggggcttctcctacctgctggccggccgctttgctgacagccatgagctgtctgagctggtgtacagcgccagcaacctgctggtgctgctgaatgatggcatcctgaggaaggagctgaggaagaagctgcctgtgtccctgagccagcagaagctgctgacctggctgtctgtgctggagtgtgtggaggtgttcatggagatgggcgccgccaaggtgtggggcgaggtgggccgctggctggtgattgccctggtgcagctggccaaggctgtgctgaggatgctgctgctgctgtggttcaaggccggcctgcagaccagcccccccatcgtgcccctggaccgggagacccaggcccagcccccagatggagaccacagccctggcaaccacgagcagagctatgtgggcaagaggagcaacagagtggtgaggaccctgcagaacacccccagcctgcacagccgccactggggcgccccccagcagcgggagggccggcagcagcagcaccacgaggagctgagcgccacccccacccccctgggcctgcaggagaccatcgccgagttcctgtacatcgcccggcccctgctgcacctgctgagcctgggcctgtggggccagaggtcctggaagccctggctgctggccggcgtggtggatgtgaccagcctgagcctgctgagtgacaggaagggcctgacccggcgggagcggcgggagctgcggcggaggaccatcctgctgctgtactacctgctgcggagccccttctatgaccgcttcagcgaggcccgcatcctcttcctgctgcagctgctggccgaccacgtgcctggggtgggcctggtgaccaccagccagagagctgccagcccctgcctgcctgcccggccccacacccagccctggagccccccagccttcctgcccggccacccctag

SEQ ID NO: 163600 - DNA, 1011 bp, synthetic construct
  misc_feature 1..1011: note = Description of Artificial Sequence: Synthetic coding sequence
  source 1..1011: mol_type = other DNA
atggagaagctgcggctgctgggcctgcgctaccaggagtatgtgaccaggcaccctgctgccacagcccagctggagacagctgtgcggggcttctcctacctgctggccggccgctttgctgacagccatgagctgtctgagctggtgtacagcgccagcaacctgctggtgctgctgaatgatggcatcctgaggaaggagctgaggaagaagctgcctgtgtccctgagccagcagaagctgctgacctggctgtctgtgctggagtgtgtggaggtgttcatggagatgggcgccgccaaggtgtggggcgaggtgggccgctggctggtgattgccctggtgcagctggccaaggctgtgctgaggatgctgctgctgctgtggttcaaggccggcctgcagaccagcccccccatcgtgcccctggaccgggagacccaggcccagcccccagatggagaccacagccctggcaaccacgagcagagctatgtgggcaagaggagcaacagagtggtgaggaccctgcagaacacccccagcctgcacagccgccactggggcgccccccagcagcgggagggccggcagcagcagcaccacgaggagctgagcgccacccccacccccctgggcctgcaggagaccatcgccgagttcctgtacatcgcccggcccctgctgcacctgctgagcctgggcctgtggggccagaggtcctggaagccctggctgctggccggcgtggtggatgtgaccagcctgagcctgctgagtgacaggaagggcctgacccggcgggagcggcgggagctgcggcggaggaccatcctgctgctgtactacctgctgcggagccccttctatgaccgcttcagcgaggcccgcatcctcttcctgctgcagctgctggccgaccacgtgcctggggtgggcctggtgacccggcccctgatggactacctgcccacctggcagaagatctacttctacagctggggctag

SEQ ID NO: 163601 - DNA, 900 bp, synthetic construct
  misc_feature 1..900: note = Description of Artificial Sequence: Synthetic coding sequence
  source 1..900: mol_type = other DNA
atggctgctgctgaggagggctgcagcgtgggcgctgaggccgaccgggagctggaggagctgctggagagcgccctggatgactttgacaaggccaagcccagccctgccccacccagcaccaccacagccccagatgccagcggcccccagaagaggagccctggggacacagccaaggatgccctgtttgccagccaggagaagttcttccaggagctgtttgattctgagctggccagccaggccacagctgagtttgagaaggccatgaaggagctggccgaggaggagccccacctggtggagcagttccagaagctgtctgaggccgccggccgggtgggcagtgacatgaccagccagcaggagttcaccagctgcctgaaggagaccctgagcggcctggccaagaatgccacagacctgcagaacagctccatgtctgaggaggagctgaccaaggccatggagggcctgggcatggatgaaggagatggagagggcaacatcctgcccatcatgcagagcatcatgcagaacctgctgagcaaggatgtgctgtaccccagcctgaaggagatcacagagaagtacccagagtggctgcagagccaccgggagagcctgcccccagagcagtttgagaagtaccaggagcagcacagcgtgatgtgcaagatctgtgagcagtttgaggccgagacccccacagacagcgagaccacccagaaggccaggtttgagatggtgctggacctgatgcagcagctgcaggacctgggccacccccccaaggagctggccggggagatgcctcctggcctgaactttgacctggatgccctgaacctgagcggccccccaggggccagcggggagcagtgcctgatcatgtag

SEQ ID NO: 163602 - DNA, 708 bp, synthetic construct
  misc_feature 1..708: note = Description of Artificial Sequence: Synthetic coding sequence
  source 1..708: mol_type = other DNA
atggagagcggggccctggatgactttgacaaggccaagcccagccctgccccacccagcaccaccacagccccagatgccagcggcccccagaagaggagccctggggacacagccaaggatgccctgtttgccagccaggagaagttcttccaggagctgtttgattctgagctggccagccaggccacagctgagtttgagaaggccatgaaggagctggccgaggaggagccccacctggtggagcagttccagaagctgtctgaggccgccggccgggtgggcagtgacatgaccagccagcaggagttcaccagctgcctgaaggagaccctgagcggcctggccaagaatgccacagacctgcagaacagctccatgtctgaggaggagctgaccaaggccatggagggcctgggcatggatgaaggagatggagagggcaacatcctgcccatcatgcagagcatcatgcagaacctgctgagcaaggatgtgctgtaccccagcctgaaggagatcacagagaagtacccagagtggctgcagagccaccgggagagcctgcccccagagcagtttgagaagtaccaggagcagcacagcgtgatgtgcaagatctgtgagcagtttgaggccgagacccccacagacagcgagaccacccagaaggccaggtttgagatggtgctggacctgatgtag

SEQ ID NO: 163603 - DNA, 840 bp, synthetic construct
  misc_feature 1..840: note = Description of Artificial Sequence: Synthetic coding sequence
  source 1..840: mol_type = other DNA
atggagagcggggccctggatgactttgacaaggccaagcccagccctgccccacccagcaccaccacagccccagatgccagcggcccccagaagaggagccctggggacacagccaaggatgccctgtttgccagccaggagaagttcttccaggagctgtttgattctgagctggccagccaggccacagctgagtttgagaaggccatgaaggagctggccgaggaggagccccacctggtggagcagttccagaagctgtctgaggccgccggccgggtgggcagtgacatgaccagccagcaggagttcaccagctgcctgaaggagaccctgagcggcctggccaagaatgccacagacctgcagaacagctccatgtctgaggaggagctgaccaaggccatggagggcctgggcatggatgaaggagatggagagggcaacatcctgcccatcatgcagagcatcatgcagaacctgctgagcaaggatgtgctgtaccccagcctgaaggagatcacagagaagtacccagagtggctgcagagccaccgggagagcctgcccccagagcagtttgagaagtaccaggagcagcacagcgtgatgtgcaagatctgtgagcagtttgaggccgagacccccacagacagcgagaccacccagaaggccaggtttgagatggtgctggacctgatgcagcagctgcaggacctgggccacccccccaaggagctggccggggagatgcctcctggcctgaactttgacctggatgccctgaacctgagcggccccccaggggccagcggggagcagtgcctgatcatgtag

SEQ ID NO: 163604 - DNA, 630 bp, synthetic construct
  misc_feature 1..630: note = Description of Artificial Sequence: Synthetic coding sequence
  source 1..630: mol_type = other DNA
atgaaggagctggccgaggaggagccccacctggtggagcagttccagaagctgtctgaggccgccggccgggtgggcagtgacatgaccagccagcaggagttcaccagctgcctgaaggagaccctgagcggcctggccaagaatgccacagacctgcagaacagctccatgtctgaggaggagctgaccaaggccatggagggcctgggcatggatgaaggagatggagagggcaacatcctgcccatcatgcagagcatcatgcagaacctgctgagcaaggatgtgctgtaccccagcctgaaggagatcacagagaagtacccagagtggctgcagagccaccgggagagcctgcccccagagcagtttgagaagtaccaggagcagcacagcgtgatgtgcaagatctgtgagcagtttgaggccgagacccccacagacagcgagaccacccagaaggccaggtttgagatggtgctggacctgatgcagcagctgcaggacctgggccacccccccaaggagctggccggggagatgcctcctggcctgaactttgacctggatgccctgaacctgagcggccccccaggggccagcggggagcagtgcctgatcatgtag

SEQ ID NO: 163605 - DNA, 561 bp, synthetic construct
  misc_feature 1..561: note = Description of Artificial Sequence: Synthetic coding sequence
  source 1..561: mol_type = other DNA
atggctgctgctgaggagggctgcagcgtgggcgctgaggccgaccgggagctggaggagctgctggagagcgccctggatgactttgacaaggccaagcccagccctgccccacccagcaccaccacagccccagatgccagcggcccccagaagaggagccctggggacacagccaaggatgccctgtttgccagccaggagaagttcttccaggagctgtttgattctgagctggccagccaggccacagctgagtttgagaaggccatgaaggagctggccgaggaggagccccacctggtggagcagttccagaagctgtctgaggccgccggccgggtggagctgcagcacgtgggccggcgggctgaccagggccacggcggggcccggcatggaagaagaggctggggccgggagcaccccccccaccacgccgagtactatgcagagcccaccctgcagggctgtgctgtgcccatcacagaaggagaccacaggaaggtgtccaggatggtggccgagagcagcggcatcagcaccagcagagctgtgtag

SEQ ID NO: 163606 - DNA, 918 bp, synthetic construct
  misc_feature 1..918: note = Description of Artificial Sequence: Synthetic coding sequence
  source 1..918: mol_type = other DNA
atggccagcaggaaagaaaatgccaagagcgccaacagagtgctgcgcatcagccagctggatgccctggagctgaacaaggccctggagcagctggtgtggagccagttcacccagtgcttccacggcttcaagccaggcctgctggccaggtttgagcctgaggtgaaggcctgcctgtgggtgttcctgtggaggttcaccatctacagcaagaatgccaccgtgggccagagcgtgctgaacatcaagtacaagaatgacttcagccccaacctgcgctaccagccccccagcaagaaccagaagatctggtatgctgtgtgcaccatcggcggccgctggctggaggagcgctgctatgacctcttcaggaaccaccacctggccagctttgggaaggtgaagcagtgtgtgaactttgtgattggcctgctgaagctgggcggcctcatcaacttcctgatcttcctgcagaggggcaagtttgccaccctgacagagcggctgctgggcatccacagcgtcttctgcaagccccagaacatctgtgaggtgggctttgagtacatgaaccgggagctgctgtggcacggctttgctgagttcctgatcttcctgctgcccctcatcaacgtgcagaagctgaaggccaagctgagctcctggtgcatccccctgaccggggcccccaacagcgacaacaccctggccaccagcggcaaggaatgtgccctgtgtggggagtggcccaccatgccccacaccatcggctgtgagcacatcttctgctacttctgtgccaagagcagcttcctgtttgatgtgtacttcacctgccccaagtgtggcacagaggtgcacagcctgcagcccctgaagtctggaattgagatgtctgaggtgaatgccctgtag

SEQ ID NO: 163607 - DNA, 918 bp, synthetic construct; identical to SEQ ID NO: 163606
  misc_feature 1..918: note = Description of Artificial Sequence: Synthetic coding sequence
  source 1..918: mol_type = other DNA

SEQ ID NO: 163608 - DNA, 543 bp, synthetic construct
  misc_feature 1..543: note = Description of Artificial Sequence: Synthetic coding sequence
  source 1..543: mol_type = other DNA
atggccagcaggaaagaaaatgccaagagcgccaacagagtgctgcgcatcagccagctggatgccctggagctgaacaaggccctggagcagctggtgtggagccagttcacccagtgcttccacggcttcaagccaggcctgctggccaggtttgagcctgaggtgaaggcctgcctgtgggtgttcctgtggaggttcaccatctacagcaagaatgccaccgtgggccagagcgtgctgaacatcaagtacaagaatgacttcagccccaacctgcgctaccagccccccagcaagaaccagaagatctggtatgctgtgtgcaccatcggcggccgctggctggaggagcgctgctatgacctcttcaggaaccaccacctggccagctttgggaaggtgaagcagtgtgtgaactttgtgattggcctgctgaagctgggcggcctcatcaacttcctgatcttcctgcagaggggcaagtttgccaccctgacagagcggctgctgggcatccacagcgtcttctgcaagccctag

SEQ ID NO: 163609 - DNA, 12 bp, synthetic construct
  misc_feature 1..12: note = Description of Artificial Sequence: Synthetic coding sequence
  source 1..12: mol_type = other DNA
atggccagctag

SEQ ID NO: 163610 - DNA, 918 bp, synthetic construct; identical to SEQ ID NO: 163606
  misc_feature 1..918: note = Description of Artificial Sequence: Synthetic coding sequence
  source 1..918: mol_type = other DNA

SEQ ID NO: 163611 - DNA, 918 bp, synthetic construct; identical to SEQ ID NO: 163606
  misc_feature 1..918: note = Description of Artificial Sequence: Synthetic coding sequence
  source 1..918: mol_type = other DNA

SEQ ID NO: 163612 - DNA, 918 bp, synthetic construct
  misc_feature 1..918: note = Description of Artificial Sequence: Synthetic coding sequence
  source 1..918: mol_type = other DNA
atgaagagtgacagcagcaccagcgctgcccccctgcggggcctgggcggccccctgcggagcagcgagcctgtgcgggctgtgcctgcccgggccccagctgtggacctgctggaggaggccgctgacctgctggtggtgcacctggacttccgggccgccctggagacctgtgagcgggcctggcagagcctggccaaccacgctgtggccgaggagcctgctggcaccagcctggaggtgaagtgcagcctgtgtgtggtgggcatccaggccctggccgagatggaccgctggcaggaggtgctgtcctgggtgctgcagtactaccaggtgcctgagaagctgccccccaaggtgctggagctgtgcatcctgctgtacagcaagatgcaggagcccggggctgtgctggatgtggtgggcgcctggctgcaggaccctgccaaccagaacctgcctgaatatggagccctggccgagttccacgtgcagagggtgctgctgcccctgggctgcctgtctgaggccgaggagctggtggtgggcagcgctgcctttggagaggagcggcggctggatgtgctgcaggccatccacacagcccggcagcagcagaagcaggagcacagcggcagcgaggaggcccagaagcccaacctggagggctctgtgagccacaagttcctgagcctgcccatgctggtgcggcagctgtgggacagcgctgtgagccacttcttcagcctgcccttcaagaagagcctgctggccgccctgatcctgtgcctgctggtggtgcgctttgatcctgccagccccagcagcctgcacttcctgtacaagctggcccagctgttccgctggatcaggaaggccgccttcagccggctgtaccagctgcgcatccgggactag

SEQ ID NO: 163613 - DNA, 918 bp, synthetic construct; identical to SEQ ID NO: 163612
  misc_feature 1..918: note = Description of Artificial Sequence: Synthetic coding sequence
  source 1..918: mol_type = other DNA

SEQ ID NO: 163614 - DNA, 1098 bp, synthetic construct
  misc_feature 1..1098: note = Description of Artificial Sequence: Synthetic coding sequence
  source 1..1098: mol_type = other DNA
atgaagagtgacagcagcaccagcgctgcccccctgcggggcctgggcggccccctgcggagcagcgagcctgtgcgggctgtgcctgcccgggccccagctgtggacctgctggaggaggccgctgacctgctggtggtgcacctggacttccgggccgccctggagacctgtgagcgggcctggcagagcctggccaaccacgctgtggccgaggagcctgctggcaccagcctggaggtgaagtgcagcctgtgtgtggtgggcatccaggccctggccgagatggaccgctggcaggaggtgctgtcctgggtgctgcagtactaccaggtgcctgagaagctgccccccaaggtgctggagctgtgcatcctgctgtacagcaagatgcaggagcccggggctgtgctggatgtggtgggcgcctggctgcaggaccctgccaaccagaacctgcctgaatatggagccctggccgagttccacgtgcagagggtgctgctgcccctgggctgcctgtctgaggccgaggagctggtggtgggcagcgctgcctttggagaggagcggcggctggatgtgctgcaggccatccacacagcccggcagcagcagaagcaggagcacagcggcagcgaggaggcccagaagcccaacctggagggctctgtgagccacaagttcctgagcctgcccatgctggtgcggcagctgtgggacagcgctgtgagccacttcttcagcctgcccttcaagaagagcctgctggccgccctgatcctgtgcctgctggtggtgcgctttgatcctgccagccccagcagcctgcacttcctgtacaagctggcccagctgtttgctggcagcggccgcctgcacttcctggccagcaccagcagcgcctctgtgacagagggcccctgtgccccccagcccctgtgcagcagccggccctggccccagaagcagagcgaccgggccacccacccccaggcccccctgggcaagtgggaccagcccaacctggctgaatgtactgtgtcctgctgcctgggcgccctgagctttgccccctacttcggctggagcaggtag

SEQ ID NO: 163615 - DNA, 771 bp, synthetic construct
  misc_feature 1..771: note = Description of Artificial Sequence: Synthetic coding sequence
  source 1..771: mol_type = other DNA
atgaagagtgacagcagcaccagcgctgcccccctgcggggcctgggcggccccctgcggagcagcgagcctgtgcgggctgtgcctgcccgggccccagctgtggacctgctggaggaggccgctgacctgctggtggtgcacctggacttccgggccgccctggagacctgtgagcgggcctggcagagcctggccaaccacgctgtggccgaggagcctgctggcaccagcctggaggtgaagtgcagcctgtgtgtggtgggcatccaggccctggccgagatggaccgctggcaggaggtgctgtcctgggtgctgcagtactaccaggtgcctgagaagctgccccccaaggtgctggagctgtgcatcctgctgtacagcaagatgcaggagcccggggctgtgctggatgtggtgggcgcctggctgcaggaccctgccaaccagaacctgcctgaatatggagccctggccgagttccacgtgcagagggtgctgctgcccctgggctgcctgtctgaggccgaggagctggtggtgggcagcgctgcctttggagaggagcggcggctggatgtgctgcaggccatccacacagcccggcagcagcagaagcaggagcacagcggcagcgaggaggcccagaagcccaacctggaggccagccccagcagcctgcacttcctgtacaagctggcccagctgttccgctggatcaggaaggccgccttcagccggctgtaccagctgcgcatccgggactag

SEQ ID NO: 163616 - DNA, 549 bp, synthetic construct
  misc_feature 1..549: note = Description of Artificial Sequence: Synthetic coding sequence
  source 1..549: mol_type = other DNA
atgctgcggtctgtgtggaacttcctgaagaggcacaagaagaagtgcatcttcctgggcaccgtgctgggcgtgctgtccatgctgcccaccctgcgggaggccctgatgcagcagctgaacagcgagagcctgacagccctgctgaagaaccggcccagcaacaagctggagatctgggaggacctgaagatcatctccttcaccaggagcacagtggccgtgtacagcacctgcatgctggtggtgctgctgcgggtgcagctgaacatcatcggcggctacatctacctggacaatgctgctgtgggcaagaatggcaccaccatcctggcccccccagatgtgcagcagcagtacctgagcagcatccagcacctgctgggagatggcctgacagagctgatcaccgtcatcaagcaggccgtgcagaaggtgctgggctctgtgtccctgaagcacagcctgagcctgctggacctggagcagaagctgaaggagatccggaacctggtggagcagcacaagagcagctcctggatcaactag

SEQ ID NO: 163617 - DNA, 1122 bp, synthetic construct
  misc_feature 1..1122: note = Description of Artificial Sequence: Synthetic coding sequence
  source 1..1122: mol_type = other DNA
atgctgcggtctgtgtggaacttcctgaagaggcacaagaagaagtgcatcttcctgggcaccgtgctgggcggcgtgtacatcctgggcaagtatggccagaagaagatccgggagatccaggagcgggaggccgctgagtacatcgcccaggcccggcggcagtaccactttgagagcaaccagaggacctgcaacatgacagtgctgtccatgctgcccaccctgcgggaggccctgatgcagcagctgaacagcgagagcctgacagccctgctgaagaaccggcccagcaacaagctggagatctgggaggacctgaagatcatctccttcaccaggagcacagtggccgtgtacagcacctgcatgctggtggtgctgctgcgggtgcagctgaacatcatcggcggctacatctacctggacaatgctgctgtgggcaagaatggcaccaccatcctggcccccccagatgtgcagcagcagtacctgagcagcatccagcacctgctgggagatggcctgacagagctgatcaccgtcatcaagcaggccgtgcagaaggtgctgggctctgtgtccctgaagcacagcctgagcctgctggacctggagcagaagctgaaggagatccggaacctggtggagcagcacaagagcagctcctggatcaacaaggatggcagcaagcccctgctgtgccactacatgatgccagatgaggagacccccctggccgtgcaggcctgtggcctgagcccccgggacatcaccaccatcaagctgctgaatgagacccgggacatgctggagagcccagacttcagcacagtgctgaacacctgcctgaacagaggcttcagccggctgctggacaacatggccgagttcttccggcccacagagcaggacctgcagcacggcaacagcatgaacagcctgagctctgtgtccctgcccctggccaagatcatccccatcgtgaatggccagatccacagcgtgtgcagcgagacccccagccactttgtgcaggacctgctgaccatggagcaggtgaaggactttgctgccaacgtgtatgaggccttcagcaccccccagcagctggagaagtag

SEQ ID NO: 163618 - DNA, 549 bp, synthetic construct; identical to SEQ ID NO: 163616
  misc_feature 1..549: note = Description of Artificial Sequence: Synthetic coding sequence
  source 1..549: mol_type = other DNA

SEQ ID NO: 163619 - DNA, 1809 bp, synthetic construct
  misc_feature 1..1809: note = Description of Artificial Sequence: Synthetic coding sequence
  source 1..1809: mol_type = other DNA
atggccatgagggagctggtggaggccgagtgtggcggggccaaccccctgatgaagctggccggccacttcacccaggacaaggccctgcggcaggagggcctgcggcccggcccctggcccccaggggccccagccagcgaggccgccagcaagcccctgggcgtggcctctgaagatgagctggtggccgagttcctgcaggaccagaatgcccccctggtgtcccgggccccccagaccttcaagatggatgacctgctggccgagatgcagcagatcgagcagagcaacttccggcaggccccccagagggcccctggggtggccgacctggccctgtctgagaactgggcccaggagttcctggccgctggagatgctgtggatgtgacccaggactacaatgaaacagactggagccaggagttcatcagcgaggtgacagaccccctgtctgtgtccccagcccgctgggccgaggagtacctggagcagagcgaggagaagctgtggctgggggagcctgagggcacagccacagaccgctggtatgatgagtaccaccctgaggaggacctgcagcacacagccagtgactttgtggccaaggtggatgaccccaagctggccaacagcgagggcaccagtgatgcctgggtggaccagttcaccaggcctgtgaacaccagcgccctggacatggagtttgagcgggccaagagcgccatcgagagtgatgtggacttctgggacaagctgcaggccgagctggaggagatggccaagagagatgctgaggcccacccctggctgagtgactatgatgacctgaccagcgccacctatgacaagggctaccagtttgaggaggagaaccccctgcgggaccacccccagccctttgaggagggcctgcggcggctgcaggagggggacctgcccaatgctgtgctgctgtttgaagctgctgtgcagcaggaccccaagcacatggaggcctggcagtacctgggcaccacccaggccgagaatgagcaggagctgctggccatcagcgccctgcggcgctgcctggagctgaagccagacaaccagacagccctgatggccctggccgtgtccttcaccaatgaaagcctgcagaggcaggcctgtgagaccctgcgggactggctgcgctacaccccagcctatgcccacctggtgaccccagctgaggagggcgctgggggcgccggcctgggccccagcaagaggatcctgggcagcctgctgagtgacagcctcttcctggaggtgaaggagctgttcctggccgctgtgcggctggaccccaccagcattgatcctgatgtgcagtgtggcctgggcgtgctcttcaacctgagcggggagtatgacaaggctgtggactgcttcaccgctgccctgtctgtgcggcccaatgactacctgctgtggaacaagctgggcgccaccctggccaatggaaaccagagcgaggaggccgtggccgcctacagaagagccctggagctgcagcccggctacatccgcagccgctacaacctgggcatcagctgcatcaacctgggcgcccaccgggaggccgtggagcacttcctggaggccctgaacatgcagaggaagagccggggccccagaggagagggcggggccatgtctgagaacatctggagcaccctgcggctggccctgtccatgctgggccagagtgatgcctatggagctgctgatgcccgggacctgagcaccctgctgaccatgtttggcctgccccagtag

SEQ ID NO: 163620 - DNA, 1896 bp, synthetic construct
  misc_feature 1..1896: note = Description of Artificial Sequence: Synthetic coding sequence
  source 1..1896: mol_type = other DNA
atggccatgagggagctggtggaggccgagtgtggcggggccaaccccctgatgaagctggccggccacttcacccaggacaaggccctgcggcaggagggcctgcggcccggcccctggcccccaggggccccagccagcgaggccgccagcaagcccctgggcgtggcctctgaagatgagctggtggccgagttcctgcaggaccagaatgcccccctggtgtcccgggccccccagaccttcaagatggatgacctgctggccgagatgcagcagatcgagcagagcaacttccggcaggccccccagagggcccctggggtggccgacctggccctgtctgagaactgggcccaggagttcctggccgctggagatgctgtggatgtgacccaggactacaatgaaacagactggagccaggagttcatcagcgaggtgacagaccccctgtctgtgtccccagcccgctgggccgaggagtacctggagcagagcgaggagaagctgtggctgggggagcctgagggcacagccacagaccgctggtatgatgagtaccaccctgaggaggacctgcagcacacagccagtgactttgtggccaaggtggatgaccccaagctggccaacagcgagttcctgaagtttgtgcggcagatcggggagggccaggtgtccctggagagcggggccggcagcggccgggcccaggccgagcagtgggccgctgagttcatccagcagcagggcaccagtgatgcctgggtggaccagttcaccaggcctgtgaacaccagcgccctggacatggagtttgagcgggccaagagcgccatcgagctgcaggccgagctggaggagatggccaagagagatgctgaggcccacccctggctgagtgactatgatgacctgaccagcgccacctatgacaagggctaccagtttgaggaggagaaccccctgcgggaccacccccagccctttgaggagggcctgcggcggctgcaggagggggacctgcccaatgctgtgctgctgtttgaggccgctgtgcagcaggaccccaagcacatggaggcctggcagtacctgggcaccacccaggctgaaaatgagcaggagctgctggccatcagcgccctgcggcgctgcctggagctgaagccagacaaccagacagccctgatggccctggccgtgtccttcaccaatgaaagcctgcagaggcaggcctgtgagaccctgcgggactggctgcgctacaccccagcctatgcccacctggtgaccccagctgaggagggcgccggcggggccggcctgggccccagcaagaggatcctgggcagcctgctgagtgacagcctcttcctggaggtgaaggagctgttcctggccgctgtgcggctggaccccaccagcattgatcctgatgtgcagtgtggcctgggcgtgctcttcaacctgtctggagaatatgacaaggctgtggactgcttcaccgctgccctgtctgtgcggcccaatgactacctgctgtggaacaagctgggcgccaccctggccaacggcaaccagagcgaggaggccgtggccgcctaccgccgggccctggagctgcagcccggctacatccgcagccgctacaacctgggcatcagctgcatcaacctgggcgcccaccgggaggccgtggagcacttcctggaggccctgaacatgcagaggaagagccggggccccagaggagagggcggggccatgtctgagaacatctggagcaccctgcggctggccctgtccatgctgggccagagtgatgcctacggggctgctgatgcccgggacctgagcaccctgctgaccatgtttggcctgccccagtag

SEQ ID NO: 163621 - DNA, 1233 bp, synthetic construct
  misc_feature 1..1233: note = Description of Artificial Sequence: Synthetic coding sequence
  source 1..1233: mol_type = other DNA
atggccatgagggagctggtggaggccgagtgtggcggggccaaccccctgatgaagctggccggccacttcacccaggacaaggccctgcggcaggagggcctgcggcccggcccctggcccccaggggccccagccagcgaggccgtgtctgtgctggaggtggagagccctggggccgccagcgaggccgccagcaagcccctgggcgtggcctctgaagatgagctggtggccgagttcctgcaggaccagaatgcccccctggtgtcccgggccccccagaccttcaagatggatgacctgctggccgagatgcagcagatcgagcagagcaacttccggcaggccccccagagggcccctggggtggccgacctggccctgtctgagaactgggcccaggagttcctggccgctggagatgctgtggatgtgacccaggactacaatgaaacagactggagccaggagttcatcagcgaggtgacagaccccctgtctgtgtccccagcccgctgggccgaggagtacctggagcagagcgaggagaagctgtggctgggggagcctgagggcacagccacagaccgctggtatgatgagtaccaccctgaggaggacctgcagcacacagccagtgactttgtggccaaggtggatgaccccaagctggccaacagcgagggcaccagtgatgcctgggtggaccagttcaccaggcctgtgaacaccagcgccctggacatggagtttgagcgggccaagagcgccatcgagctgcaggccgagctggaggagatggccaagagagatgctgaggcccacccctggctgagtgactatgatgacctgaccagcgccacctatgacaagggctaccagtttgaggaggagaaccccctgcgggaccacccccagccctttgaggagggcctgcggcggctgcaggagggggacctgcccaatgctgtgctgctgtttgaggccgctgtgcagcaggaccccaagcacatggaggcctggcagtacctgggcaccacccaggctgaaaatgagcaggagctgctggccatcagcgccctgcggcgctgcctggagctgaagccagacaaccagacagccctgatggccctggccgtgtccttcaccaatgaaagcctgcagaggcaggcctgtgagaccctgcgggactggctgcgctacaccccagcctatgcccacctggtgtag

SEQ ID NO: 163622 - DNA, 1983 bp, synthetic construct
  misc_feature 1..1983: note = Description of Artificial Sequence: Synthetic coding sequence
  source 1..1983: mol_type = other DNA
atgctgctgtgccgggcccaccgggtgctgggcctgcggggggcccgggagctggccgtgaccatggccatgagggagctggtggaggctgaatgtggcggggccaaccccctgatgaagctggccggccacttcacccaggacaaggccctgcggcaggagggcctgcggcccggcccctggcccccaggggccccagccagcgaggccgccagcaagcccctgggcgtggcctctgaagatgagctggtggccgagttcctgcaggaccagaatgcccccctggtgtcccgggccccccagaccttcaagatggatgacctgctggccgagatgcagcagatcgagcagagcaacttccggcaggccccccagagggcccctggggtggccgacctggccctgtctgagaactgggcccaggagttcctggccgctggagatgctgtggatgtgacccaggactacaatgaaacagactggagccaggagttcatcagcgaggtgacagaccccctgtctgtgtccccagcccgctgggccgaggagtacctggagcagagcgaggagaagctgtggctgggggagcctgagggcacagccacagaccgctggtatgatgagtaccaccctgaggaggacctgcagcacacagccagtgactttgtggccaaggtggatgaccccaagctggccaacagcgagttcctgaagtttgtgcggcagattggagagggccaggtgtccctggagagcggggccggcagcggccgggcccaggccgagcagtgggccgctgagttcatccagcagcagggcaccagtgatgcctgggtggaccagttcaccaggcctgtgaacaccagcgccctggacatggagtttgagcgggccaagagcgccatcgagagtgatgtggacttctgggacaagctgcaggccgagctggaggagatggccaagagagatgctgaggcccacccctggctgagtgactatgatgacctgaccagcgccacctatgacaagggctaccagtttgaggaggagaaccccctgcgggaccacccccagccctttgaggagggcctgcggcggctgcaggagggggacctgcccaatgctgtgctgctgtttgaagctgctgtgcagcaggaccccaagcacatggaggcctggcagtacctgggcaccacccaggccgagaatgagcaggagctgctggccatcagcgccctgcggcgctgcctggagctgaagccagacaaccagacagccctgatggccctggccgtgtccttcaccaatgaaagcctgcagaggcaggcctgtgagaccctgcgggactggctgcgctacaccccagcctatgcccacctggtgaccccagctgaggagggcgctgggggcgccggcctgggccccagcaagaggatcctgggcagcctgctgagtgacagcctcttcctggaggtgaaggagctgttcctggccgctgtgcggctggaccccaccagcattgatcctgatgtgcagtgtggcctgggcgtgctcttcaacctgagcggggagtatgacaaggctgtggactgcttcaccgctgccctgtctgtgcggcccaatgactacctgctgtggaacaagctgggcgccaccctggccaatggaaaccagagcgaggaggccgtggccgcctacagaagagccctggagctgcagcccggctacatccgcagccgctacaacctgggcatcagctgcatcaacctgggcgcccaccgggaggccgtggagcacttcctggaggccctgaacatgcagaggaagagccggggccccagaggagagggcggggccatgtctgagaacatctggagcaccctgcggctggccctgtccatgctgggccagagtgatgcctatggagctgctgatgcccgggacctgagcaccctgctgaccatgtttggcctgccccagtag

SEQ ID NO: 163623 - DNA, 1920 bp, synthetic construct
  misc_feature 1..1920: note = Description of Artificial Sequence: Synthetic coding sequence
  source 1..1920: mol_type = other DNA
atggccatgagggagctggtggaggccgagtgtggcggggccaaccccctgatgaagctggccggccacttcacccaggacaaggccctgcggcaggagggcctgcggcccggcccctggcccccaggggccccagccagcgaggccgccagcaagcccctgggcgtggcctctgaagatgagctggtggccgagttcctgcaggaccagaatgcccccctggtgtcccgggccccccagaccttcaagatggatgacctgctggccgagatgcagcagatcgagcagagcaacttccggcaggccccccagagggcccctggggtggccgacctggccctgtctgagaactgggcccaggagttcctggccgctggagatgctgtggatgtgacccaggactacaatgaaacagactggagccaggagttcatcagcgaggtgacagaccccctgtctgtgtccccagcccgctgggccgaggagtacctggagcagagcgaggagaagctgtggctgggggagcctgagggcacagccacagaccgctggtatgatgagtaccaccctgaggaggacctgcagcacacagccagtgactttgtggccaaggtggatgaccccaagctggccaacagcgagttcctgaagtttgtgcggcagatcggggagggccaggtgtccctggagagcggggccggcagcggccgggcccaggccgagcagtgggccgctgagttcatccagcagcagggcaccagtgatgcctgggtggaccagttcaccaggcctgtgaacaccagcgccctggacatggagtttgagcgggccaagagcgccattgaaagtgatgtggacttctgggacaagctgcaggccgagctggaggagatggccaagagagatgctgaggcccacccctggctgagtgactatgatgacctgaccagcgccacctatgacaagggctaccagtttgaggaggagaaccccctgcgggaccacccccagccctttgaggagggcctgcggcggctgcaggagggggacctgcccaatgctgtgctgctgtttgaggccgctgtgcagcaggaccccaagcacatggaggcctggcagtacctgggcaccacccaggctgaaaatgagcaggagctgctggccatcagcgccctgcggcgctgcctggagctgaagccagacaaccagacagccctgatggccctggccgtgtccttcaccaatgaaagcctgcagaggcaggcctgtgagaccctgcgggactggctgcgctacaccccagcctatgcccacctggtgaccccagctgaggagggcgccggcggggccggcctgggccccagcaagaggatcctgggcagcctgctgagtgacagcctcttcctggaggtgaaggagctgttcctggccgctgtgcggctggaccccaccagcattgatcctgatgtgcagtgtggcctgggcgtgctcttcaacctgtctggagaatatgacaaggctgtggactgcttcaccgctgccctgtctgtgcggcccaatgactacctgctgtggaacaagctgggcgccaccctggccaacggcaaccagagcgaggaggccgtggccgcctaccgccgggccctggagctgcagcccggctacatccgcagccgctacaacctgggcatcagctgcatcaacctgggcgcccaccgggaggccgtggagcacttcctggaggccctgaacatgcagaggaagagccggggccccagaggagagggcggggccatgtctgagaacatctggagcaccctgcggctggccctgtccatgctgggccagagtgatgcctacggggctgctgatgcccgggacctgagcaccctgctgaccatgtttggcctgccccagtag

SEQ ID NO: 163624 - DNA, 1965 bp, synthetic construct
  misc_feature 1..1965: note = Description of Artificial Sequence: Synthetic coding sequence
  source 1..1965: mol_type = other DNA
atggccatgagggagctggtggaggccgagtgtggcggggccaaccccctgatgaagctggccggccacttcacccaggacaaggccctgcggcaggagggcctgcggcccggcccctggcccccaggggccccagccagcgaggccgtgtctgtgctggaggtggagagccctggggccgccagcgaggccgccagcaagcccctgggcgtggcctctgaagatgagctggtggccgagttcctgcaggaccagaatgcccccctggtgtcccgggccccccagaccttcaagatggatgacctgctggccgagatgcagcagatcgagcagagcaacttccggcaggccccccagagggcccctggggtggccgacctggccctgtctgagaactgggcccaggagttcctggccgctggagatgctgtggatgtgacccaggactacaatgaaacagactggagccaggagttcatcagcgaggtgacagaccccctgtctgtgtccccagcccgctgggccgaggagtacctggagcagagcgaggagaagctgtggctgggggagcctgagggcacagccacagaccgctggtatgatgagtaccaccctgaggaggacctgcagcacacagccagtgactttgtggccaaggtggatgaccccaagctggccaacagcgagttcctgaagtttgtgcggcagattggagagggccaggtgtccctggagagcggggccggcagcggccgggcccaggccgagcagtgggccgctgagttcatccagcagcagggcaccagtgatgcctgggtggaccagttcaccaggcctgtgaacaccagcgccctggacatggagtttgagcgggccaagagcgccatcgagagtgatgtggacttctgggacaagctgcaggccgagctggaggagatggccaagagagatgctgaggcccacccctggctgagtgactatgatgacctgaccagcgccacctatgacaagggctaccagtttgaggaggagaaccccctgcgggaccacccccagccctttgaggagggcctgcggcggctgcaggagggggacctgcccaatgctgtgctgctgtttgaagctgctgtgcagcaggaccccaagcacatggaggcctggcagtacctgggcaccacccaggccgagaatgagcaggagctgctggccatcagcgccctgcggcgctgcctggagctgaagccagacaaccagacagccctgatggccctggccgtgtccttcaccaatgaaagcctgcagaggcaggcctgtgagaccctgcgggactggctgcgctacaccccagcctatgcccacctggtgaccccagctgaggagggcgctgggggcgccggcctgggccccagcaagaggatcctgggcagcctgctgagtgacagcctcttcctggaggtgaaggagctgttcctggccgctgtgcggctggaccccaccagcattgatcctgatgtgcagtgtggcctgggcgtgctcttcaacctgagcggggagtatgacaaggctgtggactgcttcaccgctgccctgtctgtgcggcccaatgactacctgctgtggaacaagctgggcgccaccctggccaatggaaaccagagcgaggaggccgtggccgcctacagaagagccctggagctgcagcccggctacatccgcagccgctacaacctgggcatcagctgcatcaacctgggcgcccaccgggaggccgtggagcacttcctggaggccctgaacatgcagaggaagagccggggccccagaggagagggcggggccatgtctgagaacatctggagcaccctgcggctggccctgtccatgctgggccagagtgatgcctatggagctgctgatgcccgggacctgagcaccctgctgaccatgtttggcctgccccagtag

SEQ ID NO: 163625 - DNA, 1920 bp, synthetic construct; identical to SEQ ID NO: 163623
  misc_feature 1..1920: note = Description of Artificial Sequence: Synthetic coding sequence
  source 1..1920: mol_type = other DNA

SEQ ID NO: 163626 - DNA, 345 bp, synthetic construct
  misc_feature 1..345: note = Description of Artificial Sequence: Synthetic coding sequence
  source 1..345: mol_type = other DNA
atggccatgagggagctggtggaggccgagtgtggcggggccaaccccctgatgaagctggccggccacttcacccaggacaaggccctgcggcaggagggcctgcggcccggcccctggcccccaggggccccagccagcgaggccgccagcaagcccctgggcgtggcctctgaagatgagctggtggccgagttcctgcaggaccagaatgcccccctggtgtcccgggccccccagaccttcaagatggatgacctgctggccgagatgcagcagatcgagcagagcaacttccggcaggccccccagagggcccctggggtggccgacctggccctgtag

SEQ ID NO: 163627 - DNA, 309 bp, synthetic construct
  misc_feature 1..309: note = Description of Artificial Sequence: Synthetic coding sequence
  source 1..309: mol_type = other DNA
atggccatgagggagctggtggaggccgagtgtggcggggccaaccccctgatgaagctggccggccacttcacccaggacaaggccctgcggcaggagggcctgcggcccggcccctggcccccaggggccccagccagcgaggccgccagcaagcccctgggcgtggcctctgaagatgagctggtggccgagttcctgcaggaccagaatgcccccctggtgtcccgggccccccagaccttcaagatggatgacctgctggccgagatgcagcagatcgagcagagcaacttccggcaggcctag

SEQ ID NO: 163628 - DNA, 747 bp, synthetic construct
  misc_feature 1..747: note = Description of Artificial Sequence: Synthetic coding sequence
  source 1..747: mol_type = other DNA
atggccatgagggagctggtggaggccgagtgtggcggggccaaccccctgatgaagctggccggccacttcacccaggacaaggccctgcggcaggagggcctgcggcccggcccctggcccccaggggccccagccagcgaggccgccagcaagcccctgggcgtggcctctgaagatgagctggtggccgagttcctgcaggaccagaatgcccccctggtgtcccgggccccccagaccttcaagatggatgacctgctggccgagatgcagcagatcgagcagagcaacttccggcaggccccccagagggcccctggggtggccgacctggccctgtctgagaactgggcccaggagttcctggccgctggagatgctgtggatgtgacccaggactacaatgaaacagactggagccaggagttcatcagcgaggtgacagaccccctgtctgtgtccccagcccgctgggccgaggagtacctggagcagagcgaggagaagctgtggctgggggagcctgagggcacagccacagaccgctggtatgatgagtaccaccctgaggaggacctgcagcacacagccagtgactttgtggccaaggtggatgaccccaagctggccaacagcgagttcctgaagtttgtgcggcagatcggggagggccaggtgtccctggagagcggggccggcagcggccgggcccaggccgagcagtgggccgctgagttcatctag

SEQ ID NO: 163629 - DNA, 315 bp, synthetic construct
  misc_feature 1..315: note = Description of Artificial Sequence: Synthetic coding sequence
  source 1..315: mol_type = other DNA
atggccatgagggagctggtggaggccgagtgtggcggggccaaccccctgatgaagctggccggccacttcacccaggacaaggccctgcggcaggagggcctgcggcccggcccctggcccccaggggccccagccagcgaggccgccagcaagcccctgggcgtggcctctgaagatgagctggtggccgagttcctgcaggaccagaatgcccccctggtgtcccgggccccccagaccttcaagatggatgacctgctggccgagatgcagcagatcgagcagagcaacttccggcaggccccccagtag

SEQ ID NO: 163630 - DNA, 1875 bp, synthetic construct
  misc_feature 1..1875: note = Description of Artificial Sequence: Synthetic coding sequence
  source 1..1875: mol_type = other DNA
atgtaccagggccacatgcaggtggtgggcgtgaccctgaagaagaagtggcactgcctgcagaagagtgacctgaccctggccctgggcaagggcagcagagctgctgacaaggctgtggccatggtgatgaaggagatcccccgggaggagagcgctgaggagaagcccctgctgaccatgaccagccagctggtgaatgagcagcaggagagccggcccctgctgagccccagcattgatgacttcctgtgtgagaccaagtctgaggccatcgcccggcctgtgaccagcaacacagctgtgctgaccaccggcctggacctgctggacctgtctgagcctgtgtcccagacccagaccaaggccaagaagtctgagcccagcagcaagaccagcagcctgaagaagaaggcagatggcagtgacctgatcagcacagatgctgagcagaggggccagcccctgcgggtgcctgagaccagcagcctggacctggacatccagacccagctggagaagtgggatgatgtgaagttccatggagacaggaacaccaagggccaccccatggccgagaggaagagcagcagcagcaggacaggcagcaaggagctgctgtggagcagcgagcacaggagccagcctgagctgagcggcggcaagagcgccctgaacagcgagagcgccagcgagctggagctggtggcccccacccaggcccggctgaccaaggagcaccgctggggcagcgccctgctgagcaggaaccacagcctggaggaggagtttgagcgggccaaggctgctgtggagagtgacacagagttctgggacaagatgcaggccgagtgggaggagatggcccggaggaactggatcagcgagaaccaggaggcccagaaccaggtgaccatcagcgccagcgagaagggctactacttccacacagagaaccccttcaaggactggccaggggcctttgaggagggcctgaagaggctgaaggagggggacctgcctgtgaccatcctcttcatggaggccgccatcctgcaggaccctggagatgctgaggcctggcagttcctgggcatcacccaggccgagaatgaaaatgagcaggccgccatcgtggccctgcagcgctgcctggagctgcagcccaacaacctgaaggccctgatggccctggccgtgtcctacaccaacacaggccaccagcaggatgcctgtgatgccctgaagaactggatcaagcagaaccccaagtacaagtacctggtgaagagcaagaagggcagccctggcctgaccaggaggatgagcaagagccctgtggacagctctgtgctggagggcgtgaaggagctgtacctggaggccgcccaccagaatggagacatgattgatcctgacctgcagacaggcctgggcgtgctcttccacctgtctggagagttcaacagagccattgatgccttcaatgctgccctgactgtgcggcctgaggactacagcctgtggaaccggctgggcgccaccctggccaacggggacagaagtgaggaggccgtggaggcctacacccgggccctggagatccagcccggcttcatccgcagccgctacaacctgggcatcagctgcatcaacctgggcgcctaccgggaggccgtgagcaacttcctgacagccctgagcctgcagaggaagagcaggaaccagcagcaggtgccccacccagccatcagcggcaacatctgggccgccctgcgcatcgccctgagcctgatggaccagcctgagctgttccaggccgccaacctgggggacctggatgtgctgctgcgggccttcaacctggacccctag

SEQ ID NO: 163631 - DNA, 1875 bp, synthetic construct
  misc_feature 1..1875: note = Description of Artificial Sequence: Synthetic coding sequence
  source 1..1875: mol_type = other DNA
atgcaccagaatggcagccaggtggtgggcgtgaccctgaagaagaagtggcactgcctgcagaagagtgacctgaccctggccctgggcaagggcagcagagctgctgacaaggctgtggccatggtgatgaaggagatcccccgggaggagagcgctgaggagaagcccctgctgaccatgaccagccagctggtgaatgagcagcaggagagccggcccctgctgagccccagcattgatgacttcctgtgtgagaccaagtctgaggccatcgcccggcctgtgaccagcaacacagctgtgctgaccaccggcctggacctgctggacctgtctgagcctgtgtcccagacccagaccaaggccaagaagtctgagcccagcagcaagaccagcagcctgaagaagaaggcagatggcagtgacctgatcagcacagatgctgagcagaggggccagcccctgcgggtgcctgagaccagcagcctggacctggacatccagacccagctggagaagtgggatgatgtgaagttccatggagacaggaacaccaagggccaccccatggccgagaggaagagcagcagcagcaggacaggcagcaaggagctgctgtggagcagcgagcacaggagccagcctgagctgagcggcggcaagagcgccctgaacagcgagagcgccagcgagctggagctggtggcccccacccaggcccggctgaccaaggagcaccgctggggcagcgccctgctgagcaggaaccacagcctggaggaggagtttgagcgggccaaggctgctgtggagagtgacacagagttctgggacaagatgcaggccgagtgggaggagatggcccggaggaactggatcagcgagaaccaggaggcccagaaccaggtgaccatcagcgccagcgagaagggctactacttccacacagagaaccccttcaaggactggccaggggcctttgaggagggcctgaagaggctgaaggagggggacctgcctgtgaccatcctcttcatggaggccgccatcctgcaggaccctggagatgctgaggcctggcagttcctgggcatcacccaggccgagaatgaaaatgagcaggccgccatcgtggccctgcagcgctgcctggagctgcagcccaacaacctgaaggccctgatggccctggccgtgtcctacaccaacacaggccaccagcaggatgcctgtgatgccctgaagaactggatcaagcagaaccccaagtacaagtacctggtgaagagcaagaagggcagccctggcctgaccaggaggatgagcaagagccctgtggacagctctgtgctggagggcgtgaaggagctgtacctggaggccgcccaccagaatggagacatgattgatcctgacctgcagacaggcctgggcgtgctcttccacctgtctggagagttcaacagagccattgatgccttcaatgctgccctgactgtgcggcctgaggactacagcctgtggaaccggctgggcgccaccctggccaacggggacagaagtgaggaggccgtggaggcctacacccgggccctggagatccagcccggcttcatccgcagccgctacaacctgggcatcagctgcatcaacctgggcgcctaccgggaggccgtgagcaacttcctgacagccctgagcctgcagaggaagagcaggaaccagcagcaggtgccccacccagccatcagcggcaacatctgggccgccctgcgcatcgccctgagcctgatggaccagcctgagctgttccaggccgccaacctgggggacctggatgtgctgctgcgggccttcaacctggacccctag

SEQ ID NO: 163632 - DNA, 1557 bp, synthetic construct
  misc_feature 1..1557: note = Description of Artificial Sequence: Synthetic coding sequence
  source 1..1557: mol_type = other DNA
atggtgatgaaggagatcccccgggaggagagcgctgaggagaagcccctgctgaccatgaccagccagctggtgaatgagcagcaggagagccggcccctgctgagccccagcattgatgacttcctgtgtgagaccaagtctgaggccatcgcccggcctgtgaccagcaacacagctgacatccagacccagctggagaagtgggatgatgtgaagttccatggagacaggaacaccaagggccaccccatggccgagaggaagagcagcagcagcaggacaggcagcaaggagctgctgtggagcagcgagcacaggagccagcctgagctgagcggcggcaagagcgccctgaacagcgagagcgccagcgagctggagctggtggcccccacccaggcccggctgaccaaggagcaccgctggggcagcgccctgctgagcaggaaccacagcctggaggaggagtttgagcgggccaaggctgctgtggagagtgacacagagttctgggacaagatgcaggccgagtgggaggagatggcccggaggaactggatcagcgagaaccaggaggcccagaaccaggtgaccatcagcgccagcgagaagggctactacttccacacagagaaccccttcaaggactggccaggggcctttgaggagggcctgaagaggctgaaggagggggacctgcctgtgaccatcctcttcatggaggccgccatcctgcaggaccctggagatgctgaggcctggcagttcctgggcatcacccaggccgagaatgaaaatgagcaggccgccatcgtggccctgcagcgctgcctggagctgcagcccaacaacctgaaggccctgatggccctggccgtgtcctacaccaacacaggccaccagcaggatgcctgtgatgccctgaagaactggatcaagcagaaccccaagtacaagtacctggtgaagagcaagaagggcagccctggcctgaccaggaggatgagcaagagccctgtggacagctctgtgctggagggcgtgaaggagctgtacctggaggccgcccaccagaatggagacatgattgatcctgacctgcagacaggcctgggcgtgctcttccacctgtctggagagttcaacagagccattgatgccttcaatgctgccctgactgtgcggcctgaggactacagcctgtggaaccggctgggcgccaccctggccaacggggacagaagtgaggaggccgtggaggcctacacccgggccctggagatccagcccggcttcatccgcagccgctacaacctgggcatcagctgcatcaacctgggcgcctaccgggaggccgtgagcaacttcctgacagccctgagcctgcagaggaagagcaggaaccagcagcaggtgccccacccagccatcagcggcaacatctgggccgccctgcgcatcgccctgagcctgatggaccagcctgagctgttccaggccgccaacctgggggacctggatgtgctgctgcgggccttcaacctggacccctag

SEQ ID NO: 163633 - DNA, 1809 bp, synthetic construct
  misc_feature 1..1809: note = Description of Artificial Sequence: Synthetic coding sequence
  source 1..1809: mol_type = other DNA
atgtaccagggccacatgcagggcaagggcagcagagctgctgacaaggctgtggccatggtgatgaaggagatcccccgggaggagagcgctgaggagaagcccctgctgaccatgaccagccagctggtgaatgagcagcaggagagccggcccctgctgagccccagcattgatgacttcctgtgtgagaccaagtctgaggccatcgcccggcctgtgaccagcaacacagctgtgctgaccaccggcctggacctgctggacctgtctgagcctgtgtcccagacccagaccaaggccaagaagtctgagcccagcagcaagaccagcagcctgaagaagaaggcagatggcagtgacctgatcagcacagatgctgagcagaggggccagcccctgcgggtgcctgagaccagcagcctggacctggacatccagacccagctggagaagtgggatgatgtgaagttccatggagacaggaacaccaagggccaccccatggccgagaggaagagcagcagcagcaggacaggcagcaaggagctgctgtggagcagcgagcacaggagccagcctgagctgagcggcggcaagagcgccctgaacagcgagagcgccagcgagctggagctggtggcccccacccaggcccggctgaccaaggagcaccgctggggcagcgccctgctgagcaggaaccacagcctggaggaggagtttgagcgggccaaggctgctgtggagagtgacacagagttctgggacaagatgcaggccgagtgggaggagatggcccggaggaactggatcagcgagaaccaggaggcccagaaccaggtgaccatcagcgccagcgagaagggctactacttccacacagagaaccccttcaaggactggccaggggcctttgaggagggcctgaagaggctgaaggagggggacctgcctgtgaccatcctcttcatggaggccgccatcctgcaggaccctggagatgctgaggcctggcagttcctgggcatcacccaggccgagaatgaaaatgagcaggccgccatcgtggccctgcagcgctgcctggagctgcagcccaacaacctgaaggccctgatggccctggccgtgtcctacaccaacacaggccaccagcaggatgcctgtgatgccctgaagaactggatcaagcagaaccccaagtacaagtacctggtgaagagcaagaagggcagccctggcctgaccaggaggatgagcaagagccctgtggacagctctgtgctggagggcgtgaaggagctgtacctggaggccgcccaccagaatggagacatgattgatcctgacctgcagacaggcctgggcgtgctcttccacctgtctggagagttcaacagagccattgatgccttcaatgctgccctgactgtgcggcctgaggactacagcctgtggaaccggctgggcgccaccctggccaacggggacagaagtgaggaggccgtggaggcctacacccgggccctggagatccagcccggcttcatccgcagccgctacaacctgggcatcagctgcatcaacctgggcgcctaccgggaggccgtgagcaacttcctgacagccctgagcctgcagaggaagagcaggaaccagcagcaggtgccccacccagccatcagcggcaacatctgggccgccctgcgcatcgccctgagcctgatggaccagcctgagctgttccaggccgccaacctgggggacctggatgtgctgctgcgggccttcaacctggacccctag

SEQ ID NO: 163634 - DNA, 1545 bp, synthetic construct
  misc_feature 1..1545: note = Description of Artificial Sequence: Synthetic coding sequence
  source 1..1545: mol_type = other DNA
atgagcagcctgagcctgaagcccctggtgcaggtgtctgtgggcgcctttgtgcagctggtgaatgagcagcaggagagccggcccctgctgagccccagcattgatgacttcctgtgtgagaccaagtctgaggccatcgcccggcctgtgaccagcaacacagctgacatccagacccagctggagaagtgggatgatgtgaagttccatggagacaggaacaccaagggccaccccatggccgagaggaagagcagcagcagcaggacaggcagcaaggagctgctgtggagcagcgagcacaggagccagcctgagctgagcggcggcaagagcgccctgaacagcgagagcgccagcgagctggagctggtggcccccacccaggcccggctgaccaaggagcaccgctggggcagcgccctgctgagcaggaaccacagcctggaggaggagtttgagcgggccaaggctgctgtggagagtgacacagagttctgggacaagatgcaggccgagtgggaggagatggcccggaggaactggatcagcgagaaccaggaggcccagaaccaggtgaccatcagcgccagcgagaagggctactacttccacacagagaaccccttcaaggactggccaggggcctttgaggagggcctgaagaggctgaaggagggggacctgcctgtgaccatcctcttcatggaggccgccatcctgcaggaccctggagatgctgaggcctggcagttcctgggcatcacccaggccgagaatgaaaatgagcaggccgccatcgtggccctgcagcgctgcctggagctgcagcccaacaacctgaaggccctgatggccctggccgtgtcctacaccaacacaggccaccagcaggatgcctgtgatgccctgaagaactggatcaagcagaaccccaagtacaagtacctggtgaagagcaagaagggcagccctggcctgaccaggaggatgagcaagagccctgtggacagctctgtgctggagggcgtgaaggagctgtacctggaggccgcccaccagaatggagacatgattgatcctgacctgcagacaggcctgggcgtgctcttccacctgtctggagagttcaacagagccattgatgccttcaatgctgccctgactgtgcggcctgaggactacagcctgtggaaccggctgggcgccaccctggccaacggggacagaagtgaggaggccgtggaggcctacacccgggccctggagatccagcccggcttcatccgcagccgctacaacctgggcatcagctgcatcaacctgggcgcctaccgggaggccgtgagcaacttcctgacagccctgagcctgcagaggaagagcaggaaccagcagcaggtgccccacccagccatcagcggcaacatctgggccgccctgcgcatcgccctgagcctgatggaccagcctgagctgttccaggccgccaacctgggggacctggatgtgctgctgcgggccttcaacctggacccctag

SEQ ID NO: 163635 - DNA, 1881 bp, synthetic construct
  misc_feature 1..1881: note = Description of Artificial Sequence: Synthetic coding sequence
  source 1..1881: mol_type = other DNA
atgtaccagggccacatgcagaagagcaaggagcagggctacggcaagctgagcagtgatgaggacctggagatcatcgtggaccagaagcagggcaagggcagcagagctgctgacaaggctgtggccatggtgatgaaggagatcccccgggaggagagcgctgaggagaagcccctgctgaccatgaccagccagctggtgaatgagcagcaggagagccggcccctgctgagccccagcattgatgacttcctgtgtgagaccaagtctgaggccatcgcccggcctgtgaccagcaacacagctgtgctgaccaccggcctggacctgctggacctgtctgagcctgtgtcccagacccagaccaaggccaagaagtctgagcccagcagcaagaccagcagcctgaagaagaaggcagatggcagtgacctgatcagcacagatgctgagcagaggggccagcccctgcgggtgcctgagaccagcagcctggacctggacatccagacccagctggagaagtgggatgatgtgaagttccatggagacaggaacaccaagggccaccccatggccgagaggaagagcagcagcagcaggacaggcagcaaggagctgctgtggagcagcgagcacaggagccagcctgagctgagcggcggcaagagcgccctgaacagcgagagcgccagcgagctggagctggtggcccccacccaggcccggctgaccaaggagcaccgctggggcagcgccctgctgagcaggaaccacagcctggaggaggagtttgagcgggccaaggctgctgtggagagtgacacagagttctgggacaagatgcaggccgagtgggaggagatggcccggaggaactggatcagcgagaaccaggaggcccagaaccaggtgaccatcagcgccagcgagaagggctactacttccacacagagaaccccttcaaggactggccaggggcctttgaggagggcctgaagaggctgaaggagggggacctgcctgtgaccatcctcttcatggaggccgccatcctgcaggaccctggagatgctgaggcctggcagttcctgggcatcacccaggccgagaatgaaaatgagcaggccgccatcgtggccctgcagcgctgcctggagctgcagcccaacaacctgaaggccctgatggccctggccgtgtcctacaccaacacaggccaccagcaggatgcctgtgatgccctgaagaactggatcaagcagaaccccaagtacaagtacctggtgaagagcaagaagggcagccctggcctgaccaggaggatgagcaagagccctgtggacagctctgtgctggagggcgtgaaggagctgtacctggaggccgcccaccagaatggagacatgattgatcctgacctgcagacaggcctgggcgtgctcttccacctgtctggagagttcaacagagccattgatgccttcaatgctgccctgactgtgcggcctgaggactacagcctgtggaaccggctgggcgccaccctggccaacggggacagaagtgaggaggccgtggaggcctacacccgggccctggagatccagcccggcttcatccgcagccgctacaacctgggcatcagctgcatcaacctgggcgcctaccgggaggccgtgagcaacttcctgacagccctgagcctgcagaggaagagcaggaaccagcagcaggtgccccacccagccatcagcggcaacatctgggccgccctgcgcatcgccctgagcctgatggaccagcctgagctgttccaggccgccaacctgggggacctggatgtgctgctgcgggccttcaacctggacccctag

SEQ ID NO: 163636 - DNA, 1752 bp, synthetic construct
  misc_feature 1..1752: note = Description of Artificial Sequence: Synthetic coding sequence
  source 1..1752: mol_type = other DNA
atggtgatgaaggagatcccccgggaggagagcgctgaggagaagcccctgctgaccatgaccagccagctggtgaatgagcagcaggagagccggcccctgctgagccccagcattgatgacttcctgtgtgagaccaagtctgaggccatcgcccggcctgtgaccagcaacacagctgtgctgaccaccggcctggacctgctggacctgtctgagcctgtgtcccagacccagaccaaggccaagaagtctgagcccagcagcaagaccagcagcctgaagaagaaggcagatggcagtgacctgatcagcacagatgctgagcagaggggccagcccctgcgggtgcctgagaccagcagcctggacctggacatccagacccagctggagaagtgggatgatgtgaagttccacggggacaggaacaccaagggccaccccatggccgagaggaagagcagcagcagcaggacaggcagcaaggagctgctgtggagcagcgagcacaggagccagcctgagctgagcggcggcaagagcgccctgaacagcgagagcgccagcgagctggagctggtggcccccacccaggcccggctgaccaaggagcaccgctggggcagcgccctgctgagcaggaaccacagcctggaggaggagtttgagcgggccaaggctgctgtggagagtgacacagagttctgggacaagatgcaggccgagtgggaggagatggcccggaggaactggatcagcgagaaccaggaggcccagaaccaggtgaccatcagcgccagcgagaagggctactacttccacacagagaaccccttcaaggactggccaggggcctttgaggagggcctgaagaggctgaaggagggggacctgcctgtgaccatcctcttcatggaggccgccatcctgcaggaccctggagatgctgaggcctggcagttcctgggcatcacccaggctgaaaatgaaaatgagcaggccgccatcgtggccctgcagcgctgcctggagctgcagcccaacaacctgaaggccctgatggccctggccgtgtcctacaccaacacaggccaccagcaggatgcctgtgatgccctgaagaactggatcaagcagaaccccaagtacaagtacctggtgaagagcaagaagggcagccctggcctgaccaggaggatgagcaagagccctgtggacagctctgtgctggagggcgtgaaggagctgtacctggaggccgcccaccagaatggagacatgattgatcctgacctgcagacaggcctgggcgtgctcttccacctgagcggggagttcaacagagccattgatgccttcaatgctgccctgactgtgcggcctgaggactacagcctgtggaaccggctgggcgccaccctggccaatggagacagaagtgaggaggccgtggaggcctacacccgggccctggagatccagcccggcttcatccgcagccgctacaacctgggcatcagctgcatcaacctgggcgcctaccgggaggccgtgagcaacttcctgacagccctgagcctgcagaggaagagcaggaaccagcagcaggtgccccacccagccatcagcggcaacatctgggccgccctgagaattgccctgagcctgatggaccagcctgagctgttccaggccgccaacctgggggacctggatgtgctgctgcgggccttcaacctggacccctag

SEQ ID NO: 163637 - DNA, 1776 bp, synthetic construct
  misc_feature 1..1776: note = Description of Artificial Sequence: Synthetic coding sequence
  source 1..1776: mol_type = other DNA
atgtaccagggccacatgcagaagagcaaggagcagggctacggcaagctgagcagtgatgaggacctggagatcatcgtggaccagaagcagctggtgaatgagcagcaggagagccggcccctgctgagccccagcattgatgacttcctgtgtgagaccaagtctgaggccatcgcccggcctgtgaccagcaacacagctgtgctgaccaccggcctggacctgctggacctgtctgagcctgtgtcccagacccagaccaaggccaagaagtctgagcccagcagcaagaccagcagcctgaagaagaaggcagatggcagtgacctgatcagcacagatgctgagcagaggggccagcccctgcgggtgcctgagaccagcagcctggacctggacatccagacccagctggagaagtgggatgatgtgaagttccacggggacaggaacaccaagggccaccccatggccgagaggaagagcagcagcagcaggacaggcagcaaggagctgctgtggagcagcgagcacaggagccagcctgagctgagcggcggcaagagcgccctgaacagcgagagcgccagcgagctggagctggtggcccccacccaggcccggctgaccaaggagcaccgctggggcagcgccctgctgagcaggaaccacagcctggaggaggagtttgagcgggccaaggctgctgtggagagtgacacagagttctgggacaagatgcaggccgagtgggaggagatggcccggaggaactggatcagcgagaaccaggaggcccagaaccaggtgaccatcagcgccagcgagaagggctactacttccacacagagaaccccttcaaggactggccaggggcctttgaggagggcctgaagaggctgaaggagggggacctgcctgtgaccatcctcttcatggaggccgccatcctgcaggaccctggagatgctgaggcctggcagttcctgggcatcacccaggctgaaaatgaaaatgagcaggccgccatcgtggccctgcagcgctgcctggagctgcagcccaacaacctgaaggccctgatggccctggccgtgtcctacaccaacacaggccaccagcaggatgcctgtgatgccctgaagaactggatcaagcagaaccccaagtacaagtacctggtgaagagcaagaagggcagccctggcctgaccaggaggatgagcaagagccctgtggacagctctgtgctggagggcgtgaaggagctgtacctggaggccgcccaccagaatggagacatgattgatcctgacctgcagacaggcctgggcgtgctcttccacctgagcggggagttcaacagagccattgatgccttcaatgctgccctgactgtgcggcctgaggactacagcctgtggaaccggctgggcgccaccctggccaatggagacagaagtgaggaggccgtggaggcctacacccgggccctggagatccagcccggcttcatccgcagccgctacaacctgggcatcagctgcatcaacctgggcgcctaccgggaggccgtgagcaacttcctgacagccctgagcctgcagaggaagagcaggaaccagcagcaggtgccccacccagccatcagcggcaacatctgggccgccctgagaattgccctgagcctgatggaccagcctgagctgttccaggccgccaacctgggggacctggatgtgctgctgcgggccttcaacctggacccctag

SEQ ID NO: 163638 - DNA, 2217 bp, synthetic construct
  misc_feature 1..2217: note = Description of Artificial Sequence: Synthetic coding sequence
  source 1..2217: mol_type = other DNA
atggccctggccgtgctgcgggtgctggagcccttccccacagagaccccacccctggccgtgctgctgcccccaggcggcccctggccagctgctgagctgggcctggtgctggccctgcggcctgctggggagagccctgctggccctgccctgctggtggccgccctggagggcccagatgctggaacagaggagcagggccctggccccccccagctgctggtgtcccgggccctgctgcggctgctggccctgggcagcggggcctgggtgcgggcccgggctgtgcggcggcccccagccctgggctgggccctgctgggcaccagcctgggccctggcctgggcccccgggtgggccccctgctggtgcggcggggggagaccctgcctgtgcccggcccccgggtgctggagaccaggcctgccctgcagggcctgctgggccctggcacccggctggccgtgacagagctgcggggccgggcccggctgtgcccagagagcggggacagcagccggcccccacctcctcctgtggtgagcagctttgctgtgtctggcaccgtgcggcggctgcagggcgtgctgggcggcactggagacagcctgggcgtgagccgcagctgcctgcggggcctgggcctcttccagggcgagtgggtgtgggtggcccaggcccgggagagcagcaacaccagccagccccacctggcccgggtgcaggtgctggagccccgctgggacctgagtgaccggctgggccctggcagcggccccctgggggagcccctggctgatggcctggccctggtgcctgccaccctggccttcaacctgggctgtgaccccctggagatgggagagctgcgcatccagcgctacctggagggcagcatcgcccctgaggacaagggcagctgcagcctgctgcccggccccccatttgcccgggagctgcacattgaaattgtgagcagcccccactacagcaccaacggcaactatgatggagtgctgtaccgccacttccagatcccccgggtggtgcaggagggagatgtgctgtgtgtgcccaccatcggccaggtggagatcctggagggcagccctgagaagctgccccgctggagggagatgttcttcaaggtgaagaagacagtgggggaggccccagatggccctgccagcgcctacctggccgacaccacccacaccagcctgtacatggtgggcagcaccctgagccctgtgccctggctgcccagcgaggagagcaccctgtggagcagcctgagccccccaggcctggaggccctggtgtctgagctgtgtgctgtgctgaagccccggctgcagcctggaggagccctgctgaccggcaccagctctgtgctgctgcggggccccccaggctgtgggaagaccaccgtggtggccgccgcctgcagccacctgggcctgcacctgctgaaggtgccctgcagcagcctgtgtgccgagagcagcggggctgtggagaccaagctgcaggccatcttcagccgggcccggcgctgcaggcctgctgtgctgctgctgacagctgtggacctgctgggccgggacagagatggcctgggagaagatgcccgggtgatggctgtgctgcggcacctgctgctgaatgaagaccccctgaacagctgcccccccctgatggtggtggccaccaccagccgggcccaggacctgcctgcagatgtgcagacagccttcccccatgagctggaggtgcctgccctgtctgagggccagaggctgagcatcctgcgggccctgacagcccacctgcccctgggccaggaggtgaacctggcccagctggcccggcgctgtgccggctttgtggtgggggacctgtatgccctgctgacccacagcagcagagctgcctgcacccgcatcaagaacagcggcctggccggcggcctgacagaggaggatgaaggagagctgtgtgccgccggcttccccctgctggctgaagattttggccaggccctggagcagctgcagacagcccacagccaggccgtgggcgcccccaaggtggagaccaagagcctggagtgcctgcccggccctggcctgcagctgcacgccctgagcagcctgatgaactggaccctgtggccccaggccggcggggaggtggagatcctggaggagtag

SEQ ID NO: 163639 - DNA, 2943 bp, synthetic construct
  misc_feature 1..2943: note = Description of Artificial Sequence: Synthetic coding sequence
  source 1..2943: mol_type = other DNA
atggccctggccgtgctgcgggtgctggagcccttccccacagagaccccacccctggccgtgctgctgcccccaggcggcccctggccagctgctgagctgggcctggtgctggccctgcggcctgctggggagagccctgctggccctgccctgctggtggccgccctggagggcccagatgctggaacagaggagcagggccctggccccccccagctgctggtgtcccgggccctgctgcggctgctggccctgggcagcggggcctgggtgcgggcccgggctgtgcggcggcccccagccctgggctgggccctgctgggcaccagcctgggccctggcctgggcccccgggtgggccccctgctggtgcggcggggggagaccctgcctgtgcccggcccccgggtgctggagaccaggcctgccctgcagggcctgctgggccctggcacccggctggccgtgacagagctgcggggccgggcccggctgtgcccagagagcggggacagcagccggcccccacctcctcctgtggtgagcagctttgctgtgtctggcaccgtgcggcggctgcagggcgtgctgggcggcactggagacagcctgggcgtgagccgcagctgcctgcggggcctgggcctcttccagggcgagtgggtgtgggtggcccaggcccgggagagcagcaacaccagccagccccacctggcccgggtgcaggtgctggagccccgctgggacctgagtgaccggctgggccctggcagcggccccctgggggagcccctggctgatggcctggccctggtgcctgccaccctggccttcaacctgggctgtgaccccctggagatgggagagctgcgcatccagcgctacctggagggcagcatcgcccctgaggacaagggcagctgcagcctgctgcccggccccccatttgcccgggagctgcacattgaaattgtgagcagcccccactacagcaccaacggcaactatgatggagtgctgtaccgccacttccagatcccccgggtggtgcaggagggagatgtgctgtgtgtgcccaccatcggccaggtggagatcctggagggcagccctgagaagctgccccgctggagggagatgttcttcaaggtgaagaagacagtgggggaggccccagatggccctgccagcgcctacctggccgacaccacccacaccagcctgtacatggtgggcagcaccctgagccctgtgccctggctgcccagcgaggagagcaccctgtggagcagcctgagccccccaggcctggaggccctggtgtctgagctgtgtgctgtgctgaagccccggctgcagcctggaggagccctgctgaccggcaccagctctgtgctgctgcggggccccccaggctgtgggaagaccaccgtggtggccgccgcctgcagccacctgggcctgcacctgctgaaggtgccctgcagcagcctgtgtgccgagagcagcggggctgtggagaccaagctgcaggccatcttcagccgggcccggcgctgcaggcctgctgtgctgctgctgacagctgtggacctgctgggccgggacagagatggcctgggagaagatgcccgggtgatggctgtgctgcggcacctgctgctgaatgaagaccccctgaacagctgcccccccctgatggtggtggccaccaccagccgggcccaggacctgcctgcagatgtgcagacagccttcccccatgagctggaggtgcctgccctgtctgagggccagaggctgagcatcctgcgggccctgacagcccacctgcccctgggccaggaggtgaacctggcccagctggcccggcgctgtgccggctttgtggtgggggacctgtatgccctgctgacccacagcagcagagctgcctgcacccgcatcaagaacagcggcctggccggcggcctgacagaggaggatgaaggagagctgtgtgccgccggcttccccctgctggctgaagattttggccaggccctggagcagctgcagacagcccacagccaggccgtgggcgcccccaagatccccagcgtgtcctggcatgatgtgggcggcctgcaggaggtgaagaaggagatcctggagaccatccagctgcccctggagcaccctgagctgctgagcctgggcctgcggcgcagcggcctgctgctgcacggccccccaggcaccgggaagaccctgctggccaaggctgtggccacagagtgcagcctgaccttcctgtctgtgaagggccctgagctgatcaacatgtatgtgggccagagtgaagaaaatgtgcgggaggtgtttgcccgggcccgggctgctgccccctgcatcatcttctttgatgagctggacagcctggcccccagccggggccgcagcggggacagcggcggcgtgatggacagagtggtgtcccagctgctggccgagctggatggcctgcacagcacccaggatgtgtttgtgattggagccaccaacagaccagacctgctggaccctgccctgctgcggcccggccgctttgacaagctggtgtttgtgggcgccaatgaagatcgggccagccagctgcgggtgctgagcgccatcaccaggaagttcaagctggagcccagcgtgtccctggtgaatgtgctggactgctgccccccccagctgaccggggctgacctgtacagcctgtgcagtgatgccatgacagctgccctgaagagaagagtgcatgacctggaggagggcctggagcccggcagcagcgccctgatgctgaccatggaggacctgctgcaggccgccgcccggctgcagcccagcgtgtctgagcaggagctgctgcgctacaagaggatccagaggaagtttgctgcctgctag

SEQ ID NO: 163640 - DNA, 972 bp, synthetic construct
  misc_feature 1..972: note = Description of Artificial Sequence: Synthetic coding sequence
  source 1..972: mol_type = other DNA
atgtctgctgtgtgtggcggggccgccaggatgctgcggaccccaggccgccacggctatgctgctgagttcagcccctacctgcccggccgcctggcctgtgccacagcccagcactacggcattgctggctgcggcaccctgctgatcctggaccctgatgaggccggcctgcggctcttccgcagctttgactggaatgatggcctgtttgatgtgacctggagcgaaaataatgaacatgtgctgatcacctgcagcggagatggcagcctgcagctgtgggacacagccaaggctgctggccccctgcaggtgtacaaggagcacgcccaggaggtgtacagcgtggactggagccagaccagaggagagcagctggtggtgtctggctcctgggaccagacagtgaagctgtgggaccccaccgtgggcaagagcctgtgcaccttccggggccacgagagcatcatctacagcaccatctggagcccccacatccctggctgctttgccagcgccagcggggaccagaccctgcgcatctgggatgtgaaggccgccggcgtgcgcatcgtcatcccagcccaccaggccgagatcctgagctgtgactggtgcaagtacaatgaaaacctgctggtgactggagctgtggactgcagcctgcggggctgggacctgagaaatgtgcggcagcctgtgtttgagctgctgggccacacctacgccatccggcgggtgaagttcagccccttccacgcctctgtgctggccagctgcagctatgacttcaccgtgcgcttctggaacttcagcaagccagacagcctgctggagaccgtggagcaccacacagagttcacctgtggcctggacttcagcctgcagagccccacccaggtggccgactgctcctgggatgagaccatcaagatctatgaccctgcctgcctgaccatcccagcctag

SEQ ID NO: 163641 - DNA, 369 bp, synthetic construct
  misc_feature 1..369: note = Description of Artificial Sequence: Synthetic coding sequence
  source 1..369: mol_type = other DNA
atgtctgctgtgtgtggcggggccgccaggatgctgcggaccccaggccgccacggctatgctgctgagttcagcccctacctgcccggccgcctggcctgtgccacagcccagcactacggcattgctggctgcggcaccctgctgatcctggaccctgatgaggccggcctgcggctcttccgcagctttgactggaatgatggcctgtttgatgtgacctggagcgaaaataatgaacatgtgctgatcacctgcagcggagatggcagcctgcagctgtgggacacagccaaggctgctggccccctgcaggtgtacaaggagcacgcccaggagtatgtgcagggcagctgtgtggtgaagtag

SEQ ID NO: 163642 - DNA, 843 bp, synthetic construct
  misc_feature 1..843: note = Description of Artificial Sequence: Synthetic coding sequence
  source 1..843: mol_type = other DNA
atgtctgctgtgtgtggcggggccgccaggatgctgcggaccccaggccgccacggctatgctgctgagttcagcccctacctgcccggccgcctggcctgtgccacagcccagcactacggcattgctggctgcggcaccctgctgatcctggaccctgatgaggccggcctgcggctcttccgcagctttgactggaatgatggcctgtttgatgtgacctggagcgaaaataatgaacatgtgctgatcacctgcagcggagatggcagcctgcagctgtgggacacagccaaggctgctggccccctgcaggtgtacaaggagcacgcccaggaggtgtacagcgtggactggagccagaccagaggagagcagctggtggtgtctggctcctgggaccagacagtgaagctgtgggaccccaccgtgggcaagagcctgtgcaccttccggggccacgagagcatcatctacagcaccatctggagcccccacatccctggctgctttgccagcgccagcggggaccagaccctgcgcatctgggatgtgaaggccgccggcgtgcgcatcgtcatcccagcccaccaggccgagatcctgagctgtgactggtgcaagtacaatgaaaacctgctggtgactggagctgtggactgcagcctgcggggctgggacctgagaaatgtgcggcagcctgtgtttgagctgctgggccacacctacgccatccggcgggtgaagatggagagctgccctgtgacccagaccaggagccagctgacagccaccagcgccttctgggtgcaggccgtgctgctgccccagcccacagaatag

SEQ ID NO: 163643 - DNA, 912 bp, synthetic construct
  misc_feature 1..912: note = Description of Artificial Sequence: Synthetic coding sequence
  source 1..912: mol_type = other DNA
atggcctcctgggccaagggccgcagctacctggcccctggcctgctgcagggccaggtggccatcgtgactggaggagccaccggcatcggcaaggccatcgtgaaggagctgctggagctgggcagcaatgtggtgattgccagcaggaagctggagcggctgaagtctgctgctgatgagctgcaggccaacctgccccccaccaagcaggcccgggtcatccccatccagtgcaacatcagaaatgaggaggaggtgaacaacctggtgaagagcaccctggacaccttcggcaagatcaacttcctggtgaacaatggaggcggccagttcctgagccctgctgagcacatcagcagcaagggctggcatgctgtgctggagaccaacctgaccggcaccttctacatgtgcaaggctgtgtacagctcctggatgaaggagcacggcggcagcatcgtgaacatcatcgtgcccaccaaggccggcttccccctggccgtgcacagcggggccgcccgggccggcgtgtacaacctgaccaagagcctggccctggagtgggcctgcagcggcatccgcatcaactgtgtggcccctggggtcatctacagccagacagctgtggagaactacggctcctggggccagagcttctttgagggcagcttccagaagatcccagccaagagaattggagtgcctgaggaggtgtcctctgtggtgtgcttcctgctgagccctgctgccagcttcatcaccggccagagcgtggatgtggatggcggccgcagcctgtacacccacagctatgaggtgcctgaccatgacaactggcccaagggggccggggacctgtctgtggtgaagaagatgaaggagaccttcaaggagaaggccaagctgtag

SEQ ID NO: 163644 - DNA, 1407 bp, synthetic construct
  misc_feature 1..1407: note = Description of Artificial Sequence: Synthetic coding sequence
  source 1..1407: mol_type = other DNA
atggtggacacagagagccccctgtgccccctgagccccctggaggccggggacctggagagccccctgtctgaggagttcctgcaggagatgggcaacatccaggagatcagccagagcattggagaggacagcagcggcagctttggcttcacagagtaccagtacctgggcagctgccccggcagtgatggcagcgtcatcacagacaccctgagccctgccagcagccccagctctgtgacctaccctgtggtgcccggctctgtggatgagagccccagcggggccctgaacattgaatgtcgcatctgtggggacaaggccagcggctaccactacggcgtgcacgcctgtgagggctgcaagggcttcttccggaggaccatccggctgaagctggtgtatgacaagtgtgacaggagctgcaagatccagaagaagaacagaaacaagtgccagtactgccgcttccacaagtgcctgtctgtgggcatgagccacaatgccatccgctttggaaggatgcccaggtctgagaaggccaagctgaaggccgagatcctgacctgtgaacatgacatcgaggacagcgagacagctgacctgaagagcctggccaagaggatctatgaggcctacctgaagaacttcaacatgaacaaggtgaaggcccgggtcatcctgagcggcaaggccagcaacaaccccccatttgtgattcatgacatggagaccctgtgcatggccgagaagaccctggtggccaagctggtggccaacggcatccagaacaaggaggccgaggtgcgcatcttccactgctgccagtgcacctctgtggagaccgtgacagagctgacagaatttgccaaggccatccctggctttgccaacctggacctgaatgaccaggtgaccctgctgaagtatggagtgtatgaggccatctttgccatgctgagctctgtgatgaacaaggatggcatgctggtggcctatggaaatggcttcatcacccgggagttcctgaagagcctgaggaagcccttctgtgacatcatggagcccaagtttgattttgccatgaagttcaatgccctggagctggatgacagcgacatcagcctgtttgtggccgccatcatctgctgcggggacaggcctggcctgctgaatgtgggccacatcgagaagatgcaggagggcatcgtgcacgtgctgcggctgcacctgcagagcaaccacccagatgacatcttcctgttccccaagctgctgcagaagatggctgacctgcggcagctggtgacagagcacgcccagctggtgcagatcatcaagaagacagaaagtgatgctgccctgcaccccctgctgcaggagatctacagagacatgtactag

SEQ ID NO: 163645 - DNA, 1407 bp, synthetic construct; identical to SEQ ID NO: 163644
  misc_feature 1..1407: note = Description of Artificial Sequence: Synthetic coding sequence
  source 1..1407: mol_type = other DNA

SEQ ID NO: 163646 - DNA, 1407 bp, synthetic construct; identical to SEQ ID NO: 163644
  misc_feature 1..1407: note = Description of Artificial Sequence: Synthetic coding sequence
  source 1..1407: mol_type = other DNA

SEQ ID NO: 163647 - DNA, 1407 bp, synthetic construct; identical to SEQ ID NO: 163644
  misc_feature 1..1407: note = Description of Artificial Sequence: Synthetic coding sequence
  source 1..1407: mol_type = other DNA

SEQ ID NO: 163648 - DNA, 210 bp, synthetic construct
  misc_feature 1..210: note = Description of Artificial Sequence: Synthetic coding sequence
  source 1..210: mol_type = other DNA
atggtggacacagagagccccctgtgccccctgagccccctggaggccggggacctggagagccccctgtctgaggagttcctgcaggagatgggcaacatccaggagatcagccagagcattggagaggacagcagcggcagctttggcttcacagagtaccagtacctgggcagctgccccggcagtgatggcagcgtcatcacctag

SEQ ID NO: 163649 - DNA, 402 bp, synthetic construct
  misc_feature 1..402: note = Description of Artificial Sequence: Synthetic coding sequence
  source 1..402: mol_type = other DNA
atggtggacacagagagccccctgtgccccctgagccccctggaggccggggacctggagagccccctgtctgaggagttcctgcaggagatgggcaacatccaggagatcagccagagcattggagaggacagcagcggcagctttggcttcacagagtaccagtacctgggcagctgccccggcagtgatggcagcgtcatcacagacaccctgagccctgccagcagccccagctctgtgacctaccctgtggtgcccggctctgtggatgagagccccagcggggccctgaacattgaatgtcgcatctgtggggacaaggccagcggctaccactacggcgtgcacgcctgtgagggctgcaaggtggagggctcctggaacagagcctggtggtag

SEQ ID NO: 163650 - DNA, 525 bp, synthetic construct
  misc_feature 1..525: note = Description of Artificial Sequence: Synthetic coding sequence
  source 1..525: mol_type = other DNA
atggtggacacagagagccccctgtgccccctgagccccctggaggccggggacctggagagccccctgtctgaggagttcctgcaggagatgggcaacatccaggagatcagccagagcattggagaggacagcagcggcagctttggcttcacagagtaccagtacctgggcagctgccccggcagtgatggcagcgtcatcacagacaccctgagccctgccagcagccccagctctgtgacctaccctgtggtgcccggctctgtggatgagagccccagcggggccctgaacattgaatgtcgcatctgtggggacaaggccagcggctaccactacggcgtgcacgcctgtgagggctgcaagggcttcttccggaggaccatccggctgaagctggtgtatgacaagtgtgacaggagctgcaagatccagaagaagaacagaaacaagtgccagtactgccgcttccacaagtgcctgtctgtgggcatgagccacaatgccttctgccacacctag

SEQ ID NO: 163651 - DNA, 30 bp, synthetic construct
  misc_feature 1..30: note = Description of Artificial Sequence: Synthetic coding sequence
  source 1..30: mol_type = other DNA
atggtggacacagagagccccctgtgctag

SEQ ID NO: 163652 - DNA, 489 bp, synthetic construct
  misc_feature 1..489: note = Description of Artificial Sequence: Synthetic coding sequence
  source 1..489: mol_type = other DNA
atgaacaaggtgaaggcccgggtcatcctgagcggcaaggccagcaacaacccccccttcgtcatccatgacatggagaccctgtgcatggccgagaagaccctggtggccaagctggtggccaacggcatccagaacaaggaggccgaggtgcgcatcttccactgctgccagtgcacctctgtggagaccgtgacagagctgacagaatttgccaaggccatccctggctttgccaacctggacctgaatgaccaggtgaccctgctgaagtatggagtgtatgaggccatctttgccatgctgagctctgtgatgaacaaggatggcatgctggtggcctatggaaatggcttcatcacccgggagttcctgaagagcctgaggaagcccttctgtgacatcatggagcccaagtttgattttgccatgaagttcaatgccctggagctggatgacagcgacatcagcctgtttgtggccgcctag

SEQ ID NO: 163653 - DNA, 1326 bp, synthetic construct
  misc_feature 1..1326: note = Description of Artificial Sequence: Synthetic coding sequence
  source 1..1326: mol_type = other DNA
atggagcagccccaggaggaggcccctgaggtgcgggaggaggaggagaaggaggaggtggccgaggccgagggcgcccctgagctgaatggaggcccccagcacgccctgcccagcagcagctacacagacctgagccgcagcagcagcccccccagcctgctggaccagctgcagatgggctgtgatggagccagctgtggcagcctgaacatggagtgccgggtgtgtggggacaaggccagcggcttccactacggcgtgcacgcctgtgagggctgcaagggcttcttccggaggaccatccgcatgaagctggagtatgagaagtgtgagaggagctgcaagatccagaagaagaacagaaacaagtgccagtactgccgcttccagaagtgcctggccctgggcatgagccacaatgccatccgctttggaaggatgcctgaggccgagaagaggaagctggtggccggcctgacagccaatgaaggcagccagtacaacccccaggtggccgacctgaaggccttcagcaagcacatctacaatgcctacctgaagaacttcaacatgaccaagaagaaggcccggagcatcctgaccgggaaggccagccacacagccccctttgtgattcatgacatcgagaccctgtggcaggccgagaagggcctggtgtggaagcagctggtgaatggcctgcccccctacaaggagatctctgtgcacgtgttctaccgctgccagtgcaccaccgtggagaccgtgcgggagctgacagaatttgccaagagcatccccagcttcagcagcctcttcctgaatgaccaggtgaccctgctgaagtatggagtgcatgaggccatctttgccatgctggccagcatcgtgaacaaggatggcctgctggtggccaatggaagtggctttgtgacccgggagttcctgcggagcctgaggaagcccttcagtgacatcatcgagcccaagtttgaatttgctgtgaagttcaatgccctggagctggatgacagcgacctggccctcttcatcgccgccatcatcctgtgtggggaccggcccggcctgatgaatgtgccccgggtggaggccatccaggacaccatcctgcgggccctggagttccacctgcaggccaaccacccagatgcccagtacctgttccccaagctgctgcagaagatggctgacctgcggcagctggtgacagaacatgcccagatgatgcagaggatcaagaagacagaaacagagaccagcctgcaccccctgctgcaggagatctacaaggacatgtactag

SEQ ID NO: 163654 - DNA, 1086 bp, synthetic construct
  misc_feature 1..1086: note = Description of Artificial Sequence: Synthetic coding sequence
  source 1..1086: mol_type = other DNA
atggagcagccccaggaggaggcccctgaggtgcgggaggaggaggagaaggaggaggtggccgaggccgagggcgcccctgagctgaatggaggcccccagcacgccctgcccagcagcagctacacagacctgagccgcagcagcagcccccccagcctgctggaccagctgcagatgggctgtgatggagccagctgtggcagcctgaacatggagtgccgggtgtgtggggacaaggccagcggcttccactacggcgtgcacgcctgtgagggctgcaagggcttcttccggaggaccatccgcatgaagctggagtatgagaagtgtgagaggagctgcaagatccagaagaagaacagaaacaagtgccagtactgccgcttccagaagtgcctggccctgggcatgagccacaatgccatccgctttggaaggatgcctgaggccgagaagaggaagctggtggccggcctgacagccaatgaaggcagccagtacaacccccaggtggccgacctgaaggccttcagcaagcacatctacaatgcctacctgaagaacttcaacatgaccaagaagaaggcccggagcatcctgaccgggaaggccagccacacagccccctttgtgattcatgacatcgagaccctgtggcaggccgagaagggcctggtgtggaagcagctggtgaatggcctgcccccctacaaggagatctctgtgcacgtgttctaccgctgccagtgcaccaccgtggagaccgtgcgggagctgacagaatttgccaagagcatccccagcttcagcagcctcttcctgaatgaccaggtgaccctgctgaagtatggagtgcatgaggccatctttgccatgctggccagcatcgtgaacaaggatggcctgctggtggccaatggaagtggctttgtgacccgggagttcctgcggagcctgaggaagcccttcagtgacatcatcgagcccaagtttgaatttgctgtgaagttcaatgccctggagctggatgacagcgacctggccctcttcatcgccgccatcatcctgtgtggcggggagtag

SEQ ID NO: 163655 - DNA, 1326 bp, synthetic construct; identical to SEQ ID NO: 163653
  misc_feature 1..1326: note = Description of Artificial Sequence: Synthetic coding sequence
  source 1..1326: mol_type = other DNA

SEQ ID NO: 163656 - DNA, 1032 bp, synthetic construct
  misc_feature 1..1032: note = Description of Artificial Sequence: Synthetic coding sequence
  source 1..1032: mol_type = other DNA
atggagcagccccaggaggaggcccctgaggtgcgggaggaggaggagaaggaggaggtggccgaggccgagggcgcccctgagctgaatggaggcccccagcacgccctgcccagcagcagctacacagccatccgctttggaaggatgcctgaggccgagaagaggaagctggtggccggcctgacagccaatgaaggcagccagtacaacccccaggtggccgacctgaaggccttcagcaagcacatctacaatgcctacctgaagaacttcaacatgaccaagaagaaggcccggagcatcctgaccgggaaggccagccacacagccccctttgtgattcatgacatcgagaccctgtggcaggccgagaagggcctggtgtggaagcagctggtgaatggcctgcccccctacaaggagatctctgtgcacgtgttctaccgctgccagtgcaccaccgtggagaccgtgcgggagctgacagaatttgccaagagcatccccagcttcagcagcctcttcctgaatgaccaggtgaccctgctgaagtatggagtgcatgaggccatctttgccatgctggccagcatcgtgaacaaggatggcctgctggtggccaatggaagtggctttgtgacccgggagttcctgcggagcctgaggaagcccttcagtgacatcatcgagcccaagtttgaatttgctgtgaagttcaatgccctggagctggatgacagcgacctggccctcttcatcgccgccatcatcctgtgtggggaccggcccggcctgatgaatgtgccccgggtggaggccatccaggacaccatcctgcgggccctggagttccacctgcaggccaaccacccagatgcccagtacctgttccccaagctgctgcagaagatggctgacctgcggcagctggtgacagaacatgcccagatgatgcagaggatcaagaagacagaaacagagaccagcctgcaccccctgctgcaggagatctacaaggacatgtactag

SEQ ID NO: 163657 - DNA, 1086 bp, synthetic construct; identical to SEQ ID NO: 163654
  misc_feature 1..1086: note = Description of Artificial Sequence: Synthetic coding sequence
  source 1..1086: mol_type = other DNA

SEQ ID NO: 163658 - DNA, 1209 bp, synthetic construct
  misc_feature 1..1209: note = Description of Artificial Sequence: Synthetic coding sequence
  source 1..1209: mol_type = other DNA
atgcaccagagggacctgagccgcagcagcagcccccccagcctgctggaccagctgcagatgggctgtgatggagccagctgtggcagcctgaacatggagtgccgggtgtgtggggacaaggccagcggcttccactatggagtgcacgcctgtgagggctgcaagggcttcttccggaggaccatccgcatgaagctggagtatgaaaaatgtgagaggagctgcaagatccagaagaagaacagaaacaagtgccagtactgccgcttccagaagtgcctggccctgggcatgagccacaatgccatccgcttcggccgcatgcctgaggccgagaagaggaagctggtggccggcctgacagccaatgaaggcagccagtacaacccccaggtggccgacctgaaggccttcagcaagcacatctacaatgcctacctgaagaacttcaacatgaccaagaagaaggcccggagcatcctgaccgggaaggccagccacacagcccccttcgtcatccatgacatcgagaccctgtggcaggccgagaagggcctggtgtggaagcagctggtgaatggcctgcccccctacaaggagatctctgtgcacgtgttctaccgctgccagtgcaccaccgtggagaccgtgcgggagctgacagaatttgccaagagcatccccagcttcagcagcctcttcctgaatgaccaggtgaccctgctgaagtatggagtgcatgaggccatctttgccatgctggccagcatcgtgaacaaggatggcctgctggtggccaacggcagcggctttgtgacccgggagttcctgcggagcctgaggaagcccttcagtgacatcatcgagcccaagtttgaatttgctgtgaagttcaatgccctggagctggatgacagcgacctggccctcttcatcgccgccatcatcctgtgtggggacaggcctggcctgatgaatgtgccccgggtggaggccatccaggacaccatcctgcgggccctggagttccacctgcaggccaaccacccagatgcccagtacctgttccccaagctgctgcagaagatggctgacctgcggcagctggtgacagagcacgcccagatgatgcagaggatcaagaagacagaaacagagaccagcctgcaccccctgctgcaggagatctacaaggacatgtactag

SEQ ID NO: 163659 - DNA, 1017 bp, synthetic construct
  misc_feature 1..1017: note = Description of Artificial Sequence: Synthetic coding sequence
  source 1..1017: mol_type = other DNA
atgaagctggagtatgaaaaatgtgagaggagctgcaagatccagaagaagaacagaaacaagtgccagtactgccgcttccagaagtgcctggccctgggcatgagccacaatgccatccgcttcggccgcatgcctgaggccgagaagaggaagctggtggccggcctgacagccaatgaaggcagccagtacaacccccaggtggccgacctgaaggccttcagcaagcacatctacaatgcctacctgaagaacttcaacatgaccaagaagaaggcccggagcatcctgaccgggaaggccagccacacagcccccttcgtcatccatgacatcgagaccctgtggcaggccgagaagggcctggtgtggaagcagctggtgaatggcctgcccccctacaaggagatctctgtgcacgtgttctaccgctgccagtgcaccaccgtggagaccgtgcgggagctgacagaatttgccaagagcatccccagcttcagcagcctcttcctgaatgaccaggtgaccctgctgaagtatggagtgcatgaggccatctttgccatgctggccagcatcgtgaacaaggatggcctgctggtggccaacggcagcggctttgtgacccgggagttcctgcggagcctgaggaagcccttcagtgacatcatcgagcccaagtttgaatttgctgtgaagttcaatgccctggagctggatgacagcgacctggccctcttcatcgccgccatcatcctgtgtggggacaggcctggcctgatgaatgtgccccgggtggaggccatccaggacaccatcctgcgggccctggagttccacctgcaggccaaccacccagatgcccagtacctgttccccaagctgctgcagaagatggctgacctgcggcagctggtgacagagcacgcccagatgatgcagaggatcaagaagacagaaacagagaccagcctgcaccccctgctgcaggagatctacaaggacatgtactag

SEQ ID NO: 163660 - DNA, 1518 bp, synthetic construct
  misc_feature 1..1518: note = Description of Artificial Sequence: Synthetic coding sequence
  source 1..1518: mol_type = other DNA
atgggagagaccctgggggacagccccatcgaccctgagagtgacagcttcacagacaccctgagcgccaacatcagccaggagatgaccatggtggacacagagatgcccttctggcccaccaactttggcatcagctctgtggacctgtctgtgatggaggaccacagccacagctttgacatcaagcccttcaccaccgtggacttcagcagcatcagcaccccccactatgaggacatccccttcaccaggacagatcctgtggtggccgactacaagtatgacctgaagctgcaggagtaccagagcgccatcaaggtggagcccgccagccccccctactacagcgagaagacccagctgtacaacaagccccatgaggagcccagcaacagcctgatggccatcgagtgccgggtgtgtggggacaaggccagcggcttccactatggagtgcacgcctgtgagggctgcaagggcttcttccggaggaccatccggctgaagctgatctatgacagatgtgacctgaactgccgcatccacaagaagagcaggaacaagtgccagtactgccgcttccagaagtgcctggccgtgggcatgagccacaatgccatccgcttcggccgcatgccccaggccgagaaggagaagctgctggccgagatcagcagtgacatcgaccagctgaaccctgagagcgctgacctgcgggccctggccaagcacctgtatgacagctacatcaagagcttccccctgaccaaggccaaggcccgggccatcctgaccgggaagaccacagacaagagcccctttgtgatctatgacatgaacagcctgatgatgggagaggacaagatcaagttcaagcacatcacccccctgcaggagcagagcaaggaggtggccatccgcatcttccagggctgccagttccgctctgtggaggccgtgcaggagatcacagaatatgccaagagcatccctggctttgtgaacctggacctgaatgaccaggtgaccctgctgaagtatggagtgcatgagatcatctacaccatgctggccagcctgatgaacaaggatggagtgctgatcagcgagggccagggcttcatgacccgggagttcctgaagagcctgaggaagccctttggagacttcatggagcccaagtttgaatttgctgtgaagttcaatgccctggagctggatgacagcgacctggccatcttcatcgctgtgatcatcctgagcggggaccggcccggcctgctgaatgtgaagcccatcgaggacatccaggacaacctgctgcaggccctggagctgcagctgaagctgaaccaccctgagagcagccagctgtttgccaagctgctgcagaagatgacagacctgcggcagatcgtgacagaacatgtgcagctgctgcaggtgatcaagaagacagaaacagacatgagcctgcaccccctgctgcaggagatctacaaggacctgtactag

SEQ ID NO: 163661 - DNA, 1434 bp, synthetic construct
  misc_feature 1..1434: note = Description of Artificial Sequence: Synthetic coding sequence
  source 1..1434: mol_type = other DNA
atgaccatggtggacacagagatgcccttctggcccaccaactttggcatcagctctgtggacctgtctgtgatggaggaccacagccacagctttgacatcaagcccttcaccaccgtggacttcagcagcatcagcaccccccactatgaggacatccccttcaccaggacagatcctgtggtggccgactacaagtatgacctgaagctgcaggagtaccagagcgccatcaaggtggagcccgccagccccccctactacagcgagaagacccagctgtacaacaagccccatgaggagcccagcaacagcctgatggccatcgagtgccgggtgtgtggggacaaggccagcggcttccactatggagtgcacgcctgtgagggctgcaagggcttcttccggaggaccatccggctgaagctgatctatgacagatgtgacctgaactgccgcatccacaagaagagcaggaacaagtgccagtactgccgcttccagaagtgcctggccgtgggcatgagccacaatgccatccgcttcggccgcatgccccaggccgagaaggagaagctgctggccgagatcagcagtgacatcgaccagctgaaccctgagagcgctgacctgcgggccctggccaagcacctgtatgacagctacatcaagagcttccccctgaccaaggccaaggcccgggccatcctgaccgggaagaccacagacaagagcccctttgtgatctatgacatgaacagcctgatgatgggagaggacaagatcaagttcaagcacatcacccccctgcaggagcagagcaaggaggtggccatccgcatcttccagggctgccagttccgctctgtggaggccgtgcaggagatcacagaatatgccaagagcatccctggctttgtgaacctggacctgaatgaccaggtgaccctgctgaagtatggagtgcatgagatcatctacaccatgctggccagcctgatgaacaaggatggagtgctgatcagcgagggccagggcttcatgacccgggagttcctgaagagcctgaggaagccctttggagacttcatggagcccaagtttgaatttgctgtgaagttcaatgccctggagctggatgacagcgacctggccatcttcatcgctgtgatcatcctgagcggggaccggcccggcctgctgaatgtgaagcccatcgaggacatccaggacaacctgctgcaggccctggagctgcagctgaagctgaaccaccctgagagcagccagctgtttgccaagctgctgcagaagatgacagacctgcggcagatcgtgacagaacatgtgcagctgctgcaggtgatcaagaagacagaaacagacatgagcctgcaccccctgctgcaggagatctacaaggacctgtactag

SEQ ID NO: 163662 - DNA, 753 bp, synthetic construct
  misc_feature 1..753: note = Description of Artificial Sequence: Synthetic coding sequence
  source 1..753: mol_type = other DNA
atgaccatggtggacacagagatgcccttctggcccaccaactttggcatcagctctgtggacctgtctgtgatggaggaccacagccacagctttgacatcaagcccttcaccaccgtggacttcagcagcatcagcaccccccactatgaggacatccccttcaccaggacagatcctgtggtggccgactacaagtatgacctgaagctgcaggagtaccagagcgccatcaaggtggagcccgccagccccccctactacagcgagaagacccagctgtacaacaagccccatgaggagcccagcaacagcctgatggccatcgagtgccgggtgtgtggggacaaggccagcggcttccactatggagtgcacgcctgtgagggctgcaagggcttcttccggaggaccatccggctgaagctgatctatgacagatgtgacctgaactgccgcatccacaagaagagcaggaacaagtgccagtactgccgcttccagaagtgcctggccgtgggcatgagccacaatgccatccgcttcggccgcatgccccaggccgagaaggagaagctgctggccgagatcagcagtgacatcgaccagctgaaccctgagagcgctgacctgcgggccctggccaagcacctgtatgacagctacatcaagagcttccccctgaccaaggccaaggcccgggccatcctgaccgggaagaccacagacaagagcacagcccaggtgtgctag

SEQ ID NO: 163663 - DNA, 1434 bp, synthetic construct; identical to SEQ ID NO: 163661
  misc_feature 1..1434: note = Description of Artificial Sequence: Synthetic coding sequence
  source 1..1434: mol_type = other DNA

SEQ ID NO: 163664 - DNA, 1434 bp, synthetic construct; identical to SEQ ID NO: 163661
  misc_feature 1..1434: note = Description of Artificial Sequence: Synthetic coding sequence
  source 1..1434: mol_type = other DNA

SEQ ID NO: 163665 - DNA, 1434 bp, synthetic construct; identical to SEQ ID NO: 163661
  misc_feature 1..1434: note = Description of Artificial Sequence: Synthetic coding sequence
  source 1..1434: mol_type = other DNA

SEQ ID NO: 163666 - DNA, 1452 bp, synthetic construct
  misc_feature 1..1452: note = Description of Artificial Sequence: Synthetic coding sequence
  source 1..1452: mol_type = other DNA
atgaagggcttcagcgagatgaccatggtggacacagagatgcccttctggcccaccaactttggcatcagctctgtggacctgtctgtgatggaggaccacagccacagctttgacatcaagcccttcaccaccgtggacttcagcagcatcagcaccccccactatgaggacatccccttcaccaggacagatcctgtggtggccgactacaagtatgacctgaagctgcaggagtaccagagcgccatcaaggtggagcccgccagccccccctactacagcgagaagacccagctgtacaacaagccccatgaggagcccagcaacagcctgatggccatcgagtgccgggtgtgtggggacaaggccagcggcttccactatggagtgcacgcctgtgagggctgcaagggcttcttccggaggaccatccggctgaagctgatctatgacagatgtgacctgaactgccgcatccacaagaagagcaggaacaagtgccagtactgccgcttccagaagtgcctggccgtgggcatgagccacaatgccatccgcttcggccgcatgccccaggccgagaaggagaagctgctggccgagatcagcagtgacatcgaccagctgaaccctgagagcgctgacctgcgggccctggccaagcacctgtatgacagctacatcaagagcttccccctgaccaaggccaaggcccgggccatcctgaccgggaagaccacagacaagagcccctttgtgatctatgacatgaacagcctgatgatgggagaggacaagatcaagttcaagcacatcacccccctgcaggagcagagcaaggaggtggccatccgcatcttccagggctgccagttccgctctgtggaggccgtgcaggagatcacagaatatgccaagagcatccctggctttgtgaacctggacctgaatgaccaggtgaccctgctgaagtatggagtgcatgagatcatctacaccatgctggccagcctgatgaacaaggatggagtgctgatcagcgagggccagggcttcatgacccgggagttcctgaagagcctgaggaagccctttggagacttcatggagcccaagtttgaatttgctgtgaagttcaatgccctggagctggatgacagcgacctggccatcttcatcgctgtgatcatcctgagcggggaccggcccggcctgctgaatgtgaagcccatcgaggacatccaggacaacctgctgcaggccctggagctgcagctgaagctgaaccaccctgagagcagccagctgtttgccaagctgctgcagaagatgacagacctgcggcagatcgtgacagaacatgtgcagctgctgcaggtgatcaagaagacagaaacagacatgagcctgcaccccctgctgcaggagatctacaaggacctgtactag

SEQ ID NO: 163667 - DNA, 399 bp, synthetic construct
  misc_feature 1..399: note = Description of Artificial Sequence: Synthetic coding sequence
  source 1..399: mol_type = other DNA
atgaccatggtggacacagagatgcccttctggcccaccaactttggcatcagctctgtggacctgtctgtgatggaggaccacagccacagctttgacatcaagcccttcaccaccgtggacttcagcagcatcagcaccccccactatgaggacatccccttcaccaggacagatcctgtggtggccgactacaagtatgacctgaagctgcaggagtaccagagcgccatcaaggtggagcccgccagccccccctactacagcgagaagacccagctgtacaacaagccccatgaggagcccagcaacagcctgatggccatcgagtgccgggtgtgtggggacaaggccagcggcttccactatggagtgcacgcctgtgagggctgcaagtag

SEQ ID NO: 163668 - DNA, 300 bp, synthetic construct
  misc_feature 1..300: note = Description of Artificial Sequence: Synthetic coding sequence
  source 1..300: mol_type = other DNA
atgaccatggtggacacagagatgcccttctggcccaccaactttggcatcagctctgtggacctgtctgtgatggaggaccacagccacagctttgacatcaagcccttcaccaccgtggacttcagcagcatcagcaccccccactatgaggacatccccttcaccaggacagatcctgtggtggccgactacaagtatgacctgaagctgcaggagtaccagagcgccatcaaggtggagcccgccagccccccctactacagcgagaagacccagctgtacaacaagccccactag

SEQ ID NO: 163669 - DNA, 132 bp, synthetic construct
  misc_feature 1..132: note = Description of Artificial Sequence: Synthetic coding sequence
  source 1..132: mol_type = other DNA
atgaccatggtggacacagagatgcccttctggcccaccaactttggcatcagctctgtggacctgtctgtgatggaggaccacagccacagctttgacatcaagcccttcaccaccgtggacttctcctag

SEQ ID NO: 163670 - DNA, 747 bp, synthetic construct
  misc_feature 1..747: note = Description of Artificial Sequence: Synthetic coding sequence
  source 1..747: mol_type = other DNA
atggtggacacagagatgcccttctggcccaccaactttggcatcagctctgtggacctgtctgtgatggaggaccacagccacagctttgacatcaagcccttcaccaccgtggacttcagcagcatcagcaccccccactatgaggacatccccttcaccaggacagatcctgtggtggccgactacaagtatgacctgaagctgcaggagtaccagagcgccatcaaggtggagcccgccagccccccctactacagcgagaagacccagctgtacaacaagccccatgaggagcccagcaacagcctgatggccatcgagtgccgggtgtgtggggacaaggccagcggcttccactatggagtgcacgcctgtgagggctgcaagggcttcttccggaggaccatccggctgaagctgatctatgacagatgtgacctgaactgccgcatccacaagaagagcaggaacaagtgccagtactgccgcttccagaagtgcctggccgtgggcatgagccacaatgccatccgcttcggccgcatgccccaggccgagaaggagaagctgctggccgagatcagcagtgacatcgaccagctgaaccctgagagcgctgacctgcgggccctggccaagcacctgtatgacagctacatcaagagcttccccctgaccaaggccaaggcccgggccatcctgaccgggaagaccacagacaagagcacagcccaggtgtgctag

SEQ ID NO: 163671 - DNA, 2955 bp, synthetic construct
  misc_feature 1..2955: note = Description of Artificial Sequence: Synthetic coding sequence
  source 1..2955: mol_type = other DNA
atggctggaaatgactgtggggccctgctggatgaggagctgagcagcttcttcctgaactacctggccgacacccagggcggcggcagcggggaggagcagctgtatgctgacttccctgagctggacctgagccagctggatgccagtgactttgacagcgccacctgcttcggggagctgcagtggtgcccagagaacagcgagacagagcccaaccagtacagcccagatgacagcgagctgttccagattgattctgaaaatgaggccctgctggccgagctgaccaagaccctggatgacatcccagaagatgatgtgggcctggccgccttccctgccctggatggaggagatgccctgagctgcaccagcgccagccctgcccccagcagcgccccacccagccctgcccctgagaagcccagcgccccagcccctgaggtggatgagctgagcctggccgacagcacccaggacaagaaggcccccatgatgcagagccagagccgcagctgcacagagctgcacaagcacctgaccagcgcccagtgctgcctgcaggaccggggcctgcagcccccctgcctgcagagcccccggctgcctgccaaggaggacaaggagcctggagaggactgccccagcccccagcctgccccagccagcccccgggacagcctggccctgggccgggctgaccccggggcccctgtgtcccaggaggacatgcaggccatggtgcagctgatccgctacatgcacacctactgcctgccccagaggaagctgcccccccagaccccagagcccctgcccaaggcctgcagcaaccccagccagcaggtgcgcagccggccctggagccgccaccacagcaaggcctcctgggccgagttcagcatcctgcgggagctgctggcccaggatgtgctgtgtgatgtgtccaagccctaccgcctggccacccctgtgtatgccagcctgacccccaggagccggccccggccccccaaggacagccaggccagccctggccggcccagctctgtggaggaggtgagaattgctgccagccccaagagcacaggcccccggcccagcctgcggcccctgcggctggaggtgaagcgggaggtgcggcggcctgcccggctgcagcagcaggaggaggaggatgaggaggaggaggaggaggaggaggaggaggagaaggaggaggaggaggagtggggcaggaagaggcctggccggggcctgccctggaccaagctgggcaggaagctggagagctctgtgtgccctgtgcggcgcagccggcggctgaaccctgagctgggcccctggctgacctttgctgatgagcccctggtgcccagcgagccccagggcgccctgcccagcctgtgcctggcccccaaggcctatgatgtggagcgggagctgggcagccccacagatgaagattctggccaggaccagcagctgctgcggggcccccagatcccagccctggagagcccctgtgagagcggctgtggggacatggatgaggaccccagctgcccccagctgcccccccgggacagcccccgctgcctgatgctggccctgagccagagcgaccccaccttcggcaagaagagctttgagcagaccctgactgtggagctgtgtggcacagctggcctgaccccacccaccaccccaccctacaagcccacagaggaggaccccttcaagccagacatcaagcacagcctgggcaaggagatcgccctgagcctgcccagccctgagggcctgagcctgaaggccaccccaggagctgcccacaagctgcccaagaagcaccctgagaggtctgagctgctgagccacctgcggcatgccacagcccagcctgccagccaggccggccagaagaggcccttcagctgcagctttggagaccatgactactgccaggtgctgcggcctgagggcgtgctgcagaggaaggtgctgcgctcctgggagcccagcggcgtgcacctggaggactggccccagcagggcgccccctgggccgaggcccaggcccctggccgggaggaggacaggagctgtgatgctggggccccacccaaggacagcaccctgctgcgggaccacgagatccgggccagcctgaccaagcacttcggcctgctggagacagccctggaggaggaggacctggccagctgcaagagcccagaatatgacacagtgtttgaggacagcagcagcagcagcggggagagcagcttcctgcctgaggaggaggaggaggagggggaggaggaggaggaggatgatgaggaggaggacagcggcgtgagccccacctgcagcgaccactgcccctaccagagcccccccagcaaggccaaccggcagctgtgcagccgcagccgcagcagcagcggcagcagcccctgccacagctggagccctgccaccaggaggaacttccgctgtgagagccggggcccctgcagcgacaggacccccagcatcagacatgccaggaagaggcgggagaaggccatcggggagggccgggtggtgtacatccagaacctgagcagtgacatgagcagccgggagctgaagagaagatttgaggtgtttggagaaattgaagaatgtgaggtgctgaccaggaacagaagaggagagaagtatggcttcatcacctaccgctgcagcgagcacgccgccctgagcctgaccaagggagctgccctgaggaagagaaatgagcccagcttccagctgtcctatggaggcctgcggcacttctgctggccccgctacacagattatgacagcaacagcgaggaggccctgcctgccagcggcaagagcaaatatgaggccatggactttgacagcctgctgaaggaggcccagcagagcctgcactag

SEQ ID NO: 163672 - DNA, 2880 bp, synthetic construct
  misc_feature 1..2880: note = Description of Artificial Sequence: Synthetic coding sequence
  source 1..2880: mol_type = other DNA
atgggcggcggcagcggggaggagcagctgtatgctgacttccctgagctggacctgagccagctggatgccagtgactttgattctgccacctgctttggagagctgcagtggtgcccagaaaattctgaaacagagcccaaccagtacagcccagatgattctgagctgttccagattgacagtgaaaatgaggccctgctggccgagctgaccaagaccctggatgacatcccagaagatgatgtgggcctggccgccttccctgccctggatggaggagatgccctgagctgcaccagcgccagccctgcccccagcagcgccccacccagccctgcccctgagaagcccagcgccccagcccctgaggtggatgagctgagcctggccgacagcacccaggacaagaaggcccccatgatgcagagccagagccgcagctgcacagagctgcacaagcacctgaccagcgcccagtgctgcctgcaggaccggggcctgcagcccccctgcctgcagagcccccggctgcctgccaaggaggacaaggagcccggggaggactgccccagcccccagcctgccccagccagcccccgggacagcctggccctgggccgggctgaccccggggcccctgtgtcccaggaggacatgcaggccatggtgcagctgatccgctacatgcacacctactgcctgccccagaggaagctgcccccccagaccccagagcccctgcccaaggcctgcagcaaccccagccagcaggtgcgcagccggccctggagccgccaccacagcaaggcctcctgggccgagttcagcatcctgcgggagctgctggcccaggatgtgctgtgtgatgtgtccaagccctaccgcctggccacccctgtgtatgccagcctgacccccaggagccggcccaggcctcccaaggacagccaggccagccctggccggcccagctctgtggaggaggtgagaattgctgccagccccaagagcacaggcccccggcccagcctgcggcccctgcggctggaggtgaagcgggaggtgagaagacctgcccggctgcagcagcaggaggaggaggatgaggaggaggaggaggaggaggaggaggaggagaaggaggaggaggaggagtggggcaggaagaggcctggccggggcctgccctggaccaagctgggcaggaagctggagagctctgtgtgccctgtgagaagaagccggcggctgaaccctgagctgggcccctggctgacctttgctgatgagcccctggtgcccagcgagccccagggcgccctgcccagcctgtgcctggcccccaaggcctatgatgtggagcgggagctgggcagccccacagatgaggacagcggccaggaccagcagctgctgcggggcccccagatcccagccctggagagcccctgtgagagcggctgtggggacatggatgaggaccccagctgcccccagctgcccccccgggacagcccccgctgcctgatgctggccctgagccagagcgaccccaccttcggcaagaagagctttgagcagaccctgactgtggagctgtgtggcacagctggcctgaccccacccaccaccccaccctacaagcccacagaggaggaccccttcaagccagacatcaagcacagcctgggcaaggagatcgccctgagcctgcccagccctgagggcctgagcctgaaggccacccctggggccgcccacaagctgcccaagaagcaccctgagaggtctgagctgctgagccacctgcggcatgccacagcccagcctgccagccaggccggccagaagaggcccttcagctgcagctttggagaccatgactactgccaggtgctgcggcctgagggcgtgctgcagaggaaggtgctgcgctcctgggagcccagcggcgtgcacctggaggactggccccagcagggcgccccctgggccgaggcccaggcccctggccgggaggaggacaggagctgtgatgctggggccccacccaaggacagcaccctgctgcgggaccacgagatccgggccagcctgaccaagcacttcggcctgctggagacagccctggaggaggaggacctggccagctgcaagagcccagaatatgacacagtgtttgaggacagcagcagcagcagtggagagagcagcttcctgcctgaggaggaggaggaggagggggaggaggaggaggaggatgatgaggaggaggacagcggcgtgagccccacctgcagcgaccactgcccctaccagagcccccccagcaaggccaaccggcagctgtgcagccgcagccgcagcagcagcggcagcagcccctgccacagctggagccctgccaccaggaggaacttccgctgtgagagccggggcccctgcagcgacaggacccccagcatcagacatgccaggaagagaagagagaaggccatcggggagggccgggtggtgtacatccagaacctgagcagtgacatgagcagccgggagctgaagagaagatttgaggtgtttggagaaattgaggagtgtgaggtgctgaccaggaacagaagaggagagaagtatggcttcatcacctaccgctgcagcgagcacgccgccctgagcctgaccaagggggccgccctgaggaagagaaatgagcccagcttccagctgtcctatggaggcctgcggcacttctgctggccccgctacacagattatgacagcaacagcgaggaggccctgcctgccagcggcaagagcaaatatgaggccatggactttgacagcctgctgaaggaggcccagcagagcctgcactag

SEQ ID NO: 163673 - DNA, 2397 bp, synthetic construct
  misc_feature 1..2397: note = Description of Artificial Sequence: Synthetic coding sequence
  source 1..2397: mol_type = other DNA
atggcctgggacatgtgcaaccaggacagcgagagcgtgtggagcgacattgaatgtgccgccctggtgggggaggaccagcccctgtgcccagacctgcctgagctggacctgtctgagctggatgtgaatgacctggacacagacagcttcctgggcggcctgaagtggtgcagcgaccagagcgagatcatcagcaaccagtacaacaatgagcccagcaacatctttgagaagattgatgaagaaaatgaggccaacctgctggccgtgctgacagagaccctggacagcctgcctgtggatgaagatggcctgcccagctttgatgccctgacagatggagatgtgaccacagacaatgaggccagccccagctccatgccagatggcaccccaccaccccaggaggccgaggagcccagcctgctgaagaagctgctgctggccccagccaacacccagctgagctacaatgaatgttctggcctgagcacccagaaccacgccaaccacaaccaccgcatccgcaccaacccagccatcgtgaagacagagaacagctggagcaacaaggccaagagcatctgccagcagcagaagccccagaggcggccctgcagcgagctgctgaagtacctgaccaccaatgatgaccccccccacaccaagcccacagaaaatagaaacagcagccgggacaagtgcaccagcaagaagaagagccacacccagagccagagccagcacctgcaggccaagcccaccaccctgagcctgcccctgaccccagagagccccaatgaccccaagggcagcccctttgagaacaagaccatcgagaggaccctgtctgtggagctgtctggaacagctggcctgaccccacccaccaccccaccccacaaggccaaccaggacaaccccttccgggccagccccaagctgaagagcagctgcaagacagtggtgcccccacccagcaagaagccccgctacagcgagagcagcggcacccagggcaacaacagcaccaagaagggccctgagcagagcgagctgtatgcccagctgagcaagagctctgtgctgactggaggccacgaggagaggaagaccaagaggcccagcctgcggctgtttggagaccatgactactgccagagcatcaacagcaagacagagatcctgatcaacatcagccaggagctgcaggacagccggcagctggagaacaaggatgtgtccagtgactggcagggccagatctgcagcagcacagacagcgaccagtgctacctgcgggagaccctggaggccagcaagcaggtgagcccctgcagcaccaggaagcagctgcaggaccaggagatccgggcagagctgaacaagcacttcggccaccccagccaggccgtgtttgatgatgaggccgacaagacaggagagctgcgggacagcgacttcagcaatgagcagttcagcaagctgcccatgttcatcaacagcggcctggccatggatggcctgtttgatgacagtgaagatgaaagtgacaagctgagctacccctgggatggcacccagagctacagcctcttcaacgtgagccccagctgcagcagcttcaacagcccctgccgggacagcgtgtccccacccaagagcctcttcagccagaggccccagaggatgaggagccgcagccgctccttcagccgccacaggagctgcagccgcagcccctacagccgcagccgcagccgcagccctggcagccgcagcagcagccgcagctgctactactatgagagcagccactaccgccacaggacccacaggaacagccccctgtatgtgcgcagccgcagccgcagcccctacagccggcggcccaggtatgacagctatgaggagtaccagcacgagcggctgaagcgggaggagtacagaagagaatatgagaagcgggagagcgagcgggccaagcagcgggagcggcagaggcagaaggccatcgaggagcggcgggtcatctacgtgggcaagatccggccagacaccaccaggacagagctgcgggacagatttgaggtgtttggagaaattgaagaatgtactgtgaacctgagagatgatggagacagctatggcttcatcacctaccgctacacctgtgatgcctttgctgccctggagaatggctacaccctgcggcgcagcaatgaaacagactttgagctgtacttctgtggcaggaagcagttcttcaagagcaactatgctgacctggacagcaacagtgatgactttgatcctgccagcaccaagagcaaatatgacagcctggactttgacagcctgctgaaggaggcccagaggagcctgcggaggtag

SEQ ID NO: 163674 - DNA, 3072 bp, synthetic construct
  misc_feature 1..3072: note = Description of Artificial Sequence: Synthetic coding sequence
  source 1..3072: mol_type = other DNA
atggctggaaatgactgtggggccctgctggatgaggagctgagcagcttcttcctgaactacctggccgacacccagggcggcggcagcggggaggagcagctgtatgctgacttccctgagctggacctgagccagctggatgccagtgactttgacagcgccacctgcttcggggagctgcagtggtgcccagagaacagcgagacagagcccaaccagtacagcccagatgacagcgagctgttccagattgattctgaaaatgaggccctgctggccgagctgaccaagaccctggatgacatcccagaagatgatgtgggcctggccgccttccctgccctggatggaggagatgccctgagctgcaccagcgccagccctgcccccagcagcgccccacccagccctgcccctgagaagcccagcgccccagcccctgaggtggatgagctgagcctgctgcagaagctgctgctggccaccagctaccccaccagcagcagtgacacccagaaggagggcacagcctggaggcaggccggcctgcggagcaagagccagaggccctgtgtgaaggctgacagcacccaggacaagaaggcccccatgatgcagagccagagccgcagctgcacagagctgcacaagcacctgaccagcgcccagtgctgcctgcaggaccggggcctgcagcccccctgcctgcagagcccccggctgcctgccaaggaggacaaggagcccggggaggactgccccagcccccagcctgccccagccagcccccgggacagcctggccctgggccgggctgaccccggggcccctgtgtcccaggaggacatgcaggccatggtgcagctgatccgctacatgcacacctactgcctgccccagaggaagctgcccccccagaccccagagcccctgcccaaggcctgcagcaaccccagccagcaggtgcgcagccggccctggagccgccaccacagcaaggcctcctgggccgagttcagcatcctgcgggagctgctggcccaggatgtgctgtgtgatgtgtccaagccctaccgcctggccacccctgtgtatgccagcctgacccccaggagccggcccaggcctcccaaggacagccaggccagccctggccggcccagctctgtggaggaggtgagaattgctgccagccccaagagcacaggcccccggcccagcctgcggcccctgcggctggaggtgaagcgggaggtgagaagacctgcccggctgcagcagcaggaggaggaggatgaggaggaggaggaggaggaggaggaggaggagaaggaggaggaggaggagtggggcaggaagaggcctggccggggcctgccctggaccaagctgggcaggaagctggagagctctgtgtgccctgtgagaagaagccggcggctgaaccctgagctgggcccctggctgacctttgctgatgagcccctggtgcccagcgagccccagggcgccctgcccagcctgtgcctggcccccaaggcctatgatgtggagcgggagctgggcagccccacagatgaggacagcggccaggaccagcagctgctgcggggcccccagatcccagccctggagagcccctgtgagagcggctgtggggacatggatgaggaccccagctgcccccagctgcccccccgggacagcccccgctgcctgatgctggccctgagccagagcgaccccaccttcggcaagaagagctttgagcagaccctgactgtggagctgtgtggcacagctggcctgaccccacccaccaccccaccctacaagcccacagaggaggaccccttcaagccagacatcaagcacagcctgggcaaggagatcgccctgagcctgcccagccctgagggcctgagcctgaaggccacccctggggccgcccacaagctgcccaagaagcaccctgagaggtctgagctgctgagccacctgcggcatgccacagcccagcctgccagccaggccggccagaagaggcccttcagctgcagctttggagaccatgactactgccaggtgctgcggcctgagggcgtgctgcagaggaaggtgctgcgctcctgggagcccagcggcgtgcacctggaggactggccccagcagggcgccccctgggccgaggcccaggcccctggccgggaggaggacaggagctgtgatgctggggccccacccaaggacagcaccctgctgcgggaccacgagatccgggccagcctgaccaagcacttcggcctgctggagacagccctggaggaggaggacctggccagctgcaagagcccagaatatgacacagtgtttgaggacagcagcagcagcagtggagagagcagcttcctgcctgaggaggaggaggaggagggggaggaggaggaggaggatgatgaggaggaggacagcggcgtgagccccacctgcagcgaccactgcccctaccagagcccccccagcaaggccaaccggcagctgtgcagccgcagccgcagcagcagcggcagcagcccctgccacagctggagccctgccaccaggaggaacttccgctgtgagagccggggcccctgcagcgacaggacccccagcatcagacatgccaggaagagaagagagaaggccatcggggagggccgggtggtgtacatccagaacctgagcagtgacatgagcagccgggagctgaagagaagatttgaggtgtttggagaaattgaggagtgtgaggtgctgaccaggaacagaagaggagagaagtatggcttcatcacctaccgctgcagcgagcacgccgccctgagcctgaccaagggggccgccctgaggaagagaaatgagcccagcttccagctgtcctatggaggcctgcggcacttctgctggccccgctacacagattatgacagcaacagcgaggaggccctgcctgccagcggcaagagcaaatatgaggccatggactttgacagcctgctgaaggaggcccagcagagcctgcactag

SEQ ID NO: 163675 - DNA, 3054 bp, synthetic construct
  misc_feature 1..3054: note = Description of Artificial Sequence: Synthetic coding sequence
  source 1..3054: mol_type = other DNA
atggctggaaatgactgtggggccctgctggatgaggagctgagcagcttcttcctgaactacctggccgacacccagggcggcggcagcggggaggagcagctgtatgctgacttccctgagctggacctgagccagctggatgccagtgactttgacagcgccacctgcttcggggagctgcagtggtgcccagagaacagcgagacagagcccaaccagtacagcccagatgacagcgagctgttccagattgattctgaaaatgaggccctgctggccgagctgaccaagaccctggatgacatcccagaagatgatgtgggcctggccgccttccctgccctggatggaggagatgccctgagctgcaccagcgccagccctgcccccagcagcgccccacccagccctgcccctgagaagcccagcgccccagcccctgaggtggatgagctgagcctgctgcagaagctgctgctggccaccagctaccccaccagcagcagtgacacccagaaggagggcacagcctggaggcaggccggcctgcggagcaagagccagaggccctgtgtgaaggctgacagcacccaggacaagaaggcccccatgatgcagagccagagccgcagctgcacagagctgcacaagcacctgaccagcgcccagtgctgcctgcaggaccggggcctgcagcccccctgcctgcagagcccccggctgcctgccaaggaggacaaggagcccggggaggactgccccagcccccagcctgccccagccagcccccgggacagcctggccctgggccgggctgaccccggggcccctgtgtcccaggaggacatgcaggccatggtgcagctgatccgctacatgcacacctactgcctgccccagaggaagctgcccccccagaccccagagcccctgcccaaggcctgcagcaaccccagccagcaggtgcgcagccggccctggagccgccaccacagcaaggcctcctgggccgagttcagcatcctgcgggagctgctggcccaggatgtgctgtgtgatgtgtccaagccctaccgcctggccacccctgtgtatgccagcctgacccccaggagccggcccaggcctcccaaggacagccaggccagccctggccggcccagctctgtggaggaggtgagaattgctgccagccccaagagcacaggcccccggcccagcctgcggcccctgcggctggaggtgaagcgggaggtgagaagacctgcccggctgcagcagcaggaggaggaggatgaggaggaggaggaggaggaggaggaggaggagaaggaggaggaggaggagtggggcaggaagaggcctggccggggcctgccctggaccaagctgggcaggaagctggagagctctgtgtgccctgtgagaagaagccggcggctgaaccctgagctgggcccctggctgacctttgctgatgagcccctggtgcccagcgagccccagggcgccctgcccagcctgtgcctggcccccaaggcctatgatgtggagcgggagctgggcagccccacagatgaggacagcggccaggaccagcagctgctgcggggcccccagatcccagccctggagagcccctgtgagagcggctgtggggacatggatgaggaccccagctgcccccagctgcccccccgggacagcccccgctgcctgatgctggccctgagccagagcgaccccaccttcggcaagaagagctttgagcagaccctgactgtggagctgtgtggcacagctggcctgaccccacccaccaccccaccctacaagcccacagaggaggaccccttcaagccagacatcaagcacagcctgggcaaggagatcgccctgagcctgcccagccctgagggcctgagcctgaaggccacccctggggccgcccacaagctgcccaagaagcaccctgagaggtctgagctgctgagccacctgcggcatgccacagcccagcctgccagccaggccggccagaagaggcccttcagctgcagctttggagaccatgactactgccaggtgctgcggcctgagggcgtgctgcagaggaaggtgctgcgctcctgggagcccagcggcgtgcacctggaggactggccccagcagggcgccccctgggccgaggcccaggcccctggccgggaggaggacaggagctgtgatgctggggccccacccaaggacagcaccctgctgcgggaccacgagatccgggccagcctgaccaagcacttcggcctgctggagacagccctggaggaggaggacctggccagctgcaagagcccagaatatgacacagtgtttgaggacagcagcagcagcagtggagagagcagcttcctgcctgaggaggaggaggaggagggggaggaggaggaggaggatgatgaggaggaggacagcggcgtgagccccacctgcagcgaccactgcccctaccagagcccccccagcaaggccaaccggcagctgtgcagccgcagccgcagcagcagcggcagcagcccctgccacagctggagccctgccaccaggaggaacttccgctgtgagagccggggcccctgcagcgacaggacccccagcatcagacatgccaggaagagaagagagaaggccatcggggagggccgggtggtgtacatccagaacctgagcagtgacatgagcagccgggagctgaagagaagatttgaggtgtttggagaaattgaggagtgtgaggtgctgaccaggaacagaagaggagagaagtatggcttcatcacctaccgctgcagcgagcacgccgccctgagcctgaccaagggggccgccctgaggaagagaaatgagcccagcttccagctgtcctatggaggcctgcggcacttctgctggccccgctacacagattatggcaagcccctgaagcccagccacagcctggtgcggctgaaggcctgggaggccgtgcccagcctgaacaagacccagagctag

SEQ ID NO: 163676 - DNA, 471 bp, synthetic construct
  misc_feature 1..471: note = Description of Artificial Sequence: Synthetic coding sequence
  source 1..471: mol_type = other DNA
atggctgtgggcaagttcctgctgggcagcctgctgctgctgagcctgcagctgggccagggctggggcccagatgcccggggcgtgcctgtggctgatggagagttcagcagcgagcaggtggccaaggccggcggcacctggctgggcacccaccggcccctggcccggctgcggcgggccctgagcggcccctgccagctgtggagcctgaccctgtctgtggccgagctgggcctgggctacgccagcgaggagaaggtgatcttccgctactgtgccggcagctgccccaggggggcccggacccagcacggcctggccctggcccggctgcagggccagggccgggcccatggaggcccctgctgccggcccacccgctacacagatgtggccttcctggatgacagacaccgctggcagaggctgccccagctgtctgctgctgcctgtggctgcggcggctag

SEQ ID NO: 163677 - DNA, 1422 bp, synthetic construct
  misc_feature 1..1422: note = Description of Artificial Sequence: Synthetic coding sequence
  source 1..1422: mol_type = other DNA
atgggccagagcggccgcagccgccaccagaagagggcccgggcccaggcccagctgaggaacctggaggcctatgctgccaacccccacagctttgtgttcacccggggctgcacaggaagaaacatccggcagctgagcctggatgtgagaagagtgatggagcccctgacagccagccggctgcaggtgaggaagaagaacagcctgaaggactgtgtggccgtggccggccccctgggcgtgacccacttcctgatcctgagcaagacagagaccaacgtgtacttcaagctgatgaggctgcccggcggccccaccctgaccttccaggtgaagaagtacagcctggtgagagatgtggtgagcagcctgcggcggcacaggatgcatgagcagcagtttgcccacccccccctgctggtgctgaacagctttggcccccacggcatgcacgtgaagctgatggccaccatgttccagaacctcttccccagcatcaacgtgcacaaggtgaacctgaacaccatcaagcgctgcctgctgattgactacaacccagacagccaggagctggacttccgccactacagcatcaaggtggtgcctgtgggcgccagccggggcatgaagaagctgctgcaggagaagttccccaacatgagccggctgcaggacatcagcgagctgctggccactggagctggcctgtctgagagcgaggccgagccagatggagaccacaacatcacagagctgccccaggccgtggccggccggggcaacatgagggcccagcagagcgctgtgcggctgacagaaattggccccaggatgaccctgcagctgatcaaggtgcaggagggcgtgggggagggcaaggtgatgttccacagctttgtgtccaagacagaggaggagctgcaggccatcctggaggccaaggagaagaagctgcggctgaaggcccagaggcaggcccagcaggcccagaatgtgcagaggaagcaggagcagcgggaggcccacaggaagaagagcctggagggcatgaagaaggcccgggtgggcggcagtgatgaggaggccagcggcatccccagcaggacagccagcctggagctgggagaagatgatgatgagcaggaggatgatgacatcgagtacttctgccaggccgtgggggaggcccccagcgaggacctcttccctgaggccaagcagaagaggctggccaagagccctggcaggaagaggaagcgctgggagatggaccggggccggggccgcctgtgtgaccagaagttccccaagaccaaggacaagagccagggcgcccaggcccggcggggccccaggggggccagcagagatggcggccggggccggggccggggccggcctgggaagagggtggcctag

SEQ ID NO: 163678 - DNA, 1383 bp, synthetic construct
  misc_feature 1..1383: note = Description of Artificial Sequence: Synthetic coding sequence
  source 1..1383: mol_type = other DNA
atgggccagagcggccgcagccgccaccagaagagggcccgggcccaggcccagctgaggaacctggaggcctatgctgccaacccccacagctttgtgttcacccggggctgcacaggaagaaacatccggcagctgagcctggatgtgagaagagtgatggagcccctgacagccagccggctgcaggtgaggaagaagaacagcctgaaggactgtgtggccgtggccggccccctgggcgtgacccacttcctgatcctgagcaagacagagaccaacgtgtacttcaagctgatgaggctgcccggcggccccaccctgaccttccaggtgaagaagtacagcctggtgagagatgtggtgagcagcctgcggcggcacaggatgcatgagcagcagtttgcccacccccccctgctggtgctgaacagctttggcccccacggcatgcacgtgaagctgatggccaccatgttccagaacctcttccccagcatcaacgtgcacaaggtgaacctgaacaccatcaagcgctgcctgctgattgactacaacccagacagccaggagctggacttccgccactacagcatcaaggtggtgcctgtgggcgccagccggggcatgaagaagctgctgcaggagaagttccccaacatgagccggctgcaggacatcagcgagctgctggccactggagctggcctgtctgagagcgaggccgagccagatggagaccacaacatcacagagctgccccaggccgtggccggccggggcaacatgagggcccagcagagcgctgtgcggctgacagaaattggccccaggatgaccctgcagctgatcaaggtgcaggagggcgtgggggagggcaaggtgatgttccacagctttgtgtccaagacagaggaggagctgcaggccatcctggaggccaaggagaagaagctgcggctgaaggcccagaggcaggcccagcaggcccagaatgtgcagaggaagcaggagcagcgggaggcccacaggaagaagagcctggagggcatgaagaaggcccgggtgggcggcagtgatgaggaggccagcggcatccccagcaggacagccagcctggagctgggagaagatgatgatgagcaggaggatgatgacatcgagtacttctgccaggccgtgggggaggcccccagcgaggacctcttccctgaggccaagcagaagaggctggccaagagccctggcaggaagaggaagcgctgggagatggaccggggccggggccgcctgtgtgaccagaagttccccaagaccaaggacaagagccaggacggcggccggggccggggccggggccggcctgggaagagggtggcctag

SEQ ID NO: 163679 - DNA, 2385 bp, synthetic construct
  misc_feature 1..2385: note = Description of Artificial Sequence: Synthetic coding sequence
  source 1..2385: mol_type = other DNA
atgggccagagcggccgcagccgccaccagaagagggcccgggcccaggcccagctgaggaacctggaggcctatgctgccaacccccacagctttgtgttcacccggggctgcacaggaagaaacatccggcagctgagcctggatgtgagaagagtgatggagcccctgacagccagccggctgcaggtgaggaagaagaacagcctgaaggactgtgtggccgtggccggccccctgggcgtgacccacttcctgatcctgagcaagacagagaccaacgtgtacttcaagctgatgaggctgcccggcggccccaccctgaccttccaggtgaagaagtacagcctggtgagagatgtggtgagcagcctgcggcggcacaggatgcatgagcagcagtttgcccacccccccctgctggtgctgaacagctttggcccccacggcatgcacgtgaagctgatggccaccatgttccagaacctcttccccagcatcaacgtgcacaaggtgaacctgaacaccatcaagcgctgcctgctgattgactacaacccagacagccaggagctggacttccgccactacagcatcaaggtggtgcctgtgggcgccagccggggcatgaagaagctgctgcaggagaagttccccaacatgagccggctgcaggacatcagcgagctgctggccactggagctggcctgtctgagagcgaggccgagccagatggagaccacaacatcacagagctgccccaggccgtggccggccggggcaacatgagggcccagcagagcgctgtgcggctgacagaaattggccccaggatgaccctgcagctgatcaaggtgcaggagggcgtgggggagggcaaggtgatgttccacagctttgtgtccaagacagaggaggagctgcaggccatcctggaggccaaggagaagaagctgcggctgaaggcccagaggcaggcccagcaggcccagaatgtgcagaggaagcaggagcagcgggaggcccacaggaagaagagcctggagggcatgaagaaggcccgggtgggcggcagtgatgaggaggccagcggcatccccagcaggacagccagcctggagctgggagaagatgatgatgagcaggaggatgatgacatcgagtacttctgccaggccgtgggggaggcccccagcgaggacctcttccctgaggccaagcagaagaggctggccaagagccctggcaggaagaggaagcgctgggagatggacagaggagccaagagctgcccagccaacttcctggccgctgctgatgacaagctgagcggcttccagggcgacttcctgtggcccatcctggtggtggagttcctggtggccgtggccagcaatggcctggccctgtaccgcttcagcatcaggaagcagaggccctggcaccctgctgtggtgttttctgtgcagctggccgtgtctgacctgctgtgtgccctgaccctgccccccctggccgcctacctgtacccacccaagcactggaggtatggagaggccgcctgccgcctggagcgcttcctgttcacctgcaacctgctgggcagcgtcatcttcatcacctgcatcagcctgaaccgctacctgggcatcgtgcaccccttctttgcccggagccacctgcggcccaagcacgcctgggccgtgtctgctgctggctgggtgctggccgccctgctggccatgcccaccctgtccttcagccacctgaagaggccccagcagggcgccggcaactgcagcgtggcccggcctgaggcctgcatcaagtgcctgggcacagctgaccacggcctggccgcctaccgggcctacagcctggtgctggccggcctgggctgcggcctgcccctgctgctgaccctggccgcctatggagccctgggccgggctgtgctgcggagccctggcatgacagtggccgagaagctgcgggtggccgccctggtggccagcggcgtggccctgtatgccagcagctatgtgccctaccacatcatgagggtgctgaatgtggatgcccggcggcgctggagcacccgctgccccagctttgctgacatcgcccaggccacagctgccctggagctgggcccctacgtgggctaccaggtgatgaggggcctgatgcccctggccttctgtgtgcaccccctgctgtacatggctgctgtgcccagcctgggctgctgctgccgccactgccccggctacagagacagctggaacccagaagatgccaagagcacaggccaggccctgcccctgaatgccacagctgcccccaagcccagcgagccccagagccgggagctgagccagtag

SEQ ID NO: 163680 - DNA, 1374 bp, synthetic construct
  misc_feature 1..1374: note = Description of Artificial Sequence: Synthetic coding sequence
  source 1..1374: mol_type = other DNA
atggcccagcccccccggctgagccgcagcggggccagcagcctgtgggaccctgccagccctgcccccaccagcggcccccggccccggctgtgggagggccaggatgtgctggcccgctggacagatggcctgctgtacctgggcaccatcaagaaggtggacagcgcccgggaggtgtgcctggtgcagtttgaagatgacagccagttcctggtgctgtggaaggacatcagccctgctgccctgcccggggaggagctgctgtgctgcgtgtgccgctcagaaacagtggtgcccggcaaccggctggtgtcctgtgagaagtgcagacatgcctaccaccaggactgccacgtgccccgggccccagcccctggagagggggagggcacctcctgggtgtgccggcagtgtgtgtttgccatcgccaccaagaggggcggggccctgaagaagggcccctatgcccgggccatgctgggcatgaagctgagcctgccctacggcctgaagggcctggactgggatgctggccacctgagcaaccggcagcagagctactgctactgcggcggccctggagagtggaacctgaagatgctgcagtgccgcagctgcctgcagtggttccacgaggcctgcacccagtgcctgagcaagcccctgctgtatggagaccgcttctatgaatttgagtgctgcgtgtgccggggcggccctgagaaggtgcggcggctgcagctgcgctgggtggatgtggcccacctggtgctgtaccacctgtctgtgtgctgcaagaagaagtactttgattttgaccgggagatcctgcccttcaccagcgagaactgggacagcctgctgctgggggagctgagtgacacccccaagggggagaggagcagccggctgctgagcgccctgaacagccacaaggaccgcttcatcagcggccgggagatcaagaagaggaagtgcctgtttggcctgcacgccaggatgcctcctcctgtggagcccccaactggagatggagccctgaccagggctggcccctggggccggggcctgaccagccctggagaggcccctgaggccggggcccgggcccctgaggaggaggccgagggggagagcggcggggccggggccaccctgagcagcgcccagagcgcccgggcccctggagctgagggcgccggcagcagcgctgagggcacagctgctgcccccagcggctgcctgctgcccagcaccctgctgcctgccccccagggccccctgggcaccgtggacccccagacaggccacccctggaacttcaccctggtgagcccccagaccagcctgaaggtgccccccaccaggtag

SEQ ID NO: 163681 - DNA, 1704 bp, synthetic construct
  misc_feature 1..1704: note = Description of Artificial Sequence: Synthetic coding sequence
  source 1..1704: mol_type = other DNA
atggcccagcccccccggctgagccgcagcggggccagcagcctgtgggaccctgccagccctgcccccaccagcggcccccggccccggctgtgggagggccaggatgtgctggcccgctggacagatggcctgctgtacctgggcaccatcaagaaggtggacagcgcccgggaggtgtgcctggtgcagtttgaagatgacagccagttcctggtgctgtggaaggacatcagccctgctgccctgcccggggaggagctgctgtgctgcgtgtgccgctcagaaacagtggtgcccggcaaccggctggtgtcctgtgagaagtgcagacatgcctaccaccaggactgccacgtgccccgggccccagcccctggagagggggagggcacctcctgggtgtgccggcagtgtgtgtttgccatcgccaccaagaggggcggggccctgaagaagggcccctatgcccgggccatgctgggcatgaagctgagcctgccctacggcctgaagggcctggactgggatgctggccacctgagcaaccggcagcagagctactgctactgcggcggccctggagagtggaacctgaagatgctgcagtgccgcagctgcctgcagtggttccacgaggcctgcacccagtgcctgagcaagcccctgctgtatggagaccgcttctatgaatttgagtgctgcgtgtgccggggcggccctgagaaggtgcggcggctgcagctgcgctgggtggatgtggcccacctggtgctgtaccacctgtctgtgtgctgcaagaagaagtactttgattttgaccgggagatcctgcccttcaccagcgagaactgggacagcctgctgctgggggagctgagtgacacccccaagggggagaggagcagccggctgctgagcgccctgaacagccacaaggaccgcttcatcagcggccgggagatcaagaagaggaagtgcctgtttggcctgcacgccaggatgcctcctcctgtggagcccccaactggagatggagccctgaccagcttccccagcggccagggccctgggggcggcgtgtcccggcccctgggcaagagaagaagacctgagcctgagcccctgcggcggcggcagaagggcaaggtggaggagctgggccccccatctgctgtgaggaaccagcctgagccccaggagcagcgggagcgggcccacctgcagagggccctgcaggcctctgtgagcccccccagccccagccccaaccagagctaccagggcagcagcggctacaacttccggcccacagatgcccgctgcctgcccagcagccccatccgcatgtttgccagcttccaccccagcgccagcacagctggcaccagcggggacagcggccccccagacaggagccccctggagctgcacatcggcttccccacagacatccccaagagcgccccccacagcatgacagccagcagcagctctgtgagcagccccagccctggcctgcccaggagaagtgccccacccagccccctgtgccgcagcctgagccctggcactggaggcggcgtgcggggcggcgtgggctacctgagcagaggagaccctgtgcgggtgctggccaggagagtgcggccagatggctctgtgcagtacctggtggagtggggcggcggcggcatcttctag

SEQ ID NO: 163682 - DNA, 732 bp, synthetic construct
  misc_feature 1..732: note = Description of Artificial Sequence: Synthetic coding sequence
  source 1..732: mol_type = other DNA
tgaagcctgctgctgacagccaccaggacagtgtccttccagggcgagcggctgcggagaggaaatgtgtgcctggtgtccatgctgggctgcctgcccctgtggagccccctgctggagatggagcacagccctggccagggccctgggggcggcgtgtcccggcccctgggcaagagaagaagacctgagcctgagcccctgcggcggcggcagaagggcaaggtggaggagctgggccccccatctgctgtgaggaaccagcctgagccccaggagcagcgggagcgggcccacctgcagagggccctgcaggcctctgtgagcccccccagccccagccccaaccagagctaccagggcagcagcggctacaacttccggcccacagatgcccgctgcctgcccagccccatccgcatgtttgccagcttccaccccagcgccagcacagctggcaccagcggggacagcggccccccagacaggagccccctggagctgcacatcggcttccccacagacatccccaagagcgccccccacagcatgacagccagcagcagctctgtgagcagccccagccctggcctgccccggcgcagcgccccacccagccccctgtgccgcagcctgagccctggcaccggcggcggcgtgcggggcggcgtgggctacctgagcagaggagaccctgtgcgggtgctggcccggcgggtgcggccagactag

SEQ ID NO: 163683 - DNA, 438 bp, synthetic construct
  misc_feature 1..438: note = Description of Artificial Sequence: Synthetic coding sequence
  source 1..438: mol_type = other DNA
atggcccagcccccccggctgagccgcagcggggccagcagcctgtgggaccctgccagccctgcccccaccagcggcccccggccccggctgtgggagggccaggatgtgctggcccgctggacagatggcctgctgtacctgggcaccatcaagaaggtggacagcgcccgggaggtgtgcctggtgcagtttgaagatgacagccagttcctggtgctgtggaaggacatcagccctgctgccctgcccggggaggagctgctgtgctgcgtgtgccgctcagaaacagtggtgcccggcaaccggctggtgtcctgtgagaagtgcagacatgcctaccaccaggactgccacgtgccccgggccccagcccctggagagggggagggcacctcctgggtgtgccggcagtgtgtgtttgccatcgccacctag

SEQ ID NO: 163684 - DNA, 546 bp, synthetic construct
  misc_feature 1..546: note = Description of Artificial Sequence: Synthetic coding sequence
  source 1..546: mol_type = other DNA
tggggccacccccagcagtgtgccatcagccccagccccaggagccggggcagcggcctcatctgccggggccactgccggccccagtgcctgcaccaccccccagccctgaccagggtgaccagggctgctgctgccaccaccagcggcccccagatgcctgctgcctgccccggccaccccatccgcatgtttgccagcttccaccccagcgccagcacagctggcaccagcggggacagcggccccccagacaggagccccctggagctgcacatcggcttccccacagacatccccaagagcgccccccacagcatgacagccagcagcagctctgtgagcagccccagccctggcctgcccaggagaagtgccccacccagccccctgtgccgcagcctgagccctggcactggaggcggcgtgcggggcggcgtgggctacctgagcagaggagaccctgtgcgggtgctggccaggagagtgcggccagatggctctgtgcagtacctggtggagtggggcggcggcggcatcttctag

SEQ ID NO: 163685 - DNA, 438 bp, synthetic construct; identical to SEQ ID NO: 163683
  misc_feature 1..438: note = Description of Artificial Sequence: Synthetic coding sequence
  source 1..438: mol_type = other DNA

SEQ ID NO: 163686 - DNA, 1704 bp, synthetic construct
  misc_feature 1..1704: note = Description of Artificial Sequence: Synthetic coding sequence
  source 1..1704: mol_type = other DNA
atggcccagcccccccggctgagccgcagcggggccagcagcctgtgggaccctgccagccctgcccccaccagcggcccccggccccggctgtgggagggccaggatgtgctggcccgctggacagatggcctgctgtacctgggcaccatcaagaaggtggacagcgcccgggaggtgtgcctggtgcagtttgaagatgacagccagttcctggtgctgtggaaggacatcagccctgctgccctgcccggggaggagctgctgtgctgcgtgtgccgctcagaaacagtggtgcccggcaaccggctggtgtcctgtgagaagtgcagacatgcctaccaccaggactgccacgtgccccgggccccagcccctggagagggggagggcacctcctgggtgtgccggcagtgtgtgtttgccatcgccaccaagaggggcggggccctgaagaagggcccctatgcccgggccatgctgggcatgaagctgagcctgccctacggcctgaagggcctggactgggatgctggccacctgagcaaccggcagcagagctactgctactgcggcggccctggagagtggaacctgaagatgctgcagtgccgcagctgcctgcagtggttccacgaggcctgcacccagtgcctgagcaagcccctgctgtatggagaccgcttctatgaatttgagtgctgcgtgtgccggggcggccctgagaaggtgcggcggctgcagctgcgctgggtggatgtggcccacctggtgctgtaccacctgtctgtgtgctgcaagaagaagtactttgattttgaccgggagatcctgcccttcaccagcgagaactgggacagcctgctgctgggggagctgagtgacacccccaagggggagaggagcagcaagctgctgagcgccctgaacagccacaaggaccgcttcatcagcggccgggagatcaagaagaggaagtgcctgtttggcctgcacgccaggatgcctcctcctgtggagcccccaactggagatggagccctgaccagcttccccagcggccagggccctgggggcggcgtgtcccggcccctgggcaagagaagaagacctgagcctgagcccctgcggcggcggcagaagggcaaggtggaggagctgggccccccatctgctgtgaggaaccagcctgagccccaggagcagcgggagcgggcccacctgcagagggccctgcaggcctctgtgagcccccccagccccagccccaaccagagctaccagggcagcagcggctacaacttccggcccacagatgcccgctgcctgcccagcagccccatccgcatgtttgccagcttccaccccagcgccagcacagctggcaccagcggggacagcggccccccagacaggagccccctggagctgcacatcggcttccccacagacatccccaagagcgccccccacagcatgacagccagcagcagctctgtgagcagccccagccctggcctgcccaggagaagtgccccacccagccccctgtgccgcagcctgagccctggcactggaggcggcgtgcggggcggcgtgggctacctgagcagaggagaccctgtgcgggtgctggccaggagagtgcggccagatggctctgtgcagtacctggtggagtggggcggcggcggcatcttctag

SEQ ID NO: 163687 - DNA, 684 bp, synthetic construct
  misc_feature 1..684: note = Description of Artificial Sequence: Synthetic coding sequence
  source 1..684: mol_type = other DNA
atggcccagcccccccggctgagccgcagcggggccagcagcctgtgggaccctgccagccctgcccccaccagcggcccccggccccggctgtgggagggccaggatgtgctggcccgctggacagatggcctgctgtacctgggcaccatcaagaaggtggacagcgcccgggaggtgtgcctggtgcagtttgaagatgacagccagttcctggtgctgtggaaggacatcagccctgctgccctgcccggggaggagctgctgtgctgcgtgtgccgctcagaaacagtggtgcccggcaaccggctggtgtcctgtgagaagtgcagacatgcctaccaccaggactgccacgtgccccgggccccagcccctggagagggggagggcacctcctgggtgtgccggcagtgtgtgtttgccatcgccaccaagaggggcggggccctgaagaagggcccctatgcccgggccatgctgggcatgaagctgagcctgccctacggcctgaagggcctggactgggatgctggccacctgagcaaccggcagcagagctactgctactgcggcggccctggagagtggaacctgaagatgctgcagtgccgcagctgcctgcagtggttccacgaggcctgcacccagtgcctgagcaagcccctgctgtatggagactag

SEQ ID NO: 163688 - DNA, 684 bp, synthetic construct; identical to SEQ ID NO: 163687
  misc_feature 1..684: note = Description of Artificial Sequence: Synthetic coding sequence
  source 1..684: mol_type = other DNA

SEQ ID NO: 163689 - DNA, 1374 bp, synthetic construct
  misc_feature 1..1374: note = Description of Artificial Sequence: Synthetic coding sequence
  source 1..1374: mol_type = other DNA
atggcccagcccccccggctgagccgcagcggggccagcagcctgtgggaccctgccagccctgcccccaccagcggcccccggccccggctgtgggagggccaggatgtgctggcccgctggacagatggcctgctgtacctgggcaccatcaagaaggtggacagcgcccgggaggtgtgcctggtgcagtttgaagatgacagccagttcctggtgctgtggaaggacatcagccctgctgccctgcccggggaggagctgctgtgctgcgtgtgccgctcagaaacagtggtgcccggcaaccggctggtgtcctgtgagaagtgcagacatgcctaccaccaggactgccacgtgccccgggccccagcccctggagagggggagggcacctcctgggtgtgccggcagtgtgtgtttgccatcgccaccaagaggggcggggccctgaagaagggcccctatgcccgggccatgctgggcatgaagctgagcctgccctacggcctgaagggcctggactgggatgctggccacctgagcaaccggcagcagagctactgctactgcggcggccctggagagtggaacctgaagatgctgcagtgccgcagctgcctgcagtggttccacgaggcctgcacccagtgcctgagcaagcccctgctgtatggagaccgcttctatgaatttgagtgctgcgtgtgccggggcggccctgagaaggtgcggcggctgcagctgcgctgggtggatgtggcccacctggtgctgtaccacctgtctgtgtgctgcaagaagaagtactttgattttgaccgggagatcctgcccttcaccagcgagaactgggacagcctgctgctgggggagctgagtgacacccccaagggggagaggagcagcaagctgctgagcgccctgaacagccacaaggaccgcttcatcagcggccgggagatcaagaagaggaagtgcctgtttggcctgcacgccaggatgcctcctcctgtggagcccccaactggagatggagccctgaccagggctggcccctggggccggggcctgaccagccctggagaggcccctgaggccggggcccgggcccctgaggaggaggccgagggggagagcggcggggccggggccaccctgagcagcgcccagagcgcccgggcccctggagctgagggcgccggcagcagcgctgagggcacagctgctgcccccagcggctgcctgctgcccagcaccctgctgcctgccccccagggccccctgggcaccgtggacccccagacaggccacccctggaacttcaccctggtgagcccccagaccagcctgaaggtgccccccaccaggtag

SEQ ID NO: 163690 - DNA, 1497 bp, synthetic construct
  misc_feature 1..1497: note = Description of Artificial Sequence: Synthetic coding sequence
  source 1..1497: mol_type = other DNA
atggctgctgctgctggccctggagctgccctgagcccccggccctgtgacagcgaccctgccacccctggggcccagagccccaaggatgacaatgaagacaacagcaatgatggcacccagcccagcaagagaagaaggatgggcagcggggacagcagccgcagctgtgagaccagcagccaggacctgggcttctcctactacccagctgagaacctgattgagtacaagtggcccccagatgagaccggggagtactacatgctgcaggagcaggtgtctgagtacctgggcgtgaccagcttcaagaggaagtacccagacctggagcggcgggacctgagccacaaggagaagctgtacctgcgggagctgaatgtcatcacagagacccagtgcaccctgggcctgacagccctgcggagtgatgaggtgattgacctgatgatcaaggagtacccagccaagcatgctgagtacagcgtcatcctgcaggagaaggagcggcagaggatcacagaccactacaaggagtacagccagatgcagcagcagaacacccagaaggtggaggccagcaaggtgcctgagtacatcaagaaggccgccaagaaggctgctgagttcaacagcaacctgaaccgggagaggatggaggagcggcgggcctactttgacctgcagacccacgtgatccaggtgccccagggcaagtacaaggtgctgcccacagagaggaccaaggtgagcagctaccctgtggccctgatccctggccagttccaggagtactacaagcgctacagcccagatgagctgcgctacctgcccctgaacacagccctgtatgagccccccctggaccctgagctgcctgccctggacagtgatggagacagtgatgatggagaagatggaagaggagatgagaagaggaagaacaagggcaccagtgacagcagcagtggaaatgtgtctgagggggagagccccccagacagccaggaggacagcttccagggccggcagaagagcaaggacaaggccgccacccccaggaaggatggccccaagaggtctgtgctgagcaagtctgtgcccggctacaagcccaaggtgatccccaatgccatctgtggcatctgcctgaagggcaaggagagcaacaagaagggcaaggccgagagcctcatccactgcagccagtgtgaaaattctggccaccccagctgcctggacatgaccatggagctggtgtccatgatcaagacctacccctggcagtgcatggagtgcaagacctgcatcatctgtggccagccccaccacgaggaggagatgatgttctgtgacatgtgtgaccggggctaccacaccttctgtgtgggcctgggcgccatccccagcggccgctggatctgtgactgctgccagagggccccacccacccccaggaaggtgggccggcggggcaagaacagcaaggagggctag

SEQ ID NO: 163691 - DNA, 1491 bp, synthetic construct
  misc_feature 1..1491: note = Description of Artificial Sequence: Synthetic coding sequence
  source 1..1491: mol_type = other DNA
atggctgctgctgctggccctggagctgccctgagcccccggccctgtgacagcgaccctgccacccctggggcccagagccccaaggatgacaatgaagacaacagcaatgatggcacccagcccagcaagagaagaaggatgggcagcggggacagcagccgcagctgtgagaccagcagccaggacctgggcttctcctactacccagctgagaacctgattgagtacaagtggcccccagatgagaccggggagtactacatgctgcaggagcaggtgtctgagtacctgggcgtgaccagcttcaagaggaagtacccagagcggcgggacctgagccacaaggagaagctgtacctgcgggagctgaatgtcatcacagagacccagtgcaccctgggcctgacagccctgcggagtgatgaggtgattgacctgatgatcaaggagtacccagccaagcatgctgagtacagcgtcatcctgcaggagaaggagcggcagaggatcacagaccactacaaggagtacagccagatgcagcagcagaacacccagaaggtggaggccagcaaggtgcctgagtacatcaagaaggccgccaagaaggctgctgagttcaacagcaacctgaaccgggagaggatggaggagcggcgggcctactttgacctgcagacccacgtgatccaggtgccccagggcaagtacaaggtgctgcccacagagaggaccaaggtgagcagctaccctgtggccctgatccctggccagttccaggagtactacaagcgctacagcccagatgagctgcgctacctgcccctgaacacagccctgtatgagccccccctggaccctgagctgcctgccctggacagtgatggagacagtgatgatggagaagatggaagaggagatgagaagaggaagaacaagggcaccagtgacagcagcagtggaaatgtgtctgagggggagagccccccagacagccaggaggacagcttccagggccggcagaagagcaaggacaaggccgccacccccaggaaggatggccccaagaggtctgtgctgagcaagtctgtgcccggctacaagcccaaggtgatccccaatgccatctgtggcatctgcctgaagggcaaggagagcaacaagaagggcaaggccgagagcctcatccactgcagccagtgtgaaaattctggccaccccagctgcctggacatgaccatggagctggtgtccatgatcaagacctacccctggcagtgcatggagtgcaagacctgcatcatctgtggccagccccaccacgaggaggagatgatgttctgtgacatgtgtgaccggggctaccacaccttctgtgtgggcctgggcgccatccccagcggccgctggatctgtgactgctgccagagggccccacccacccccaggaaggtgggccggcggggcaagaacagcaaggagggctag

SEQ ID NO: 163692 - DNA, 879 bp, synthetic construct
  misc_feature 1..879: note = Description of Artificial Sequence: Synthetic coding sequence
  source 1..879: mol_type = other DNA
atggagaagaggacctgtgccctgtgccccaaggatgtggagtacaacgtgctgtactttgcccagagcgagaacattgctgcccacgagaactgcctgctgtacagcagcggcctggtggagtgtgaggaccaggaccccctgaacccagacaggagctttgatgtggagagcgtgaagaaggagatccagaggggcaggaagctgaagtgcaagttctgccacaagagaggagccaccgtgggctgtgacctgaagaactgcaacaagaactaccacttcttctgtgccaagaaggatgatgctgtgccccagagtgatggagtgcggggcatctacaagctgctgtgccagcagcacgcccagttccccatcatcgcccagagcgccaagttctctggagtgaagaggaagaggggcaggaagaagcccctgagcggcaaccacgtgcagcccccagagaccatgaagtgcaacaccttcatccggcaggtgaaggaggagcacggccgccacacagatgccaccgtgaaggtgcccttcctgaagaagtgcaaggaggccggcctgctgaactacctgctggaggagatcctggacaaggtgcacagcatccctgagaagctgatggatgagaccaccagcgagagtgactatgaggagatcggcagcgccctgtttgactgccgcctgtttgaggacacctttgtgaacttccaggccgccatcgagaagaagatccacgccagccagcagcgctggcagcagctgaaggaggagattgagctgctgcaggacctgaagcagaccctgtgcagcttccaggagaacagagacctgatgagcagcagcaccagcatcagcagcctgagctactag

SEQ ID NO: 163693 - DNA, 996 bp, synthetic construct
  misc_feature 1..996: note = Description of Artificial Sequence: Synthetic coding sequence
  source 1..996: mol_type = other DNA
atggcccaggccagcccccccaggcctgagcgggtgctgggcgccagcagccctgaggcccggcctgcccaggaggccctgctgctgcccactggagtcttccaggtggccgagaagatggagaagaggacctgtgccctgtgccccaaggatgtggagtacaacgtgctgtactttgcccagagtgaaaatattgctgcccacgagaactgcctgctgtacagcagcggcctggtggagtgtgaggaccaggaccccctgaacccagacaggagctttgatgtggagagcgtgaagaaggagatccagaggggcaggaagctgaagtgcaagttctgccacaagagaggagccaccgtgggctgtgacctgaagaactgcaacaagaactaccacttcttctgtgccaagaaggatgatgctgtgccccagagtgatggagtgcggggcatctacaagctgctgtgccagcagcacgcccagttccccatcatcgcccagagcgccaagttcagcggcgtgaagaggaagaggggcaggaagaagcccctgagcggcaaccacgtgcagcccccagagaccatgaagtgcaacaccttcatccggcaggtgaaggaggagcacggccgccacacagatgccaccgtgaaggtgcccttcctgaagaagtgcaaggaggccggcctgctgaactacctgctggaggagatcctggacaaggtgcacagcatccctgagaagctgatggatgagaccaccagcgagagtgactatgaggagatcggcagcgccctgtttgactgccgcctgtttgaggacacctttgtgaacttccaggccgccatcgagaagaagatccacgccagccagcagcgctggcagcagctgaaggaggagattgagctgctgcaggacctgaagcagaccctgtgcagcttccaggagaacagagacctgatgagcagcagcaccagcatcagcagcctgagctactag

SEQ ID NO: 163694 - DNA, 861 bp, synthetic construct
  misc_feature 1..861: note = Description of Artificial Sequence: Synthetic coding sequence
  source 1..861: mol_type = other DNA
tgaagacctggcccccggggctgcagcgccccagctgcccggcggcccggccccaggagaagaagaagcagcttcccccccctgtacagcagcggcctggtggagtgtgaggaccaggaccccctgaacccagacaggagctttgatgtggagagcgtgaagaaggagatccagaggggcaggaagctgaagtgcaagttctgccacaagagaggagccaccgtgggctgtgacctgaagaactgcaacaagaactaccacttcttctgtgccaagaaggatgatgctgtgccccagagtgatggagtgcggggcatctacaagctgctgtgccagcagcacgcccagttccccatcatcgcccagagcgccaagttctctggagtgaagaggaagaggggcaggaagaagcccctgagcggcaaccacgtgcagcccccagagaccatgaagtgcaacaccttcatccggcaggtgaaggaggagcacggccgccacacagatgccaccgtgaaggtgcccttcctgaagaagtgcaaggaggccggcctgctgaactacctgctggaggagatcctggacaaggtgcacagcatccctgagaagctgatggatgagaccaccagcgagagtgactatgaggagatcggcagcgccctgtttgactgccgcctgtttgaggacacctttgtgaacttccaggccgccatcgagaagaagatccacgccagccagcagcgctggcagcagctgaaggaggagattgagctgctgcaggacctgaagcagaccctgtgcagcttccaggagaacagagacctgatgagcagcagcaccagcatcagcagcctgagctactag

SEQ ID NO: 163695 - DNA, 507 bp, synthetic construct
  misc_feature 1..507: note = Description of Artificial Sequence: Synthetic coding sequence
  source 1..507: mol_type = other DNA
atggagaagaggacctgtgccctgtgccccaaggatgtggagtacaacgtgctgtactttgcccagagcgagaacattgctgcccacgagaactgcctgctgtacagcagcggcctggtggagtgtgaggaccaggaccccctgaacccagacaggagctttgatgtggagagcgtgaagaaggagatccagaggggcaggaagctgaagtgcaagttctgccacaagagaggagccaccgtgggctgtgacctgaagaactgcaacaagaactaccacttcttctgtgccaagaaggatgatgctgtgccccagagtgatggagtgcggggcatctacaagctgctgtgccagcagcacgcccagttccccatcatcgcccagagcgccaagttctctggagtgaagaggaagaggggcaggaagaagcccctgagcggcaaccacgtgcagcccccagagaccatgaagtgcaacaccttcatccggcaggtgaaggaggagtag

SEQ ID NO: 163696 - DNA, 297 bp, synthetic construct
  misc_feature 1..297: note = Description of Artificial Sequence: Synthetic coding sequence
  source 1..297: mol_type = other DNA
atggagaagaggacctgtgccctgtgccccaaggatgtggagtacaacgtgctgtactttgcccagagcgagaacattgctgcccacgagaactgcctgctgtacagcagcggcctggtggagtgtgaggaccaggaccccctgaacccagacaggagctttgatgtggagagcgtgaagaaggagatccagaggggcaggaagctgaagtgcaagttctgccacaagagaggagccaccgtgggctgtgacctgaagaactgcaacaagaactaccacttcttctgtgccaagtag

SEQ ID NO: 163697 - DNA, 879 bp, synthetic construct; identical to SEQ ID NO: 163692
  misc_feature 1..879: note = Description of Artificial Sequence: Synthetic coding sequence
  source 1..879: mol_type = other DNA

SEQ ID NO: 163698 - DNA, 624 bp, synthetic construct
  misc_feature 1..624: note = Description of Artificial Sequence: Synthetic coding sequence
  source 1..624: mol_type = other DNA
atggagaacagagccctggaccccggcacccgggacagctatggagccaccagccacctgcccaacaagggggccctggccaaggtgaagaacaacttcaaggacctgatgagcaagctgacagagggccagtatgtgctgtgccgctggacagatggcctgtactacctgggcaagatcaagagggtgagcagcagcaagcagagctgcctggtgacctttgaggacaacagcaagtactgggtgctgtggaaggacatccagcacgccggcgtgcctggagaggagcccaagtgcaacatctgcctgggcaagaccagcggccccctgaatgagatcctgatctgtgggaaatgtggcctgggctaccaccagcagtgccacatccccatcgccggcagcgctgaccagcccctgctgaccccctggttctgccgccgctgcatctttgccctggccgtgcgggtgtccctgcccagcagccctgtgcctgccagccctgccagcagcagtggagctgaccagaggctgcccagccagagcctgagcagcaagcagaagggccacacctgggccctggagacagattctgccagcgccaccgtgctgggccaggacctgtag

SEQ ID NO: 163699 - DNA, 1743 bp, synthetic construct
  misc_feature 1..1743: note = Description of Artificial Sequence: Synthetic coding sequence
  source 1..1743: mol_type = other DNA
atggagaacagagccctggaccccggcacccgggacagctatggagccaccagccacctgcccaacaagggggccctggccaaggtgaagaacaacttcaaggacctgatgagcaagctgacagagggccagtatgtgctgtgccgctggacagatggcctgtactacctgggcaagatcaagagggtgagcagcagcaagcagagctgcctggtgacctttgaggacaacagcaagtactgggtgctgtggaaggacatccagcacgccggcgtgcctggagaggagcccaagtgcaacatctgcctgggcaagaccagcggccccctgaatgagatcctgatctgtgggaaatgtggcctgggctaccaccagcagtgccacatccccatcgccggcagcgctgaccagcccctgctgaccccctggttctgccgccgctgcatctttgccctggccgtgaggaagggcggggccctgaagaagggggccatcgcccggaccctgcaggccgtgaagatggtgctgagctaccagcctgaggagctggagtgggacagcccccacaggaccaaccagcagcagtgctactgctactgcggcggccctggagagtggtacctgaggatgctgcagtgctaccgctgccggcagtggttccacgaggcctgcacccagtgcctgaatgagcccatgatgtttggagaccgcttctacctgttcttctgcagcgtgtgcaaccagggccctgagtacatcgagcggctgcccctgcgctgggtggatgtggtgcacctggccctgtacaacctgggcgtgcagagcaagaagaagtactttgattttgaggagatcctggcctttgtgaaccaccactgggagctgctgcagctgggcaagctgaccagcacccctgtgacagaccggggcccccacctgctgaatgccctgaacagctacaagagccgcttcctgtgtgggaaggagatcaagaagaagaagtgcatcttccggctgcgcatccgggtgccccccaaccccccaggcaagctgctgcctgacaagggcctgctgcccaatgaaaattctgccagcagcgagctgaggaagaggggcaagagcaagccaggcctgctgccccatgagttccagcagcagaagagaagagtgtacagaaggaagaggagcaagttcctgctggaggatgccatccccagcagtgacttcaccagcgcctggagcaccaaccaccacctggccagcatctttgacttcaccctggatgagatccagagcctgaagagcgccagcagcggccagaccttcttcagtgatgtggacagcacagatgctgccagcaccagcggcagcgccagcaccagcctgtcctatgacagccgctggacagtgggcagcaggaagaggaagctggccgccaaggcctacatgcccctgcgggccaagcgctgggccgctgagctggatggccgctgccccagcgacagcagcgctgagggcgcctctgtgcctgagaggccagatgagggcatcgacagccacacctttgagagcatcagtgaagatgacagcagcctgagccacctgaagagcagcatcaccaactactttggagctgctggccgcctggcctgtggggagaagtaccaggtgctggcccggcgggtgaccccagagggcaaggtgcagtacctggtggagtgggagggcaccaccccctactag

SEQ ID NO: 163700 - DNA, 1116 bp, synthetic construct
  misc_feature 1..1116: note = Description of Artificial Sequence: Synthetic coding sequence
  source 1..1116: mol_type = other DNA
atgctgcagtgctaccgctgccggcagtggttccacgaggcctgcacccagtgcctgaatgagcccatgatgtttggagaccgcttctacctgttcttctgcagcgtgtgcaaccagggccctgagtacatcgagcggctgcccctgcgctgggtggatgtggtgcacctggccctgtacaacctgggcgtgcagagcaagaagaagtactttgattttgaggagatcctggcctttgtgaaccaccactgggagctgctgcagctgggcaagctgaccagcacccctgtgacagaccggggcccccacctgctgaatgccctgaacagctacaagagccgcttcctgtgtgggaaggagatcaagaagaagaagtgcatcttccggctgcgcatccgggtgccccccaaccccccaggcaagctgctgcctgacaagggcctgctgcccaatgaaaacagcgccagcagcgagctgaggaagaggggcaagagcaagccaggcctgctgccccatgagttccagcagcagaagagaagagtgtacagaaggaagaggagcaagttcctgctggaggatgccatccccagcagtgacttcaccagcgcctggagcaccaaccaccacctggccagcatctttgacttcaccctggatgagatccagagcctgaagagcgccagcagcggccagaccttcttcagtgatgtggacagcacagatgctgccagcaccagcggcagcgccagcaccagcctgtcctatgacagccgctggacagtgggcagcaggaagaggaagctggccgccaaggcctacatgcccctgcgggccaagcgctgggccgctgagctggatggccgctgccccagcgacagcagcgctgagggcgcctctgtgcctgagaggccagatgagggcatcgacagccacacctttgagagcatcagtgaagatgacagcagcctgagccacctgaagagcagcatcaccaactactttggagctgctggccgcctggcctgtggggagaagtaccaggtgctggcccggcgggtgaccccagagggcaaggtgcagtacctggtggagtgggagggcaccaccccctactag

SEQ ID NO: 163701 - DNA, 501 bp, synthetic construct
  misc_feature 1..501: note = Description of Artificial Sequence: Synthetic coding sequence
  source 1..501: mol_type = other DNA
atggagaacagagccctggaccccggcacccgggacagctatggagccaccagccacctgcccaacaagggggccctggccaaggtgaagaacaacttcaaggacctgatgagcaagctgacagagggccagtatgtgctgtgccgctggacagatggcctgtactacctgggcaagatcaagagggtgagcagcagcaagcagagctgcctggtgacctttgaggacaacagcaagtactgggtgctgtggaaggacatccagcacgccggcgtgcctggagaggagcccaagtgcaacatctgcctgggcaagaccagcggccccctgaatgagatcctgatctgtgggaaatgtggcctgggctaccaccagcagtgccacatccccatcgccggcagcgctgaccagcccctgctgaccccctggttctgccgccgctgcatctttgccctggccgtgaggaagggcggggccctgaagaagggggccatcgcctag

SEQ ID NO: 163702 - DNA, 324 bp, synthetic construct
  misc_feature 1..324: note = Description of Artificial Sequence: Synthetic coding sequence
  source 1..324: mol_type = other DNA
atggagaacagagccctggaccccggcacccgggacagctatggagccaccagccacctgcccaacaagggggccctggccaaggtgaagaacaacttcaaggacctgatgagcaagctgacagagggccagtatgtgctgtgccgctggacagatggcctgtactacctgggcaagatcaagagggtgagcagcagcaagcagagctgcctggtgacctttgaggacaacagcaagtactgggtgctgtggaaggacatccagcacgccggcgtgcctggagaggagcccaagtgcaacatctgcctgggcaagaccagctag

SEQ ID NO: 163703 - DNA, 1692 bp, synthetic construct
  misc_feature 1..1692: note = Description of Artificial Sequence: Synthetic coding sequence
  source 1..1692: mol_type = other DNA
atggagaacagagccctggaccccggcacccgggacagctatggagccaccagccacctgcccaacaagggggccctggccaaggtgaagaacaacttcaaggacctgatgagcaagctgacagagggccagtatgtgctgtgccgctggacagatggcctgtactacctgggcaagatcaagagggtgagcagcagcaagcagagctgcctggtgacctttgaggacaacagcaagtactgggtgctgtggaaggacatccagcacgccggcgtgcctggagaggagcccaagtgcaacatctgcctgggcaagaccagcggccccctgaatgagatcctgatctgtgggaaatgtggcctgggctaccaccagcagtgccacatccccatcgccggcagcgctgaccagcccctgctgaccccctggttctgccgccgctgcatctttgccctggccgtgaggaagggcggggccctgaagaagggggccatcgcccggaccctgcaggccgtgaagatggtgctgagctaccagcctgaggagctggagtgggacagcccccacaggaccaaccagcagcagtgctactgctactgcggcggccctggagagtggtacctgaggatgctgcagtgctaccgctgccggcagtggttccacgaggcctgcacccagtgcctgaatgagcccatgatgtttggagaccgcttctacctgttcttctgcagcgtgtgcaaccagggccctgagtacatcgagcggctgcccctgcgctgggtggatgtggtgcacctggccctgtacaacctgggcgtgcagagcaagaagaagtactttgattttgaggagatcctggcctttgtgaaccaccactgggagctgctgcagctgggcaagctgaccagcacccctgtgacagaccggggcccccacctgctgaatgccctgaacagctacaagagccgcttcctgtgtgggaaggagatcaagaagaagaagtgcatcttccggctgcgcatccgggtgccccccaaccccccaggcaagctgctgcctgacaagggcctgctgcccaatgaaaattctgccagcagcgagctgaggaagaggggcaagagcaagccaggcctgctgccccatgagttccagcagcagaagagaagagtgtacagaaggaagaggagcaagttcctgctggaggatgccatccccagcagtgacttcaccagcgcctggagcaccaaccaccacctggccagcatctttgacttcaccctggatgagatccagagcctgaagagcgccagcagcggccagaccttcttcagtgatgtggacagcacagatgctgccagcaccagcggcagcgccagcaccagcctgtcctatgacagccgctggacagtgggcagcaggaagaggaagctggccgccaaggcctacatgcccctgcgggccaagcgctgggccgctgagctggatggccgctgccccagcgacagcagcgctgagggcgcctctgtgcctgagaggccagatgagggcatcgacagccacacctttgagagcatcagtgaagatgacagcagcctgagccacctgaagagcagcatcaccaactactttggagctgctggccgcctggcctggggcgaggtgcctggggtgggcagcgagggccacacctag

SEQ ID NO: 163704 - DNA, 3291 bp, synthetic construct
  misc_feature 1..3291: note = Description of Artificial Sequence: Synthetic coding sequence
  source 1..3291: mol_type = other DNA
atggccaccgtgcctgtgtactgtgtgtgccgcctgccctatgatgtgacccgcttcatgattgaatgtgatgcctgcaaggactggttccacggcagctgtgtgggcgtggaggaggaggaggccccagacatcgacatctaccactgccccaactgtgagaagacccacggcaagagcaccctgaagaagaagaggacctggcacaagcacggccctggccaggccccagatgtgaagcctgtgcagaatggcagccagctgttcatcaaggagctgcggagcaggaccttccccagcgcagaagatgtggtggcccgggtgcccggcagccagctgaccctgggctacatggaggagcacggcttcacagagcccatcctggtgcccaagaaggatggcctgggcctggccgtgcctgcccccaccttctacgtgtctgatgtggagaactacgtgggccctgagaggtctgtggatgtgacagatgtgaccaagcagaaggactgcaagatgaagctgaaggagtttgtggactactactacagcaccaacaggaagagggtgctgaatgtgaccaacctggagttcagtgacaccaggatgagcagctttgtggagcccccagacatcgtgaagaagctgtcctgggtggagaactactggccagatgatgccctgctggccaagcccaaggtgaccaagtactgcctgatctgtgtgaaggacagctacacagacttccacatcgacagcggcggggccagcgcctggtaccacgtgctgaagggggagaagaccttctacctgatccggcctgccagcgccaacatcagcctgtatgagcgctggaggtctgccagcaaccacagcgagatgttctttgctgaccaggtggacaagtgctacaagtgcatcgtgaagcagggccagaccctcttcatccccagcggctggatctatgccaccctgacccctgtggactgcctggcctttgctggccacttcctgcacagcctgtctgtggagatgcagatgagggcctatgaggtggagcggcggctgaagctgggcagcctgacccagttccccaactttgaaacagcctgctggtacatgggcaagcacctgctggaggccttcaagggcagccacaagagcggcaagcagctgcccccccacctggtgcagggcgccaagatcctgaatggagccttccgctcctggaccaagaagcaggccctggccgagcatgaagatgagctgcctgagcacttcaagcccagccagctgatcaaggacctggccaaggagatccggctgtctgaaaatgccagcaaggctgtgcggcctgaggtgaacacagtggccagcagtgatgaggtgtgtgatggagaccgggagaaggaggagccccccagccccatcgaggccaccccaccccagagcctgctggagaaggtgtccaagaagaagacccccaagacagtgaagatgcccaagcccagcaagatccccaagccacccaagccacccaagccacccaggcctcccaagaccctgaagctgaaggatggcggcaagaagaagggcaagaagagccgggagagcgccagccccaccatccccaacctggacctgctggaggcccacaccaaggaggccctgaccaagatggagccccccaagaagggcaaggccaccaagtctgtgctgtctgtgcccaacaaggatgtggtgcacatgcagaatgatgtggagcggctggagatccgggagcagaccaagagcaagtctgaggccaagtggaagtacaagaacagcaagccagacagcctgctgaagatggaggaggagcagaagctggagaagagccccctggccggcaacaaggacaacaagttctccttctccttcagcaacaagaagctgctgggcagcaaggccctgcggccccccaccagccctggggtgtttggagccctgcagaacttcaaggaggacaagcccaagcctgtgagagatgaatatgaatatgtgtctgatgatggagagctgaagattgatgagttccccatccggaggaagaagaatgcccccaagagggacctgtccttcctgctggacaagaaggctgtgctgcccacccctgtgaccaagcccaagctggacagcgctgcctacaagagtgatgacagcagtgatgagggcagcctgcacatcgacacagacaccaagccaggaagaaatgcccgggtgaagaaggagagcggcagcagcgctgctggcatcctggacctgctgcaggccagcgaggaggtgggcgccctggagtacaaccccagcagccagcccccagccagccccagcacccaggaggccatccagggcatgctgtccatggccaacctgcaggccagtgacagctgcctgcagaccacctggggcgccggccaggccaagggcagcagcctggccgcccacggggccaggaagaatggaggcggcagcggcaagtctgctgggaagaggctgctgaagagagctgccaagaacagcgtggacctggatgattatgaggaggagcaggaccacctggatgcctgcttcaaggacagcgactatgtgtaccccagcctggagagtgatgaggacaaccccatcttcaagagccgcagcaagaagaggaaaggaagtgatgatgccccctacagccccacagcccgggtgggccccagcgtgccccggcaggacaggcctgtgcgggagggcaccagggtggccagcattgagaccggcctggccgctgctgctgccaagctgagccagcaggaggagcagaagagcaagaagaagaagagcgccaagaggaagctgacccccaacaccaccagccccagcaccagcaccagcatctctgctggcaccaccagcaccagcaccaccccagccagcaccaccccagccagcaccaccccagccagcaccagcacagccagcagccaggccagccaggagggcagcagccctgagcccccacctgagagccacagcagcagcctggccgaccacgagtacacagctgctggcaccttcaccggggcccaggccggccgcaccagccagcccatggcccctggggtcttcctgacccagaggcggcccagcgccagcagccccaacaacaacacagctgccaagggcaagaggaccaagaagggcatggccacagccaagcagaggctgggcaagatcctgaagatccacagaaatggcaagctgctgctgtag

SEQ ID NO: 163705 - DNA, 984 bp, synthetic construct
  misc_feature 1..984: note = Description of Artificial Sequence: Synthetic coding sequence
  source 1..984: mol_type = other DNA
atggccaccgtgcctgtgtactgtgtgtgccgcctgccctatgatgtgacccgcttcatgattgaatgtgatgcctgcaaggactggttccacggcagctgtgtgggcgtggaggaggaggaggccccagacatcgacatctaccactgccccaactgtgagaagacccacggcaagagcaccctgaagaagaagaggacctggcacaagcacggccctggccaggccccagatgtgaagcccaagaacagcgtggacctggatgattatgaggaggagcaggaccacctggatgcctgcttcaaggacagcgactatgtgtaccccagcctggagagtgatgaggacaaccccatcttcaagagccgcagcaagaagaggaagggcagtgatgatgccccctacagccccacagcccgggtgggccccagcgtgccccggcaggacaggcctgtgcgggagggcaccagggtggccagcattgaaacaggcctggccgctgctgctgccaagctgagccagcaggaggagcagaagagcaagaagaagaagagcgccaagaggaagctgacccccaacaccaccagccccagcaccagcaccagcatctctgctggcaccaccagcaccagcaccaccccagccagcaccaccccagccagcaccaccccagccagcaccagcacagccagcagccaggccagccaggagggcagcagccctgagcccccacctgagagccacagcagcagcctggccgaccacgagtacacagctgctggcaccttcaccggggcccaggccggccgcaccagccagcccatggcccctggggtcttcctgacccagaggcggcccagcgccagcagccccaacaacaacacagctgccaagggcaagaggaccaagaagggcatggccacagccaagcagaggctgggcaagatcctgaagatccacagaaatggcaagctgctgctgtag

SEQ ID NO: 163706 - DNA, 2046 bp, synthetic construct
  misc_feature 1..2046: note = Description of Artificial Sequence: Synthetic coding sequence
  source 1..2046: mol_type = other DNA
atggagctgcagaccctgcaggaggccctgaaggtggagatccaggtgcaccagaagctggtggcccagatgaagcaggacccccagaatgctgacctgaagaagcagctgcacgagctgcaggccaagatcacagccctgtctgagaagcagaagagggtggtggagcagctgaggaagaacctgattgtgaagcaggagcagcctgacaagttccagatccagcccctgccccagagcgagaacaagctgcagacagcccagcagcagcccctgcagcagctgcagcagcagcagcagtaccaccaccaccacgcccagcagagcgctgctgccagccccaacctgacagccagccagaagacagtgaccacagcctccatgatcaccaccaagaccctgcccctggtgctgaaggccgccacagccaccatgcctgcctctgtggtgggccagaggcccaccatcgccatggtgacagccatcaacagccagaaggctgtgctgagcacagatgtgcagaacacccctgtgaacctgcagaccagcagcaaggtgactggacctggagctgaggccgtgcagatcgtggccaagaacacagtgaccctgcaggtgcaggccaccccaccccagcccatcaaggtgccccagttcatccccccaccccggctgaccccccggcccaacttcctgccccaggtgcggcccaagcctgtggcccagaacaacatccccatcgccccagcccccccacccatgctggccgccccccagctgatccagaggcctgtgatgctgaccaagttcacccccaccaccctgcccaccagccagaacagcatccaccctgtgcgggtggtgaatggccagacagccaccatcgccaagaccttccccatggcccagctgaccagcatcgtgattgccaccccaggcacccggctggccggcccccagacagtgcagctgagcaagcccagcctggagaagcagacagtgaagagccacacagaaacagatgagaagcagacagagagcaggaccatcaccccacctgctgcccccaagcccaagcgggaggagaacccccagaagctggccttcatggtgtccctgggcctggtgacccatgaccacctggaggagatccagagcaagaggcaggagaggaagaggaggaccacagccaaccctgtgtacagcggggctgtgtttgagcctgagaggaagaagtctgctgtgacctacctgaacagcaccatgcaccctggcaccaggaagaggggccggccccccaagtacaatgctgtgctgggctttggagccctgacccccaccagcccccagagcagccacccagacagcccagaaaatgagaagacagagaccaccttcaccttccctgcccctgtgcagcctgtgtccctgcccagccccaccagcacagatggagacatccacgaggacttctgcagcgtgtgcaggaagagcggccagctgctgatgtgtgacacctgcagccgggtgtaccacctggactgcctggacccccccctgaagaccatccccaagggcatgtggatctgcccccgctgccaggaccagatgctgaagaaggaggaggccatcccctggccaggcaccctggccatcgtgcacagctacatcgcctacaaggccgccaaggaggaggagaagcagaagctgctgaagtggagcagtgacctgaagcaggagcgggagcagctggagcagaaggtgaagcagctgagcaacagcatcagcaagtgcatggagatgaagaacaccatcctggcccggcagaaggagatgcacagcagcctggagaaggtgaagcagctgatccgcctcatccatggaattgacctgagcaagcctgtggacagcgaggccaccgtgggcgccatcagcaatggaccagactgcaccccaccagccaatgctgccaccagcaccccagcccccagccccagcagccagagctgcacagccaactgcaaccagggcgaggagaccaagtag

SEQ ID NO: 163707 - DNA, 1905 bp, synthetic construct
  misc_feature 1..1905: note = Description of Artificial Sequence: Synthetic coding sequence
  source 1..1905: mol_type = other DNA
atggagctgcagaccctgcaggaggccctgaaggtggagatccaggtgcaccagaagctggtggcccagatgaagcaggacccccagaatgctgacctgaagaagcagctgcacgagctgcaggccaagatcacagccctgtctgagaagcagaagagggtggtggagcagctgaggaagaacctgattgtgaagcaggagcagcctgacaagttccagatccagcccctgccccagagcgagaacaagctgcagacagcccagcagcagcccctgcagcagctgcagcagcagcagcagtaccaccaccaccacgcccagcagagcgctgctgccagccccaacctgacagccagccagaagacagtgaccacagcctccatgatcaccaccaagaccctgcccctggtgctgaaggccgccacagccaccatgcctgcctctgtggtgggccagaggcccaccatcgccatggtgacagccatcaacagccagaaggctgtgctgagcacagatgtgcagaacacccctgtgaacctgcagaccagcagcaaggtgactggacctggagctgaggccgtgcagatcgtggccaagaacacagtgaccctgcaggtgcaggccaccccaccccagcccatcaaggtgccccagttcatccccccaccccggctgaccccccggcccaacttcctgccccaggtgcggcccaagcctgtggcccagaacaacatccccatcgccccagcccccccacccatgctggccgccccccagctgatccagaggcctgtgatgctgaccaagttcacccccaccaccctgcccaccagccagaacagcatccaccctgtgcgggtggtgaatggccagacagccaccatcgccaagaccttccccatggcccagctgaccagcatcgtgattgccaccccaggcacccggctggccggcccccagacagtgcagctgagcaagcccagcctggagaagcagacagtgaagagccacacagaaacagatgagaagcagacagagagcaggaccatcaccccacctgctgcccccaagcccaagcgggaggagaacccccagaagctggccttcatggtgtccctgggcctggtgacccatgaccacctggaggagatccagagcaagaggcaggagaggaagaggaggaccacagccaaccctgtgtacagcggggctgtgtttgagcctgagaggaagaagtctgctgtgacctacctgaacagcaccatgcaccctggcaccaggaagagggccaatgaggagcactggcccaagggggacatccacgaggacttctgcagcgtgtgcaggaagagcggccagctgctgatgtgtgacacctgcagccgggtgtaccacctggactgcctggacccccccctgaagaccatccccaagggcatgtggatctgcccccgctgccaggaccagatgctgaagaaggaggaggccatcccctggccaggcaccctggccatcgtgcacagctacatcgcctacaaggccgccaaggaggaggagaagcagaagctgctgaagtggagcagtgacctgaagcaggagcgggagcagctggagcagaaggtgaagcagctgagcaacagcatcagcaagtgcatggagatgaagaacaccatcctggcccggcagaaggagatgcacagcagcctggagaaggtgaagcagctgatccgcctcatccacggcatcgacctgagcaagcctgtggacagcgaggccaccgtgggcgccatcagcaatggaccagactgcaccccaccagccaatgctgccaccagcaccccagcccccagccccagcagccagagctgcacagccaactgcaaccagggcgaggagaccaagtag

SEQ ID NO: 163708 - DNA, 2043 bp, synthetic construct
  misc_feature 1..2043: note = Description of Artificial Sequence: Synthetic coding sequence
  source 1..2043: mol_type = other DNA
atggagctgcagaccctgcaggaggccctgaaggtggagatccaggtgcaccagaagctggtggcccagatgaagcaggacccccagaatgctgacctgaagaagcagctgcacgagctgcaggccaagatcacagccctgtctgagaagcagaagagggtggtggagcagctgaggaagaacctgattgtgaagcaggagcagcctgacaagttccagatccagcccctgccccagagcgagaacaagctgcagacagcccagcagcagcccctgcagcagctgcagcagcagcagcagtaccaccaccaccacgcccagcagagcgctgctgccagccccaacctgacagccagccagaagacagtgaccacagcctccatgatcaccaccaagaccctgcccctggtgctgaaggccgccacagccaccatgcctgcctctgtggtgggccagaggcccaccatcgccatggtgacagccatcaacagccagaaggctgtgctgagcacagatgtgcagaacacccctgtgaacctgcagaccagcagcaaggtgactggacctggagctgaggccgtgcagatcgtggccaagaacacagtgaccctggtgcaggccaccccaccccagcccatcaaggtgccccagttcatccccccaccccggctgaccccccggcccaacttcctgccccaggtgcggcccaagcctgtggcccagaacaacatccccatcgccccagcccccccacccatgctggccgccccccagctgatccagaggcctgtgatgctgaccaagttcacccccaccaccctgcccaccagccagaacagcatccaccctgtgcgggtggtgaatggccagacagccaccatcgccaagaccttccccatggcccagctgaccagcatcgtcatcgccaccccaggcacccggctggccggcccccagacagtgcagctgagcaagcccagcctggagaagcagacagtgaagagccacacagaaacagatgagaagcagacagagagcaggaccatcaccccacctgctgcccccaagcccaagcgggaggagaacccccagaagctggccttcatggtgtccctgggcctggtgacccatgaccacctggaggagatccagagcaagaggcaggagaggaagaggaggaccacagccaaccctgtgtacagcggggctgtgtttgagcctgagaggaagaagtctgctgtgacctacctgaacagcaccatgcaccctggcaccaggaagaggggccggccccccaagtacaatgctgtgctgggctttggagccctgacccccaccagcccccagagcagccacccagacagcccagaaaatgagaagacagagaccaccttcaccttccctgcccctgtgcagcctgtgtccctgcccagccccaccagcacagatggagacatccacgaggacttctgcagcgtgtgcaggaagagcggccagctgctgatgtgtgacacctgcagccgggtgtaccacctggactgcctggacccccccctgaagaccatccccaagggcatgtggatctgcccccgctgccaggaccagatgctgaagaaggaggaggccatcccctggccaggcaccctggccatcgtgcacagctacatcgcctacaaggccgccaaggaggaggagaagcagaagctgctgaagtggagcagtgacctgaagcaggagcgggagcagctggagcagaaggtgaagcagctgagcaacagcatcagcaagtgcatggagatgaagaacaccatcctggcccggcagaaggagatgcacagcagcctggagaaggtgaagcagctgatccgcctcatccacggcatcgacctgagcaagcctgtggacagcgaggccaccgtgggcgccatcagcaatggaccagactgcaccccaccagccaatgctgccaccagcaccccagcccccagccccagcagccagagctgcacagccaactgcaaccagggcgaggagaccaagtag

SEQ ID NO: 163709 - DNA, 81 bp, synthetic construct; identical to SEQ ID NO: 92913
  misc_feature 1..81: note = Description of Artificial Sequence: Synthetic coding sequence
  source 1..81: mol_type = other DNA

SEQ ID NO: 163710 - DNA, 36 bp, synthetic construct; identical to SEQ ID NO: 92914
  misc_feature 1..36: note = Description of Artificial Sequence: Synthetic coding sequence
  source 1..36: mol_type = other DNA

SEQ ID NO: 163711 - DNA, 306 bp, synthetic construct
  misc_feature 1..306: note = Description of Artificial Sequence: Synthetic coding sequence
  source 1..306: mol_type = other DNA
atggagctgcagaccctgcaggaggccctgaaggtggagatccaggtgcaccagaagctggtggcccagatgaagcaggacccccagaatgctgacctgaagaagcagctgcacgagctgcaggccaagatcacagccctgtctgagaagcagaagagggtggtggagcagctgaggaagaacctgattgtgaagcaggagcagcctgacaagttccagatccagcccctgccccagagcgagaacaagctgcagacagcccagcagcagcccctgcagcagctgcagcagcagcagcagtactag

SEQ ID NO: 163712 - DNA, 30 bp, synthetic construct; identical to SEQ ID NO: 92916
  misc_feature 1..30: note = Description of Artificial Sequence: Synthetic coding sequence
  source 1..30: mol_type = other DNA

SEQ ID NO: 163713 - DNA, 156 bp, synthetic construct
  misc_feature 1..156: note = Description of Artificial Sequence: Synthetic coding sequence
  source 1..156: mol_type = other DNA
atggagctgcagaccctgcaggaggccctgaaggtggagatccaggtgcaccagaagctggtggcccagatgaagcaggacccccagaatgctgacctgaagaagcagctgcacgagctgcaggccaagatcacagccctgtctgagaagcagtag

SEQ ID NO: 163714 - DNA, 477 bp, synthetic construct
  misc_feature 1..477: note = Description of Artificial Sequence: Synthetic coding sequence
  source 1..477: mol_type = other DNA
atgctggaggccatggccgagcccagcccagaagatcctccacccaccctgaagccagagacccagcccccagagaagagaagaaggaccatcgaggacttcaacaagttctgcagctttgtgctggcctatgccggctacatcccccccagcaaggaggagagtgactggccagccagcggcagcagcagccccctgcggggggagagcgctgctgacagtgatggctgggacagcgcccccagcgacctgcggaccatccagacctttgtgaagaaggccaagagcagcaagagaagagctgcccaggccggccccacccagcccggccccccaagaagcaccttcagccggctgcaggccccagacagcgccaccctgctggagaagatgaagctgaaggacagcctgtttgacctggatggccccaaggtggccagccccctgagccccccctgtgccgccaacaccccctag

SEQ ID NO: 163715 - DNA, 1212 bp, synthetic construct
  misc_feature 1..1212: note = Description of Artificial Sequence: Synthetic coding sequence
  source 1..1212: mol_type = other DNA
atgctggaggccatggccgagcccagcccagaagatcctccacccaccctgaagccagagacccagcccccagagaagagaagaaggaccatcgaggacttcaacaagttctgcagctttgtgctggcctatgccggctacatcccccccagcaaggaggagagtgactggccagccagcggcagcagcagccccctgcggggggagagcgctgctgacagtgatggctgggacagcgcccccagcgacctgcggaccatccagacctttgtgaagaaggccaagagcagcaagagaagagctgcccaggccggccccacccagcccggccccccaagaagcaccttcagccggctgcaggccccagacagcgccaccctgctggagaagatgaagctgaaggacagcctgtttgacctggatggccccaaggtggccagccccctgagccccaccagcctgacccacaccagccggcccccagctgccctgacccctgtgcccctgagccagggcgacctgagccacccccccaggaagaaggacaggaagaacaggaagctgggccctggggccggggccggcttcggcgtgctgcggcggccccggcccaccccaggagatggagagaagaggagccgcatcaagaagagcaagaagaggaagctgaagaaggccgagcggggggaccggctgcccccacctggccccccccaggcccccccaagtgacacagattctgaggaggaggaggaggaggaggaggaggaggaggaggaggagatggccaccgtggtgggcggggaggcccctgtgcctgtgctgcccaccccacctgaggccccccggcccccagccaccgtgcaccctgagggcgtgcccccagctgacagcgagagcaaggaggtgggcagcacagagaccagccaggatggagatgccagcagcagcgagggggagatgagggtgatggatgaggacatcatggtggagagcggagatgacagctgggacctgatcacctgctactgcaggaagccctttgctggccggcccatgattgaatgttccctgtgtggcacctggatccacctgagctgtgccaagatcaagaagaccaacgtgcctgacttcttctactgccagaagtgcaaggagctgcggcctgaggcccggcggctgggcggcccccccaagagcggggagccctag

SEQ ID NO: 163716 - DNA, 1200 bp, synthetic construct
  misc_feature 1..1200: note = Description of Artificial Sequence: Synthetic coding sequence
  source 1..1200: mol_type = other DNA
atgcctggggactgccggcgggaccccccacccaccctgaagccagagacccagcccccagagaagagaagaaggaccatcgaggacttcaacaagttctgcagctttgtgctggcctatgccggctacatcccccccagcaaggaggagagtgactggccagccagcggcagcagcagccccctgcggggggagagcgctgctgacagtgatggctgggacagcgcccccagcgacctgcggaccatccagacctttgtgaagaaggccaagagcagcaagagaagagctgcccaggccggccccacccagcccggccccccaagaagcaccttcagccggctgcaggccccagacagcgccaccctgctggagaagatgaagctgaaggacagcctgtttgacctggatggccccaaggtggccagccccctgagccccaccagcctgacccacaccagccggcccccagctgccctgacccctgtgcccctgagccagggcgacctgagccacccccccaggaagaaggacaggaagaacaggaagctgggccctggggccggggccggcttcggcgtgctgcggcggccccggcccaccccaggagatggagagaagaggagccgcatcaagaagagcaagaagaggaagctgaagaaggccgagcggggggaccggctgcccccacctggccccccccaggcccccccaagtgacacagattctgaggaggaggaggaggaggaggaggaggaggaggaggaggagatggccaccgtggtgggcggggaggcccctgtgcctgtgctgcccaccccacctgaggccccccggcccccagccaccgtgcaccctgagggcgtgcccccagctgacagcgagagcaaggaggtgggcagcacagagaccagccaggatggagatgccagcagcagcgagggggagatgagggtgatggatgaggacatcatggtggagagcggagatgacagctgggacctgatcacctgctactgcaggaagccctttgctggccggcccatgattgaatgttccctgtgtggcacctggatccacctgagctgtgccaagatcaagaagaccaacgtgcctgacttcttctactgccagaagtgcaaggagctgcggcctgaggcccggcggctgggcggcccccccaagagcggggagccctag

SEQ ID NO: 163717 - DNA, 6120 bp, synthetic construct
  misc_feature 1..6120: note = Description of Artificial Sequence: Synthetic coding sequence
  source 1..6120: mol_type = other DNA
atggacatcgtggacaccttcaaccacctgatccccacagagcacctggatgatgccctcttcctgggcagcaacctggagaatgaggtgtgtgaggacttcagcgccagccagaatgtgctggaggacagcctgaagaacatgctgagtgacaaggaccccatgctgggcagcgccagcaaccagttctgcctgcctgtgctggacagcaatgaccccaacttccagatgccctgcagcacagtggtgggcctggatgacatcatggatgagggcgtggtgaaggagagcggaaatgacaccattgatgaggaggagctgatcctgcccaacagaaacctgcgggacaaggtggaggagaacagcgtgcgcagccccaggaagagcccccggctgatggcccaggagcaggtgcgcagcctgcggcagagcaccatcgccaagaggagcaatgctgcccccctgagcaacaccaagaaggccagcggcaagacagtgtccacagccaaggccggcgtgaagcagcctgagaggagccaggtgaaggaggaggtgtgcatgagcctgaagccagagtaccacaaggagaacagacgctgcagcaggaacagcggccagatcgaggtggtgcctgaggtgtctgtgagcagcagccacagctctgtgagcagctgcctggagatgaaggatgaagatggcctggacagcaagcacaagtgcaacaaccctggagaaattgatgtgcccagccatgagctgaactgcagcctgctgtctgagacctgtgtgaccatcggggagaagaagaatgaggccctgatggagtgcaaggccaagcctgtgggcagccccctcttcaagttcagtgacaaggaggagcacgagcagaatgacagcatcagcggcaagacaggagaaacagtggtggaggagatgattgccaccaggaaggtggagcaggacagcaaggagaccgtgaagctgagccatgaagatgaccacatcctggaggatgctggcagcagtgacatcagcagtgatgctgcctgcaccaaccccaacaagacagagaacagcctggtgggcctgcccagctgtgtggatgaggtgacagagtgcaacctggagctgaaggacaccatgggcattgctgacaagacagagaacaccctggagaggaacaagattgagcccctgggctactgtgaagatgctgagagcaaccggcagctggagagcacagagttcaacaagagcaacctggaggtggtggacaccagcacctttggacctgagagcaacatcctggagaatgccatctgtgatgtgcctgaccagaacagcaagcagctgaatgccatcgagagcaccaagattgagagccatgaaacagccaacctgcaggatgacaggaacagccagagcagctctgtgtcctacctggagagcaagtctgtgaagagcaagcacaccaagcctgtgatccacagcaagcagaacatgaccacagatgcccccaagaagatcgtggccgccaagtatgaggtgatccacagcaagaccaaggtgaatgtgaagtctgtgaagaggaacacagatgtgcctgagagccagcagaacttccacaggcctgtgaaggtgaggaagaagcagattgacaaggagcccaagatccagagctgcaacagcggcgtgaagtctgtgaagaaccaggcccacagcgtgctgaagaagaccctgcaggaccagaccctggtgcagatcttcaagcccctgacccacagcctgagtgacaagagccacgcccaccctggctgcctgaaggagccccaccacccagcccagacaggccacgtgagccacagcagccagaagcagtgccacaagccccagcagcaggccccagccatgaagaccaacagccacgtgaaggaggagctggagcaccctggggtggagcacttcaaggaggaggacaagctgaagctgaagaagccagagaagaacctgcagccccggcagaggaggagcagcaagagcttcagcctggatgagcccccactcttcatcccagacaacatcgccaccatccggcgggagggcagtgaccacagcagcagctttgagagcaagtacatgtggacccccagcaagcagtgtggcttctgcaagaagccccacggcaaccgcttcatggtgggctgcggccgctgtgatgactggttccatggagactgtgtgggcctgagcctgagccaggcccagcagatgggagaggaggacaaggagtatgtgtgtgtgaagtgctgtgccgaggaggacaagaagacagagatcctggaccctgacaccctggagaaccaggccaccgtggagttccacagcggggacaagaccatggagtgtgagaagctgggcctgagcaagcacaccaccaatgacaggaccaagtacattgatgacacagtgaagcacaaggtgaagatcctgaagcgggagagcggggagggcaggaacagcagtgactgccgggacaatgagatcaagaagtggcagctggcccccctgaggaagatgggccagcctgtgctgccccggcgcagcagcgaggagaagtctgagaagatccccaaggagagcaccaccgtgacctgcaccggggagaaggccagcaagccaggcacccatgagaagcaggagatgaagaagaagaaggtggagaagggcgtgctgaatgtgcaccctgctgccagcgccagcaagcccagcgctgaccagatccggcagagcgtgcgccacagcctgaaggacatcctgatgaagaggctgacagacagcaacctgaaggtgcctgaggagaaggccgccaaggtggccaccaagattgagaaggagctgttctccttcttccgggacacagatgccaagtacaagaacaagtaccgcagcctgatgttcaacctgaaggaccccaagaacaacatcctcttcaagaaggtgctgaagggggaggtgaccccagaccacctgatccgcatgagccctgaggagctggccagcaaggagctggccgcctggaggcggcgggagaacagacacaccatcgagatgattgagaaggagcagcgggaggtggagcggcggcccatcaccaagatcacccacaagggggagattgaaattgaaagtgatgcccccatgaaggagcaggaggccgccatggagatccaggagcctgctgccaacaagagcctggagaagccagagggcagcgagaagcagaaggaggaggtggacagcatgagcaaggacaccaccagccagcaccggcagcacctgtttgacctgaactgcaagatctgcatcggccgcatggcccctcctgtggatgacctgagccccaagaaggtgaaggtggtggtgggcgtggccaggaagcacagcgacaatgaggccgagagcattgctgatgccctgagcagcaccagcaacatcctggccagcgagttctttgaggaggagaagcaggagagccccaagagcaccttctccccagcccccaggcctgagatgcctggcaccgtggaggtggagagcaccttcctggcccggctgaacttcatctggaagggcttcatcaacatgcccagcgtggccaagtttgtgaccaaggcctaccctgtgtctggcagccctgagtacctgacagaggacctgcctgacagcatccaggtgggcggccgcatcagcccccagacagtgtgggactatgtggagaagatcaaggccagcggcaccaaggagatctgtgtggtgcgcttcacccctgtgacagaggaggaccagatctcctacaccctgctgtttgcctacttcagcagcaggaagagatatggagtggccgccaacaacatgaagcaggtgaaggacatgtacctgatccccctgggcgccacagacaagatcccccaccccctggtgccctttgatggccctggcctggagctgcaccggcccaacctgctgctgggcctcatcatccggcagaagctgaagaggcagcacagcgcctgtgccagcaccagccacatcgccgagaccccagagagcgccccacccatcgccctgcccccagacaagaagagcaagattgaggtgtccacagaggaggcccctgaggaggagaatgacttcttcaacagcttcaccaccgtgctgcacaagcagaggaacaagccccagcagaacctgcaggaggacctgcccacagctgtggagcccctgatggaggtgaccaagcaggagccccccaagcccctgcgcttcctgcccggggtgctgattggctgggagaaccagcccaccaccctggagctggccaacaagcccctgcctgtggatgacatcctgcagagcctgctgggcaccaccggccaggtgtatgaccaggcccagagcgtgatggagcagaacacagtgaaggagatccccttcctgaatgagcagaccaacagcaagattgagaagacagacaacgtggaggtgacagatggagagaacaaggagatcaaggtgaaggtggacaacatcagcgagagcacagacaagtctgctgagattgagacctctgtggtgggcagcagcagcatctctgctggcagcctgaccagcctgagcctgcggggcaagcccccagatgtgtccacagaggccttcctgaccaacctgagcatccagagcaagcaggaggagaccgtggagagcaaggagaagaccctgaagaggcagctgcaggaggaccaggagaacaacctgcaggacaaccagaccagcaacagcagcccctgccgcagcaatgtgggcaagggcaacattgatggaaatgtgtcctgcagcgagaacctggtggccaacacagcccggagcccccagttcatcaacctgaagagggacccccggcaggccgccggccgcagccagcctgtgaccaccagcgagagcaaggatggagacagctgcagaaatggagagaagcacatgctgcccggcctgagccacaacaaggagcacctgacagagcagatcaacgtggaggagaagctgtgcagcgctgagaagaacagctgtgtgcagcagagcgacaacctgaaggtggcccagaacagccccagcgtggagaacatccagaccagccaggccgagcaggccaagcccctgcaggaggacatcctgatgcagaacatcgagaccgtgcaccccttcagaagaggcagcgctgtggccaccagccactttgaggtgggcaacacctgccccagcgagttccccagcaagagcatcaccttcaccagccgcagcaccagccccaggaccagcaccaacttcagccccatgaggccccagcagcccaacctgcagcacctgaagagcagccccccaggcttccccttccctggcccccccaacttccccccccagagcatgtttggcttccccccccacctgcccccacccctgctgcccccacctggctttggatttgcccagaaccccatggtgccctggccccctgtggtgcacctgcccggccagccccagaggatgatgggccccctgagccaggccagccgctacatcggcccccagaacttctaccaggtgaaggacatcagaagacctgagaggaggcacagcgacccctggggccggcaggaccagcagcagctggaccggcccttcaacagaggaaaaggagaccggcagcgcttctacagcgacagccaccacctgaagcgggagagacatgagaaggagtgggagcaggagagcgagcggcacagaagaagagacaggagccaggacaaggaccgggacaggaagagccgggaggagggccacaaggacaaggagcgggcccggctgagccacggggaccggggcacagatggcaaggccagccgggacagcagaaatgtggacaagaagccagacaagcccaagtctgaggactatgagaaggacaaggagcgggagaagagcaagcaccgggagggggagaaggaccgggaccgctaccacaaggaccgggaccacacagacaggaccaagagcaagaggtag

SEQ ID NO: 163718 - DNA, 6120 bp, synthetic construct; identical to SEQ ID NO: 163717
  misc_feature 1..6120: note = Description of Artificial Sequence: Synthetic coding sequence
  source 1..6120: mol_type = other DNA

SEQ ID NO: 163719 - DNA, 1098 bp, synthetic construct
  misc_feature 1..1098: note = Description of Artificial Sequence: Synthetic coding sequence
  source 1..1098: mol_type = other DNA
atgagcagctctgtggagcagaagaagggccccacccggcagaggaaatgtggcttctgcaagagcaacagagacaaggaatgtggccagctgctgatcagcgagaaccagaaggtggccgcccaccacaagtgcatgctgttcagcagcgccctggtgagcagccacagcgacaatgaaagcctgggcggcttcagcattgaagatgtgcagaaggagatcaagaggggcaccaagctgatgtgcagcctgtgccactgccctggggccaccatcggctgtgatgtgaagacctgccacaggacctaccactaccactgtgccctgcatgacaaggcccagatccgggagaagcccagccagggcatctacatggtgtactgcaggaagcacaagaagacagcccacaacagcgaggccgacctggaggagagcttcaatgaacatgagctggagcccagcagccccaagagcaagaagaagagcaggaagggccggcccaggaagaccaacttcaagggcctgtctgaggacaccaggagcaccagcagccatggaacagatgagatggagagcagcagctacagagacaggagcccccacaggagcagccccagcgacacccggcccaagtgtggcttctgccacgtgggggaggaggagaatgaggcccggggcaagctgcacatcttcaatgccaagaaggctgctgcccactacaagtgcatgctgttcagcagcggcaccgtgcagctgaccaccaccagcagagctgagtttggagactttgacatcaagacagtgctgcaggagatcaagaggggcaagaggatgaagtgcaccctgtgcagccagcccggggccaccatcggctgtgagatcaaggcctgtgtgaagacctaccactaccactgcggcgtgcaggacaaggccaagtacatcgagaacatgagccggggcatctacaagctgtactgcaagaaccacagcggaaatgatgaaagagatgaggaggatgaggagcgggagagcaagagccggggcaaggtggagattgaccagcagcagctgacccagcagcagctgaatggaaattag

SEQ ID NO: 163720 - DNA, 975 bp, synthetic construct
  misc_feature 1..975: note = Description of Artificial Sequence: Synthetic coding sequence
  source 1..975: mol_type = other DNA
atgagcagctctgtggagcagaagaagggccccacccggcagaggaaatgtggcttctgcaagagcaacagagacaaggaatgtggccagctgctgatcagcgagaaccagaaggtggccgcccaccacaagtgcatgctgttcagcagcgccctggtgagcagccacagcgacaatgaaagcctgggcggcttcagcattgaagatgtgcagaaggagatcaagaggggcaccaagctgatgtgcagcctgtgccactgccctggggccaccatcggctgtgatgtgaagacctgccacaggacctaccactaccactgtgccctgcatgacaaggcccagatccgggagaagcccagccagggcatctacatggtgtactgcaggaagcacaagaagacagcccacaacagcgaggccgctgacctggaggagagcttcaatgagcacgagctggagcccagcagccccaagagcaagaagaagagcaggaagggccggcccaggaagaccaacttcaagggcctgtctgaggacaccaggagcaccagcagccacggcacagatgagatggagagcagcagctacagagacaggagcccccacaggagcagccccagcgacacccggcccaagtgtggcttctgccacgtgggggaggaggagaatgaggcccggggcaagctgcacatcttcaatgccaagaaggccgccgcccactacaagtgcatgctgttcagcagcggcaccgtgcagctgaccaccaccagcagagctgagtttggagactttgacatcaagacagtgctgcaggagatcaagaggggcaagaggatgaagtgcaccctgtgcagccagcccggggccaccatcggctgtgagatcaaggcctgtgtgaagacctaccactaccactgcggcgtgcaggacaaggccaagtacatcgagaacatgagccggggcatctacaagtag

SEQ ID NO: 163721 - DNA, 939 bp, synthetic construct
  misc_feature 1..939: note = Description of Artificial Sequence: Synthetic coding sequence
  source 1..939: mol_type = other DNA
atgagcagctctgtggagcagaagaagggccccacccggcagaggaaatgtggcttctgcaagagcaacagagacaaggaatgtggccagctgctgatcagcgagaaccagaaggtggccgcccaccacaagtgcatgctgttcagcagcgccctggtgagcagccacagcgacaatgaaagcctgggcggcttcagcattgaagatgtgcagaaggagatcaagaggggcaccaagctgatgtgcagcctgtgccactgccctggggccaccatcggctgtgatgtgaagacctgccacaggacctaccactaccactgtgccctgcatgacaaggcccagatccgggagaagcccagccagggcatctacatggtgtactgcaggaagcacaagaagacagcccacaacagcgaggccgctgacctggaggagagcttcaatgagcacgagctggagcccagcagccccaagagcaagaagaagagcaggaagggccggcccaggaagaccaacttcaagggcctgtctgaggacaccaggagcaccagcagccacggcacagatgagatggagagcagcagctacagagacaggagcccccacaggagcagccccagcgacacccggcccaagtgtggcttctgccacgtgggggaggaggagaatgaggcccggggcaagctgcacatcttcaatgccaagaaggccgccgcccactacaagtgcatgctgttcagcagcggcaccgtgcagctgaccaccaccagcagagctgagtttggagactttgacatcaagacagtgctgcaggagatcaagaggggcaagaggatggtgtgcagcttctacatctgctacgccaccctgcacctgatctgctgcttcaagttccgggtgcaccccaagttcatccagagcagcgagaacctgaagtag

SEQ ID NO: 163722 - DNA, 1098 bp, synthetic construct; identical to SEQ ID NO: 163719
  misc_feature 1..1098: note = Description of Artificial Sequence: Synthetic coding sequence
  source 1..1098: mol_type = other DNA

SEQ ID NO: 163723 - DNA, 1101 bp, synthetic construct
  misc_feature 1..1101: note = Description of Artificial Sequence: Synthetic coding sequence
  source 1..1101: mol_type = other DNA
atgagcagctctgtggagcagaagaagggccccacccggcagaggaaatgtggcttctgcaagagcaacagagacaaggaatgtggccagctgctgatcagcgagaaccagaaggtggccgcccaccacaagtgcatgctgttcagcagcgccctggtgagcagccacagcgacaatgaaagcctgggcggcttcagcattgaagatgtgcagaaggagatcaagaggggcaccaagctgatgtgcagcctgtgccactgccctggggccaccatcggctgtgatgtgaagacctgccacaggacctaccactaccactgtgccctgcatgacaaggcccagatccgggagaagcccagccagggcatctacatggtgtactgcaggaagcacaagaagacagcccacaacagcgaggccgctgacctggaggagagcttcaatgagcacgagctggagcccagcagccccaagagcaagaagaagagcaggaagggccggcccaggaagaccaacttcaagggcctgtctgaggacaccaggagcaccagcagccacggcacagatgagatggagagcagcagctacagagacaggagcccccacaggagcagccccagcgacacccggcccaagtgtggcttctgccacgtgggggaggaggagaatgaggcccggggcaagctgcacatcttcaatgccaagaaggccgccgcccactacaagtgcatgctgttcagcagcggcaccgtgcagctgaccaccaccagcagagctgagtttggagactttgacatcaagacagtgctgcaggagatcaagaggggcaagaggatgaagtgcaccctgtgcagccagcccggggccaccatcggctgtgagatcaaggcctgtgtgaagacctaccactaccactgcggcgtgcaggacaaggccaagtacatcgagaacatgagccggggcatctacaagctgtactgcaagaaccacagcggaaatgatgaaagagatgaagaagatgaggagcgggagagcaagagccggggcaaggtggagattgaccagcagcagctgacccagcagcagctgaatggaaattag

SEQ ID NO: 163724 - DNA, 996 bp, synthetic construct
  misc_feature 1..996: note = Description of Artificial Sequence: Synthetic coding sequence
  source 1..996: mol_type = other DNA
atgagcagctctgtggagcagaagaagggccccacccggcagaggaaatgtggcttctgcaagagcaacagagacaaggaatgtggccagctgctgatcagcgagaaccagaaggtggccgcccaccacaagtgcatgatgtgcagcctgtgccactgccctggggccaccatcggctgtgatgtgaagacctgccacaggacctaccactaccactgtgccctgcatgacaaggcccagatccgggagaagcccagccagggcatctacatggtgtactgcaggaagcacaagaagacagcccacaacagcgaggccgacctggaggagagcttcaatgaacatgagctggagcccagcagccccaagagcaagaagaagagcaggaagggccggcccaggaagaccaacttcaagggcctgtctgaggacaccaggagcaccagcagccatggaacagatgagatggagagcagcagctacagagacaggagcccccacaggagcagccccagcgacacccggcccaagtgtggcttctgccacgtgggggaggaggagaatgaggcccggggcaagctgcacatcttcaatgccaagaaggctgctgcccactacaagtgcatgctgttcagcagcggcaccgtgcagctgaccaccaccagcagagctgagtttggagactttgacatcaagacagtgctgcaggagatcaagaggggcaagaggatgaagtgcaccctgtgcagccagcccggggccaccatcggctgtgagatcaaggcctgtgtgaagacctaccactaccactgcggcgtgcaggacaaggccaagtacatcgagaacatgagccggggcatctacaagctgtactgcaagaaccacagcggaaatgatgaaagagatgaggaggatgaggagcgggagagcaagagccggggcaaggtggagattgaccagcagcagctgacccagcagcagctgaatggaaattag

SEQ ID NO: 163725 - DNA, 3075 bp, synthetic construct
  misc_feature 1..3075: note = Description of Artificial Sequence: Synthetic coding sequence
  source 1..3075: mol_type = other DNA
atggcctctgtgcctgtgtactgcctgtgccgcctgccctatgatgtgacccgcttcatgattgaatgtgacatgtgccaggactggttccacggcagctgtgtgggcgtggaggaggagaaggctgctgacatcgacctgtaccactgccccaactgtgaggtgctgcacggccccagcatcatgaagaagagaagaggcagcagcaagggccatgacacccacaagggcaagcctgtgaagacaggcagccccacctttgtgcgggagctgcggagcaggacctttgacagcagtgatgaggtgatcctgaagcccactggaaaccagctgactgtggagttcctggaggagaacagcttctctgtgcccatcctggtgctgaagaaggatggcctgggcatgaccctgcccagccccagcttcaccgtgagagatgtggagcactacgtgggcagtgacaaggagattgatgtgattgatgtgacccggcaggccgactgcaagatgaagctgggggactttgtgaagtactactacagcggcaagcgggagaaggtgctgaatgtcatcagcctggagttcagtgacacccggctgagcaacctggtggagacccccaagatcgtgaggaagctgtcctgggtggagaacctgtggccagaagaatgtgtgtttgagcggcccaacgtgcagaagtactgcctgatgtctgtgcgggacagctacacagacttccacatcgactttggaggcacctctgtgtggtaccacgtgctgaagggggagaagatcttctacctgatccggcccaccaatgccaacctgaccctgtttgagtgctggagcagcagcagcaaccagaatgagatgttctttggagaccaggtggacaagtgctacaagtgcagcgtgaagcagggccagaccctcttcatccccaccggctggattcatgctgtgctgacccctgtggactgcctggccttcggcggcaacttcctgcacagcctgaacatcgagatgcagctgaaggcctatgaaattgagaagaggctgagcacagctgacctcttccgcttccccaactttgagaccatctgctggtacgtgggcaagcacatcctggacatcttccggggcctgcgggagaacagaagacacccagccagctacctggtgcatggaggcaaggccctgaacctggccttccgggcctggaccaggaaggaggccctgcctgaccatgaagatgagatccctgagaccgtgaggacagtgcagctgatcaaggacctggcccgggagatccggctggtggaggacatcttccagcagaatgtgggcaagaccagcaacatcttcggcctgcagaggatcttccctgctggcagcatccccctgaccaggcctgcccacagcacctctgtgtccatgagccggctgagcctgcccagcaagaatggcagcaagaagaagggcctgaagcccaaggagctgttcaagaaggccgagaggaagggcaaggagagcagcgccctgggccctgctggccagctgagctacaacctgatggacacctacagccaccaggccctgaagacaggcagcttccagaaggccaagttcaacatcaccggggcctgcctgaatgacagtgatgatgacagcccagacctggacctggatggaaatgaaagccccctggccctgctgatgagcaatggcagcaccaagagggtgaagagcctgagcaagagcaggaggaccaagatcgccaagaaggtggacaaggcccggctgatggccgagcaggtgatggaggatgaatttgacctggacagtgatgatgagctgcagattgatgagcggctgggcaaggagaaggccaccctcatcatccggcccaagttccccaggaagctgccccgggccaagccctgcagcgaccccaacagagtgcgggagcctggagaggtggagtttgacatcgaggaggactacaccacagatgaggacatggtggagggcgtggagggcaagctgggcaatggcagcggggccggcggcatcctggacctgctgaaggccagccggcaggtgggcggccctgactatgctgccctgacagaggccccagccagccccagcacccaggaggccatccagggcatgctgtgcatggccaacctgcagagcagcagcagcagccctgccaccagcagcctgcaggcctggtggacaggaggccaggacaggagcagcggcagcagcagcagcggcctgggcaccgtgagcaacagccctgccagccagaggaccccaggcaagaggcccatcaagaggcctgcctactggaggacagagagcgaggaggaggaggagaatgccagcctggatgagcaggacagcctgggcgcctgcttcaaggatgctgagtacatctaccccagcctggagagtgatgatgatgatcctgccctgaagagccggcccaagaagaagaagaacagtgatgatgccccctggagccccaaggcccgggtgacccccaccctgcccaagcaggacaggcctgtgcgggagggcaccagggtggccagcattgaaacaggcctggccgctgctgctgccaagctggcccagcaggagctgcagaaggcccagaagaagaagtacatcaagaagaagcccctgctgaaggaggtggagcagccccggccccaggacagcaacctgagcctgactgtgcctgcccccaccgtggccgccaccccccagctggtgaccagcagcagccccctgcccccacctgagcccaagcaggaggccctgagcggcagcctggccgaccacgagtacacagcccggcccaatgccttcggcatggcccaggccaacagaagcaccacccccatggcccctggggtcttcctgacccagaggcggcccagcgtgggcagccagagcaaccaggccggccagggcaagaggcccaagaagggcctggccacagccaagcagaggctgggccgcatcctgaagatccacagaaatggcaagctgctgctgtag

SEQ ID NO: 163726 - DNA, 2847 bp, synthetic construct
  misc_feature 1..2847: note = Description of Artificial Sequence: Synthetic coding sequence
  source 1..2847: mol_type = other DNA
atggcctctgtgcctgtgtactgcctgtgccgcctgccctatgatgtgacccgcttcatgattgaatgtgacatgtgccaggactggttccacggcagctgtgtgggcgtggaggaggagaaggctgctgacatcgacctgtaccactgccccaactgtgaggtgctgcacggccccagcatcatgaagaagagaagaggcagcagcaagggccatgacacccacaagggcaagcctgtgaagacaggcagccccacctttgtgcgggagctgcggagcaggacctttgacagcagtgatgaggtgatcctgaagcccactggaaaccagctgactgtggagttcctggaggagaacagcttctctgtgcccatcctggtgctgaagaaggatggcctgggcatgaccctgcccagccccagcttcaccgtgagagatgtggagcactacgtgggcagtgacaaggagattgatgtgattgatgtgacccggcaggccgactgcaagatgaagctgggggactttgtgaagtactactacagcggcaagcgggagaaggtgctgaatgtcatcagcctggagttcagtgacacccggctgagcaacctggtggagacccccaagatcgtgaggaagctgtcctgggtggagaacctgtggccagaagaatgtgtgtttgagcggcccaacgtgcagaagtactgcctgatgtctgtgcgggacagctacacagacttccacatcgactttggaggcacctctgtgtggtaccacgtgctgaagggggagaagatcttctacctgatccggcccaccaatgccaacctgaccctgtttgagtgctggagcagcagcagcaaccagaatgagatgttctttggagaccaggtggacaagtgctacaagtgcagcgtgaagcagggccagaccctcttcatccccaccggctggattcatgctgtgctgacccctgtggactgcctggccttcggcggcaacttcctgcacagcctgaacatcgagatgcagctgaaggcctatgaaattgagaagaggctgagcacagctgacctcttccgcttccccaactttgagaccatctgctggtacgtgggcaagcacatcctggacatcttccggggcctgcgggagaacagaagacacccagccagctacctggtgcatggaggcaaggccctgaacctggccttccgggcctggaccaggaaggaggccctgcctgaccatgaagatgagatccctgagaccgtgaggacagtgcagctgatcaaggacctggcccgggagatccggctggtggagttcaacatcactggagcctgcctgaatgacagtgatgatgacagcccagacctggacctggatggaaatgaaagccccctggccctgctgatgagcaatggcagcaccaagagggtgaagagcctgagcaagagcaggaggaccaagatcgccaagaaggtggacaaggcccggctgatggccgagcaggtgatggaggatgaatttgacctggacagtgatgatgagctgcagattgatgagcggctgggcaaggagaaggccaccctcatcatccggcccaagttccccaggaagctgccccgggccaagccctgcagcgaccccaacagagtgcgggagcccggggaggtggagtttgatattgaggaggactacaccacagatgaggacatggtggagggcgtggagggcaagctgggcaatggaagtggagctgggggcatcctggacctgctgaaggccagccggcaggtgggcggccctgactatgctgccctgacagaggccccagccagccccagcacccaggaggccatccagggcatgctgtgcatggccaacctgcagagcagcagcagcagccctgccaccagcagcctgcaggcctggtggacaggaggccaggacaggagcagcggcagcagcagcagcggcctgggcaccgtgagcaacagccctgccagccagaggacccctgggaagaggcccatcaagaggcctgcctactggaggacagaaagtgaggaggaggaggagaatgccagcctggatgagcaggacagcctgggcgcctgcttcaaggatgctgagtacatctaccccagcctggagagtgatgatgatgatcctgccctgaagagccggcccaagaagaagaagaacagtgatgatgccccctggagccccaaggcccgggtgacccccaccctgcccaagcaggacaggcctgtgcgggagggcaccagggtggccagcattgagaccggcctggccgctgctgctgccaagctggcccagcaggagctgcagaaggcccagaagaagaagtacatcaagaagaagcccctgctgaaggaggtggagcagccccggccccaggacagcaacctgagcctgactgtgcctgcccccaccgtggccgccaccccccagctggtgaccagcagcagccccctgcccccacctgagcccaagcaggaggccctgagcggcagcctggccgaccacgagtacacagcccggcccaatgccttcggcatggcccaggccaacagaagcaccacccccatggcccctggggtcttcctgacccagaggcggcccagcgtgggcagccagagcaaccaggccggccagggcaagaggcccaagaagggcctggccacagccaagcagaggctgggccgcatcctgaagatccacagaaatggcaagctgctgctgcggcaggtgattgtgcaggctgaatgtcggcaggccatccacgagcccaagctgaagagaagagatgcccacccctag

SEQ ID NO: 163727 - DNA, 3183 bp, synthetic construct
  misc_feature 1..3183: note = Description of Artificial Sequence: Synthetic coding sequence
  source 1..3183: mol_type = other DNA
atgaacagaagccgggccatcgtgcagaggggccgggtgctgcccccaccagcccccctggacaccaccaacctggccggccgccgcaccctgcagggccgggccaagatggcctctgtgcctgtgtactgcctgtgccgcctgccctatgatgtgacccgcttcatgattgaatgtgacatgtgccaggactggttccacggcagctgtgtgggcgtggaggaggagaaggctgctgacatcgacctgtaccactgccccaactgtgaggtgctgcacggccccagcatcatgaagaagagaagaggcagcagcaagggccatgacacccacaagggcaagcctgtgaagacaggcagccccacctttgtgcgggagctgcggagcaggacctttgacagcagtgatgaggtgatcctgaagcccactggaaaccagctgactgtggagttcctggaggagaacagcttctctgtgcccatcctggtgctgaagaaggatggcctgggcatgaccctgcccagccccagcttcaccgtgagagatgtggagcactacgtgggcagtgacaaggagattgatgtgattgatgtgacccggcaggccgactgcaagatgaagctgggggactttgtgaagtactactacagcggcaagcgggagaaggtgctgaatgtcatcagcctggagttcagtgacacccggctgagcaacctggtggagacccccaagatcgtgaggaagctgtcctgggtggagaacctgtggccagaagaatgtgtgtttgagcggcccaacgtgcagaagtactgcctgatgtctgtgcgggacagctacacagacttccacatcgactttggaggcacctctgtgtggtaccacgtgctgaagggggagaagatcttctacctgatccggcccaccaatgccaacctgaccctgtttgagtgctggagcagcagcagcaaccagaatgagatgttctttggagaccaggtggacaagtgctacaagtgcagcgtgaagcagggccagaccctcttcatccccaccggctggattcatgctgtgctgacccctgtggactgcctggccttcggcggcaacttcctgcacagcctgaacatcgagatgcagctgaaggcctatgaaattgagaagaggctgagcacagctgacctcttccgcttccccaactttgagaccatctgctggtacgtgggcaagcacatcctggacatcttccggggcctgcgggagaacagaagacacccagccagctacctggtgcatggaggcaaggccctgaacctggccttccgggcctggaccaggaaggaggccctgcctgaccatgaagatgagatccctgagaccgtgaggacagtgcagctgatcaaggacctggcccgggagatccggctggtggaggacatcttccagcagaatgtgggcaagaccagcaacatcttcggcctgcagaggatcttccctgctggcagcatccccctgaccaggcctgcccacagcacctctgtgtccatgagccggctgagcctgcccagcaagaatggcagcaagaagaagggcctgaagcccaaggagctgttcaagaaggccgagaggaagggcaaggagagcagcgccctgggccctgctggccagctgagctacaacctgatggacacctacagccaccaggccctgaagacaggcagcttccagaaggccaagttcaacatcaccggggcctgcctgaatgacagtgatgatgacagcccagacctggacctggatggaaatgaaagccccctggccctgctgatgagcaatggcagcaccaagagggtgaagagcctgagcaagagcaggaggaccaagatcgccaagaaggtggacaaggcccggctgatggccgagcaggtgatggaggatgaatttgacctggacagtgatgatgagctgcagattgatgagcggctgggcaaggagaaggccaccctcatcatccggcccaagttccccaggaagctgccccgggccaagccctgcagcgaccccaacagagtgcgggagcctggagaggtggagtttgacatcgaggaggactacaccacagatgaggacatggtggagggcgtggagggcaagctgggcaatggcagcggggccggcggcatcctggacctgctgaaggccagccggcaggtgggcggccctgactatgctgccctgacagaggccccagccagccccagcacccaggaggccatccagggcatgctgtgcatggccaacctgcagagcagcagcagcagccctgccaccagcagcctgcaggcctggtggacaggaggccaggacaggagcagcggcagcagcagcagcggcctgggcaccgtgagcaacagccctgccagccagaggaccccaggcaagaggcccatcaagaggcctgcctactggaggacagagagcgaggaggaggaggagaatgccagcctggatgagcaggacagcctgggcgcctgcttcaaggatgctgagtacatctaccccagcctggagagtgatgatgatgatcctgccctgaagagccggcccaagaagaagaagaacagtgatgatgccccctggagccccaaggcccgggtgacccccaccctgcccaagcaggacaggcctgtgcgggagggcaccagggtggccagcattgaaacaggcctggccgctgctgctgccaagctggcccagcaggagctgcagaaggcccagaagaagaagtacatcaagaagaagcccctgctgaaggaggtggagcagccccggccccaggacagcaacctgagcctgactgtgcctgcccccaccgtggccgccaccccccagctggtgaccagcagcagccccctgcccccacctgagcccaagcaggaggccctgagcggcagcctggccgaccacgagtacacagcccggcccaatgccttcggcatggcccaggccaacagaagcaccacccccatggcccctggggtcttcctgacccagaggcggcccagcgtgggcagccagagcaaccaggccggccagggcaagaggcccaagaagggcctggccacagccaagcagaggctgggccgcatcctgaagatccacagaaatggcaagctgctgctgtag

SEQ ID NO: 163728 - DNA, 912 bp, synthetic construct
  misc_feature 1..912: note = Description of Artificial Sequence: Synthetic coding sequence
  source 1..912: mol_type = other DNA
atggacacctacagccaccaggccctgaagacaggcagcttccagaaggccaagttcaacatcaccggggcctgcctgaatgacagtgatgatgacagcccagacctggacctggatggaaatgaaagccccctggccctgctgatgagcaatggcagcaccaagagggtgaagagcctgagcaagagcaggaggaccaagatcgccaagaaggtggacaaggcccggctgatggccgagcaggtgatggaggatgaatttgacctggacagtgatgatgagctgcagattgatgagcggctgggcaaggagaaggccaccctcatcatccggcccaagttccccaggaagctgccccgggccagcctggccctgacccccacagaatttgtgaaccaggagaagctgagcctgaccctgcggaggaccatccagcagatgaggacctggtggaagggcctgaaggccagcctgggcatggtggtggccctggtggccttcctgatctgcagcaggcctgctggccgctggggagacctgaccatgctgcccagcccccggccccagctgctgcctgccctgcggcggcccagccgggcctgctgtgcctggcccacctgcagcccccaccggccccaccggctgcccctggcctgcaggcctgggggcctgggggaccgcatcgaggccgtgggcgccccagctgtgggctgggcccagtgcctgactgtgctgctgcccagcgccccccagggcagcggccccagcagcggccagcacactggagagccccgggccaggagaagaagaaggacccctgtgtggatgaacagaacagcctgggagcgggccagcaggatgcagagcatcagcatcctgcactggagcctgatgatgatgaccctgctgtag

SEQ ID NO: 163729 - DNA, 2862 bp, synthetic construct
  misc_feature 1..2862: note = Description of Artificial Sequence: Synthetic coding sequence
  source 1..2862: mol_type = other DNA
attgtgcagaggggccgggtgctgcccccaccagcccccctggacaccaccaacctggccggccgccgcaccctgcagggccgggccaagatggcctctgtgcctgtgtactgcctgtgccgcctgccctatgatgtgacccgcttcatgattgaatgtgacatgtgccaggactggttccacggcagctgtgtgggcgtggaggaggagaaggctgctgacatcgacctgtaccactgccccaactgtgaggtgctgcacggccccagcatcatgaagaagagaagaggcagcagcaagggccatgacacccacaagggcaagcctgtgaagacaggcagccccacctttgtgcgggagctgcggagcaggacctttgacagcagtgatgaggtgatcctgaagcccactggaaaccagctgactgtggagttcctggaggagaacagcttctctgtgcccatcctggtgctgaagaaggatggcctgggcatgaccctgcccagccccagcttcaccgtgagagatgtggagcactacgtgggcagtgacaaggagattgatgtgattgatgtgacccggcaggccgactgcaagatgaagctgggggactttgtgaagtactactacagcggcaagcgggagaaggtgctgaatgtcatcagcctggagttcagtgacacccggctgagcaacctggtggagacccccaagatcgtgaggaagctgtcctgggtggagaacctgtggccagaagaatgtgtgtttgagcggcccaacgtgcagaagtactgcctgatgtctgtgcgggacagctacacagacttccacatcgactttggaggcacctctgtgtggtaccacgtgctgaagggggagaagatcttctacctgatccggcccaccaatgccaacctgaccctgtttgagtgctggagcagcagcagcaaccagaatgagatgttctttggagaccaggtggacaagtgctacaagtgcagcgtgaagcagggccagaccctcttcatccccaccggctggattcatgctgtgctgacccctgtggactgcctggccttcggcggcaacttcctgcacagcctgaacatcgagatgcagctgaaggcctatgaaattgagaagaggctgagcacagctgacctcttccgcttccccaactttgagaccatctgctggtacgtgggcaagcacatcctggacatcttccggggcctgcgggagaacagaagacacccagccagctacctggtgcatggaggcaaggccctgaacctggccttccgggcctggaccaggaaggaggccctgcctgaccatgaagatgagatccctgagaccgtgaggacagtgcagctgatcaaggacctggcccgggagatccggctggtggagttcaacatcactggagcctgcctgaatgacagtgatgatgacagcccagacctggacctggatggaaatgaaagccccctggccctgctgatgagcaatggcagcaccaagagggtgaagagcctgagcaagagcaggaggaccaagatcgccaagaaggtggacaaggcccggctgatggccgagcaggtgatggaggatgaatttgacctggacagtgatgatgagctgcagattgatgagcggctgggcaaggagaaggccaccctcatcatccggcccaagttccccaggaagctgccccgggccaagccctgcagcgaccccaacagagtgcgggagcccggggaggtggagtttgatattgaggaggactacaccacagatgaggacatggtggagggcgtggagggcaagctgggcaatggaagtggagctgggggcatcctggacctgctgaaggccagccggcaggtgggcggccctgactatgctgccctgacagaggccccagccagccccagcacccaggaggccatccagggcatgctgtgcatggccaacctgcagagcagcagcagcagccctgccaccagcagcctgcaggcctggtggacaggaggccaggacaggagcagcggcagcagcagcagcggcctgggcaccgtgagcaacagccctgccagccagaggacccctgggaagaggcccatcaagaggcctgcctactggaggacagaaagtgaggaggaggaggagaatgccagcctggatgagcaggacagcctgggcgcctgcttcaaggatgctgagtacatctaccccagcctggagagtgatgatgatgatcctgccctgaagagccggcccaagaagaagaagaacagtgatgatgccccctggagccccaaggcccgggtgacccccaccctgcccaagcaggacaggcctgtgcgggagggcaccagggtggccagcattgagaccggcctggccgctgctgctgccaagctggcccagcaggagctgcagaaggcccagaagaagaagtacatcaagaagaagcccctgctgaaggaggtggagcagccccggccccaggacagcaacctgagcctgactgtgcctgcccccaccgtggccgccaccccccagctggtgaccagcagcagccccctgcccccacctgagcccaagcaggaggccctgagcggcagcctggccgaccacgagtacacagcccggcccaatgccttcggcatggcccaggccaacagaagcaccacccccatggcccctggggtcttcctgacccagaggcggcccagcgtgggcagccagagcaaccaggccggccagggcaagaggcccaagaagggcctggccacagccaagcagaggctgggccgcatcctgaagatccacagaaatggcaagctgctgctgtag

SEQ ID NO: 163730 - DNA, 345 bp, synthetic construct
  misc_feature 1..345: note = Description of Artificial Sequence: Synthetic coding sequence
  source 1..345: mol_type = other DNA
atggcctctgtgcctgtgtactgcctgtgccgcctgccctatgatgtgacccgcttcatgattgaatgtgacatgtgccaggactggttccacggcagctgtgtgggcgtggaggaggagaaggctgctgacatcgacctgtaccactgccccaactgtgaggtgctgcacggccccagcatcatgaagaagagaagaggcagcagcaagggccatgacacccacaagggcaagcctgtgaagacaggcagccccacctttgtgcgggagctgcggagcaggacctttgacagcagtgatgaggtgatcctgaagcccactggaaaccagctgactgtggagtag

SEQ ID NO: 163731 - DNA, 381 bp, synthetic construct
  misc_feature 1..381: note = Description of Artificial Sequence: Synthetic coding sequence
  source 1..381: mol_type = other DNA
atggcctctgtgcctgtgtactgcctgtgccgcctgccctatgatgtgacccgcttcatgattgaatgtgacatgtgccaggactggttccacggcagctgtgtgggcgtggaggaggagaaggctgctgacatcgacctgtaccactgccccaactgtgaggtgctgcacggccccagcatcatgaagaagagaagaggcagcagcaagggccatgacacccacaagggcaagcctgtgaagacaggcagccccacctttgtgcgggagctgcggagcaggacctttgacagcagtgatgaggtgatcctgaagcccactggaaaccagctgactgtggagttcctggaggagaacagcttctctgtgcccatcctgtag

SEQ ID NO: 163732 - DNA, 294 bp, synthetic construct
  misc_feature 1..294: note = Description of Artificial Sequence: Synthetic coding sequence
  source 1..294: mol_type = other DNA
atggcctctgtgcctgtgtactgcctgtgccgcctgccctatgatgtgacccgcttcatgattgaatgtgacatgtgccaggactggttccacggcagctgtgtgggcgtggaggaggagaaggctgctgacatcgacctgtaccactgccccaactgtgaggtgctgcacggccccagcatcatgaagaagagaagaggcagcagcaagggccatgacacccacaagggcaagcctgtgaagacaggcagccccacctttgtgcgggagctgcggagcaggacctttgattag

SEQ ID NO: 163733 - DNA, 348 bp, synthetic construct
  misc_feature 1..348: note = Description of Artificial Sequence: Synthetic coding sequence
  source 1..348: mol_type = other DNA
atggcctctgtgcctgtgtactgcctgtgccgcctgccctatgatgtgacccgcttcatgattgaatgtgacatgtgccaggactggttccacggcagctgtgtgggcgtggaggaggagaaggctgctgacatcgacctgtaccactgccccaactgtgaggtgctgcacggccccagcatcatgaagaagagaagaggcagcagcaagggccatgacacccacaagggcaagcctgtgaagacaggcagccccacctttgtgcgggagctgcggagcaggacctttgacagcagtgatgaggtgatcctgaagcccactggaaaccagctgactgtggagttctag

SEQ ID NO: 163734 - DNA, 294 bp, synthetic construct; identical to SEQ ID NO: 163732
  misc_feature 1..294: note = Description of Artificial Sequence: Synthetic coding sequence
  source 1..294: mol_type = other DNA

SEQ ID NO: 163735 - DNA, 447 bp, synthetic construct
  misc_feature 1..447: note = Description of Artificial Sequence: Synthetic coding sequence
  source 1..447: mol_type = other DNA
atgaacagaagccgggccatcgtgcagaggggccgggtgctgcccccaccagcccccctggacaccaccaacctggccggccgccgcaccctgcagggccgggccaagatggcctctgtgcctgtgtactgcctgtgccgcctgccctatgatgtgacccgcttcatgattgaatgtgacatgtgccaggactggttccacggcagctgtgtgggcgtggaggaggagaaggctgctgacatcgacctgtaccactgccccaactgtgaggtgctgcacggccccagcatcatgaagaagagaagaggcagcagcaagggccatgacacccacaagggcaagcctgtgaagacaggcagccccacctttgtgcgggagctgcggagcaggacctttgacagcagtgatgaggtgatcctgaagcccactggaaaccagctgacctag

SEQ ID NO: 163736 - DNA, 2637 bp, synthetic construct
  misc_feature 1..2637: note = Description of Artificial Sequence: Synthetic coding sequence
  source 1..2637: mol_type = other DNA
atggcctctgtgcctgtgtactgcctgtgccgcctgccctatgatgtgacccgcttcatgattgaatgtgacatgtgccaggactggttccacggcagctgtgtgggcgtggaggaggagaaggctgctgacatcgacctgtaccactgccccaactgtgaggtgctgcacggccccagcatcatgaagaagagaagaggcagcagcaagggccatgacacccacaagggcaagcctgtgaagacaggcagccccacctttgtgcgggagctgcggagcaggacctttgacagcagtgatgaggtgatcctgaagcccactggaaaccagctgactgtggagttcctggaggagaacagcttctctgtgcccatcctggtgctgaagaaggatggcctgggcatgaccctgcccagccccagcttcaccgtgagagatgtggagcactacgtgggcagtgacaaggagattgatgtgattgatgtgacccggcaggccgactgcaagatgaagctgggggactttgtgaagtactactacagcggcaagcgggagaaggtgctgaatgtcatcagcctggagttcagtgacacccggctgagcaacctggtggagacccccaagatcgtgaggaagctgtcctgggtggagaacctgtggccagaagaatgtgtgtttgagcggcccaacgtgcagaagtactgcctgatgtctgtgcgggacagctacacagacttccacatcgactttggaggcacctctgtgtggtaccacgtgctgaagggggagaagatcttctacctgatccggcccaccaatgccaacctgaccctgtttgagtgctggagcagcagcagcaaccagaatgagatgttctttggagaccaggtggacaagtgctacaagtgcagcgtgaagcagggccagaccctcttcatccccaccggctggattcatgctgtgctgacccctgtggactgcctggccttcggcggcaacttcctgcacagcctgaacatcgagatgcagctgaaggcctatgaaattgagaagaggctgagcacagctgacctcttccgcttccccaactttgagaccatctgctggtacgtgggcaagcacatcctggacatcttccggggcctgcgggagaacagaagacacccagccagctacctggtgcatggaggcaaggccctgaacctggccttccgggcctggaccaggaaggaggccctgcctgaccatgaagatgagatccctgagaccgtgaggacagtgcagctgatcaaggacctggcccgggagatccggctggtggaggacatcttccagcagaatgtgggcaagaccagcaacatcttcggcctgcagaggatcttccctgctggcagcatccccctgaccaggcctgcccacagcacctctgtgtccatgagccggctgagcctgcccagcaagaatggcagcaagaagaagggcctgaagcccaaggagctgttcaagaaggccgagaggaagggcaaggagagcagcgccctgggccctgctggccagctgagctacaacctgatggacacctacagccaccaggccctgaagacaggcagcttccagaaggccaagttcaacatcaccggggcctgcctgaatgacagtgatgatgacagcccagacctggacctggatggaaatgaaagccccctggccctgctgatgagcaatggcagcaccaagagggtgaagagcctgagcaagagcaggaggaccaagatcgccaagaaggtggacaaggcccggctgatggccgagcaggtgatggaggatgaatttgacctggacagtgatgatgagctgcagattgatgagcggctgggcaaggagaaggccaccctcatcatccggcccaagttccccaggaagctgccccgggccaagccctgcagcgaccccaacagagtgcgggagcctggagaggtggagtttgacatcgaggaggactacaccacagatgaggacatggtggagggcgtggagggctaccagacagccaccccagccccagcccagggcgccagcgaggccccagccagccccagcacccaggaggccatccagggcatgctgtgcatggccaacctgcagagcagcagcagcagccctgccaccagcagcctgcaggcctggtggacaggaggccaggacaggagcagcggcagcagcagcagcggcctgggcaccgtgagcaacagccctgccagccagaggacccctgggaagaggcccatcaagaggcctgcctactggaggacagaaagtgaggaggaggaggagaatgccagcctggatgagcaggacagcctgggcgcctgcttcaaggatgctgagtacatctaccccagcctggagagtgatgatgatgatcctgccctgaagagccggcccaagaagaagaagaacagtgatgatgccccctggagccccaaggcccgggtgacccccaccctgcccaagcaggacaggcctgtgcgggagggcaccagggtggccagcattgagaccggcctggccgctgctgctgccaagctggcccagcaggtgaagaagatgaagctgagcctgacagattctggatag

SEQ ID NO: 163737 - DNA, 417 bp, synthetic construct
  misc_feature 1..417: note = Description of Artificial Sequence: Synthetic coding sequence
  source 1..417: mol_type = other DNA
atgaagctgcccatcttcatcgcagatgccttcaccgcccgggccttccggggcaacccagctgctgtgtgcctgctggagaatgagctggatgaggacatgcaccagaagatcgcccgggagatgaacctgtctgaaacagccttcatcaggaagctgcaccccacagacaactttgcccagaagaacatgaacagcaccctgacctttgtgaccctgagcggggagctgcgggcccggcgggcagaagatggcatcgtgctggacctgcccctgtacccagcccacccccaggacttccacgaggtggaggacctgatcaagacagccatcggcaacaccctggtgcaggacatctgctacagcccagacacccagaagctgctggtgcggctgagtgatgtgtacaacagatag

SEQ ID NO: 163738 - DNA, 867 bp, synthetic construct
  misc_feature 1..867: note = Description of Artificial Sequence: Synthetic coding sequence
  source 1..867: mol_type = other DNA
atgaagctgcccatcttcatcgcagatgccttcaccgcccgggccttccggggcaacccagctgctgtgtgcctgctggagaatgagctggatgaggacatgcaccagaagatcgcccgggagatgaacctgtctgaaacagccttcatcaggaagctgcaccccacagacaactttgcccagagcagctgcttcggcctgcgctggttcaccccagccagcgaggtgcccctgtgtggccacgccaccctggccagcgctgctgtgctcttccacaagatcaagaacatgaacagcaccctgacctttgtgaccctgtctggagagctgcgggccaggagagcagaagatggcatcgtgctggacctgcccctgtacccagcccacccccaggacttccacgaggtggaggacctgatcaagacagccatcggcaacaccctggtgcaggacatctgctacagcccagacacccagaagctgctggtgcggctgagtgatgtgtacaacagaagcttcctggagaacctgaaggtgaacacagagaacctgctgcaggtggagaacacaggcaaggtgaagggcctcatcctgaccctgaagggggagcccggcggccagacccaggcctttgacttctacagccgctactttgccccctgggtgggcgtggccgaggaccctgtgacaggcagcgcccatgctgtgctgagcagctactggagccagcacctgggcaagaaggagatgcacgccttccagtgcagccacagaggaggagagctgggcatcagcctgcggccagatggccgggtggacatccggggcggcgctgctgtggtgctggagggcaccctgacagcctag

SEQ ID NO: 163739 - DNA, 768 bp, synthetic construct
  misc_feature 1..768: note = Description of Artificial Sequence: Synthetic coding sequence
  source 1..768: mol_type = other DNA
atgcaccagaagatcgcccgggagatgaacctgtctgaaacagccttcatcaggaagctgcaccccacagacaactttgcccagagcagctgcttcggcctgcgctggttcaccccagccagcgaggtgcccctgtgtggccacgccaccctggccagcgctgctgtgctcttccacaagatcaagaacatgaacagcaccctgacctttgtgaccctgagcggggagctgcgggcccggcgggcagaagatggcatcgtgctggacctgcccctgtacccagcccacccccaggacttccacgaggtggaggacctgatcaagacagccatcggcaacaccctggtgcaggacatctgctacagcccagacacccagaagctgctggtgcggctgagtgatgtgtacaacagaagcttcctggagaacctgaaggtgaacacagagaacctgctgcaggtggagaacacaggcaaggtgaagggcctcatcctgaccctgaagggggagcccggcggccagacccaggcctttgacttctacagccgctactttgccccctgggtgggcgtggctgaagatcctgtgactggaagtgcccatgctgtgctgagcagctactggagccagcacctgggcaagaaggagatgcacgccttccagtgcagccaccggggcggggagctgggcatcagcctgcggccagatggccgggtggacatccggggcggcgctgctgtggtgctggagggcaccctgacagcctag

SEQ ID NO: 163740 - DNA, 867 bp, synthetic construct; identical to SEQ ID NO: 163738
  misc_feature 1..867: note = Description of Artificial Sequence: Synthetic coding sequence
  source 1..867: mol_type = other DNA

SEQ ID NO: 163741 - DNA, 843 bp, synthetic construct
  misc_feature 1..843: note = Description of Artificial Sequence: Synthetic coding sequence
  source 1..843: mol_type = other DNA
atgaagctgcccatcttcatcgcagatgccttcaccgcccgggccttccggggcaacccagctgctgtgtgcctgctggagaatgagctggatgaggacatgcaccagaagatcgcccgggagatgaacctgtctgaaacagccttcatcaggaagctgcaccccacagacaactttgcccagagcagctgcttcggcctgcgctggttcaccccagccagcgaggtgcccctgtgtggccacgccaccctggccagcgctgctgtgctcttccacaagatcaagaacatgaacagcaccctgacctttgtgaccctgtctggagagctgcgggccaggagagcagaagatggcatcgtgctggacctgcccctgtacccagcccacccccaggacttccacgaggtggaggacctgatcaagacagccatcggcaacaccctggtgcaggacatctgctacagcccagacacccagaagctgctggtgcggctgagtgatgtgtacaacagaagcttcctggagaacctgaaggtgaacacagagaacctgctgcaggtggagaacacaggcaaggtgaagggcctcatcctgaccctgaagggggagcccggcggccagacccaggcctttgacttctacagccgctactttgccccctgggtgggcgtggccgaggaccctgtgacaggcagcgcccatgctgtgctgagcagctactggagccagcacctgggcaagaaggagatgcacggccgcacagccctgtaccagttcctgttctacctgcccaacagcaagctggtgttcctgctgatctgcaccatccccctgaagatgtag

SEQ ID NO: 163742 - DNA, 1356 bp, synthetic construct
  misc_feature 1..1356: note = Description of Artificial Sequence: Synthetic coding sequence
  source 1..1356: mol_type = other DNA
atggtgggcagcgccctgcggcggggggcccacgcctacgtgtacctggtgtccaaggccagccacatcagccggggccaccagcaccaggcctggggcagccggcccccagctgctgaatgtgccacccagagggcccctggctctgtggtggagctgctgggcaagagctacccccaggatgaccacagcaacctgaccaggaaggtgctgaccagggtgggcaggaacctgcacaaccagcagcaccaccccctgtggctgatcaaggagcgggtgaaggagcacttctacaagcagtatgtgggccgcttcggcacccccctcttctctgtgtatgacaacctgagccctgtggtgaccacctggcagaactttgacagcctgctgatcccagctgaccaccccagcaggaagaagggggacaactactacctgaacagaacccacatgctgcgggcccacaccagcgcccaccagtgggacctgctgcacgccggcctggatgccttcctggtggtgggagatgtgtacagaagagaccagattgacagccagcactaccccatcttccaccagctggaggccgtgcggctcttcagcaagcatgagctgtttgctggcatcaaggatggagagagcctgcagctgtttgagcagagcagccgcagcgcccacaagcaggagacccacaccatggaggccgtgaagctggtggagtttgacctgaagcagaccctgacccggctgatggcccacctgtttggagatgagctggagatccgctgggtggactgctacttccccttcacccaccccagctttgagatggagatcaacttccacggggagtggctggaggtgctgggctgcggcgtgatggagcagcagctggtgaacagcgctggggcccaggaccgcatcggctgggccttcggcctgggcctggagcggctggccatgatcctgtatgacatcccagacatccgcctcttctggtgtgaagatgagcgcttcctgaagcagttctgtgtgagcaacatcaaccagaaggtgaagttccagcccctgagcaagtacccagctgtgatcaatgacatctccttctggctgcccagcgagaactatgcagaaaatgacttctatgacctggtgaggaccatcggcggggacctggtggagaaggtggacctgattgacaagtttgtgcaccccaagacccacaagaccagccactgctaccgcatcacctaccgccacatggagaggaccctgagccagcgggaggtgcgccacatccaccaggccctgcaggaggccgctgtgcagctgctgggcgtggagggccgcttctag

SEQ ID NO: 163743 - DNA, 1356 bp, synthetic construct; identical to SEQ ID NO: 163742
  misc_feature 1..1356: note = Description of Artificial Sequence: Synthetic coding sequence
  source 1..1356: mol_type = other DNA

SEQ ID NO: 163744 - DNA, 468 bp, synthetic construct
  misc_feature 1..468: note = Description of Artificial Sequence: Synthetic coding sequence
  source 1..468: mol_type = other DNA
atgctgcgggcccacaccagcgcccaccagtgggacctgctgcacgccggcctggatgccttcctggtggtgggagatgtgtacagaagagaccagattgacagccagcactaccccatcttccaccagctggaggccgtgcggctcttcagcaagcatgagctgtttgctggcatcaaggatggagagagcctgcagctgtttgagcagagcagccgcagcgcccacaagcaggagacccacaccatggaggccgtgaagctggtggagtttgacctgaagcagaccctgacccggctgatggcccacctgtttggagatgagctggagatccgctgggtggactgctacttccccttcacccaccccagctttgagatggagatcaacttccacggggagtggctggaggtgctgggctgcggcgtgatggagcagcagctggtgaacagcggcggggccacctag

SEQ ID NO: 163745 - DNA, 306 bp, synthetic construct
  misc_feature 1..306: note = Description of Artificial Sequence: Synthetic coding sequence
  source 1..306: mol_type = other DNA
ctctttgctggcatcaaggatggagagagcctgcagctgtttgagcagagcagccgcagcgcccacaagcaggagacccacaccatggaggccgtgaagctggtggagtttgacctgaagcagaccctgacccggctgatggcccacctgtttggagatgagctggagatccgctgggtggactgctacttccccttcacccaccccagctttgagatggagatcaacttccacggggagtggctggaggtgctgggctgcggcgtgatggagcagcagctggtgaacagcggcggggccacctag

SEQ ID NO: 163746 - DNA, 849 bp, synthetic construct
  misc_feature 1..849: note = Description of Artificial Sequence: Synthetic coding sequence
  source 1..849: mol_type = other DNA
atgtctggagctgacaggagccccaatgctggggccgccccagacagcgcccctggccaggccgctgtggccagcgcctaccagagatttgagccccgggcctacctgaggaacaactatgccccacccaggggggacctgtgcaaccccaatggagtgggcccctggaagctgcgctgcctggcccagacctttgccactggagaggtgtctggccgcaccctgattgacatcggcagcggccccaccgtgtaccagctgctgagcgcctgcagccactttgaggacatcaccatgacagacttcctggaggtgaaccggcaggagctgggccgctggctgcaggaggagcccggggccttcaactggagcatgtacagccagcacgcctgcctgattgagggcaagggggagtgctggcaggacaaggagcggcagctgcgggcccgggtgaagagggtgctgcccattgatgtgcaccagccccagcccctgggcgccggcagccctgcccccctgcctgcagatgccctggtgtctgccttctgcctggaggccgtgtccccagacctggccagcttccagagggccctggaccacatcaccaccctgctgcggcctgggggccacctgctgctgattggagccctggaggagagctggtacctggccggggaggcccggctgactgtggtgcctgtgtctgaggaggaggtgcgggaggccctggtgcgcagcggctacaaggtgcgggacctgcggacctacatcatgcctgcccacctgcagacaggagtggatgatgtgaagggcgtcttctttgcctgggcccagaaggtgggcctgtag

SEQ ID NO: 163747 - DNA, 555 bp, synthetic construct
  misc_feature 1..555: note = Description of Artificial Sequence: Synthetic coding sequence
  source 1..555: mol_type = other DNA
atgacagacttcctggaggtgaaccggcaggagctgggccgctggctgcaggaggagcccggggccttcaactggagcatgtacagccagcacgcctgcctgattgagggcaagggggagtgctggcaggacaaggagcggcagctgcgggcccgggtgaagagggtgctgcccattgatgtgcaccagccccagcccctgggcgccggcagccctgcccccctgcctgcagatgccctggtgtctgccttctgcctggaggccgtgtccccagacctggccagcttccagagggccctggaccacatcaccaccctgctgcggcctgggggccacctgctgctgattggagccctggaggagagctggtacctggccggggaggcccggctgactgtggtgcctgtgtctgaggaggaggtgcgggaggccctggtgcgcagcggctacaaggtgcgggacctgcggacctacatcatgcctgcccacctgcagacaggagtggatgatgtgaagggcgtcttctttgcctgggcccagaaggtgggcctgtag

SEQ ID NO: 163748 - DNA, 741 bp, synthetic construct
  misc_feature 1..741: note = Description of Artificial Sequence: Synthetic coding sequence
  source 1..741: mol_type = other DNA
atggaggaggccaagagccagagcctggaggaggactttgagggccaggccacccacacaggccccaagggcgtcatcaatgactggaggaagttcaagctggagagccaggacagcgacagcatcccccccagcaagaaggagatcctgcggcagatgagcagcccccagagcagaaatggcaaggacagcaaggagcgggtgtccaggaagatgagcatccaggagtatgagctgatccacaaggagaaggaggatgagaactgcctgaggaagtaccgccggcagtgcatgcaggacatgcaccagaagctgagctttggccccaggtatggctttgtgtatgagctggagaccgggaagcagttcctggagaccatcgagaaggagctgaagatcaccaccatcgtggtgcacatctatgaagatggcatcaagggctgtgatgccctgaacagcagcctgacctgcctggccgctgagtaccccatcgtgaagttctgcaagatcaaggccagcaacacaggagctggggaccgcttcagcctggatgtgctgcccaccctgctgatctacaagggcggggagctgatcagcaacttcatctctgtggccgagcagtttgctgaggagttctttgctggagatgtggagagcttcctgaatgaatatggcctgctgcctgagcgggaggtgcacgtgctggagcacaccaagattgaggaggaggatgtggagtag

SEQ ID NO: 163749 - DNA, 741 bp, synthetic construct; identical to SEQ ID NO: 163748
  misc_feature 1..741: note = Description of Artificial Sequence: Synthetic coding sequence
  source 1..741: mol_type = other DNA

SEQ ID NO: 163750 - DNA, 585 bp, synthetic construct
  misc_feature 1..585: note = Description of Artificial Sequence: Synthetic coding sequence
  source 1..585: mol_type = other DNA
atgagcagcccccagagcagaaatggcaaggacagcaaggagcgggtgtccaggaagatgagcatccaggagtatgagctgatccacaaggagaaggaggatgagaactgcctgaggaagtaccgccggcagtgcatgcaggacatgcaccagaagctgagctttggccccaggtatggctttgtgtatgagctggagaccgggaagcagttcctggagaccatcgagaaggagctgaagatcaccaccatcgtggtgcacatctatgaagatggcatcaagggctgtgatgccctgaacagcagcctgacctgcctggccgctgagtaccccatcgtgaagttctgcaagatcaaggccagcaacacaggagctggggaccgcttcagcctggatgtgctgcccaccctgctgatctacaagggcggggagctgatcagcaacttcatctctgtggccgagcagtttgctgaggagttctttgctggagatgtggagagcttcctgaatgaatatggcctgctgcctgagcgggaggtgcacgtgctggagcacaccaagattgaggaggaggatgtggagtag

SEQ ID NO: 163751 - DNA, 585 bp, synthetic construct; identical to SEQ ID NO: 163750
  misc_feature 1..585: note = Description of Artificial Sequence: Synthetic coding sequence
  source 1..585: mol_type = other DNA

SEQ ID NO: 163752 - DNA, 906 bp, synthetic construct
  misc_feature 1..906: note = Description of Artificial Sequence: Synthetic coding sequence
  source 1..906: mol_type = other DNA
atgaccaccctggatgacaagctgctgggggagaagctgcagtactactacagcagcagtgaagatgaagattctgaccacgaggacaaggaccggggccgctgtgccccagccagcagctctgtgcctgctgaggccgagctggccggggagggcatctctgtgaacacaggccccaagggcgtcatcaatgactggaggcgcttcaagcagctggagacagagcagcgggaggagcagtgccgggagatggagcggctcatcaagaagctgtccatgacctgccgcagccacctggatgaggaggaggagcagcagaagcagaaggacctgcaggagaagatcagcggcaagatgaccctgaaggagtttgccatcatgaatgaagaccaggatgatgaggagttcctgcagcagtacaggaagcagaggatggaggagatgaggcagcagctgcacaagggcccccagttcaagcaggtgtttgagatcagcagcggggagggcttcctggacatgattgacaaggagcagaagagcatcgtcatcatggtgcacatctatgaagatggcatccctggaacagaggccatgaatggctgcatgatctgcctggccgctgagtacccagctgtgaagttctgcaaggtgaagagcagcgtcatcggggccagcagccagttcaccagaaatgccctgcctgccctgctgatctacaagggcggggagctgattggcaactttgtgcgggtgacagaccagctgggagatgacttctttgctgtggacctggaggccttcctgcaggagtttggcctgctgcctgagaaggaggtgctggtgctgacctctgtgaggaacagcgccacctgccacagcgaggacagcgacctggagattgattag

SEQ ID NO: 163753 - DNA, 330 bp, synthetic construct
  misc_feature 1..330: note = Description of Artificial Sequence: Synthetic coding sequence
  source 1..330: mol_type = other DNA
tgactgcagtactactacagcagcagtgaagatgaggacagcgaccacgaggacaaggaccggggccgctgtgccccagccagcagctctgtgcctgctgaggccgagctggccggggagggcatctctgtgaacacaggccccaagggcgtcatcaatgactggaggcgcttcaagcagctggagacagagcagcgggaggagcagtgccgggagatggagcggctcatcaagaagctgtccatgacctgccgcagccacctggatgaggaggaggagcagcagaagcagaaggacctgcaggagaagatcagcggcaaggagaggtag

SEQ ID NO: 163754 - DNA, 276 bp, synthetic construct
  misc_feature 1..276: note = Description of Artificial Sequence: Synthetic coding sequence
  source 1..276: mol_type = other DNA
tgatgtgccccagccagcagctctgtgcctgctgaggccgagctggccggggagggcatctctgtgaacacaggccccaagggcgtcatcaatgactggaggcgcttcaagcagctggagacagagcagcgggaggagcagtgccgggagatggagcggctcatcaagaagctgtccatgacctgccgcagccacctggatgaggaggaggagcagcagaagcagaaggacctgcaggagaagatcagcggcaagaagtcctgggccatcctgtag

SEQ ID NO: 163755 - DNA, 726 bp, synthetic construct
  misc_feature 1..726: note = Description of Artificial Sequence: Synthetic coding sequence
  source 1..726: mol_type = other DNA
atgcaggaccccaatgaagacacagagtggaatgacatcctgcgggactttggcatcctgccccccaaggaggagagcaaggatgaaattgaggagatggtgctgcggctgcagaaggaggccatggtgaagccctttgagaagatgaccctggcccagctgaaggaggccgaggatgaatttgatgaggaggacatgcaggccgtggagacctacaggaagaagaggctgcaggagtggaaggccctgaagaagaagcagaagtttggagagctgcgggagatcagcggcaaccagtatgtgaatgaggtgaccaatgcagaagaagatgtgtgggtgatcatccacctgtaccgcagcagcatccccatgtgcctgctggtgaaccagcacctgagcctgctggccaggaagtttcctgagaccaagtttgtgaaggccatcgtgaacagctgcatccagcactaccatgacaactgcctgcccaccatctttgtgtacaagaatggccagatcgaggccaagttcatcggcatcattgaatgtggcggcatcaacctgaagctggaggagctggagtggaagctggccgaggtgggcgccatccagacagacctggaggagaaccccaggaaggacatggtggacatgatggtgagcagcatccggaacaccagcatccatgatgacagcgacagcagcaacagcgacaatgacaccaagtag

SEQ ID NO: 163756 - DNA, 720 bp, synthetic construct
  misc_feature 1..720: note = Description of Artificial Sequence: Synthetic coding sequence
  source 1..720: mol_type = other DNA
atgcaggaccccaatgctgacacagagtggaatgacatcctgaggaagaagggcatcctgccccccaaggagagcctgaaggagctggaggaggaggccgaggaggagcagaggatcctgcagcagagcgtggtgaagacctatgaggacatgaccctggaggagctggaggaccatgaagatgagttcaatgaggaggatgagcgggccatcgagatgtacagaagaagaaggctggccgagtggaaggccaccaagctgaagaacaagtttggagaggtgctggagatcagcggcaaggactatgtgcaggaggtgaccaaggccggggagggcctgtgggtgatcctgcacctgtacaagcagggcatccccctgtgtgccctgatcaaccagcacctgagcggcctggccaggaagttcccagatgtgaagttcatcaaggccatcagcaccacctgcatccccaactacccagacaggaacctgcccaccatctttgtgtacctggagggggacatcaaggcccagttcatcggccccctggtgtttggaggcatgaacctgaccagagatgagctggagtggaagctgtctgagagcggggccatcatgacagacctggaggagaaccccaagaagcccattgaagatgtgctgctgagctctgtgagaagatctgtgctgatgaagagggacagcgacagcgagggggactag

SEQ ID NO: 163757 - DNA, 1104 bp, synthetic construct
  misc_feature 1..1104: note = Description of Artificial Sequence: Synthetic coding sequence
  source 1..1104: mol_type = other DNA
atggatgcccagtgcagcgccaaggtgaatgccaggaagaggaggaaggaggcccctggccccaacggggccacagaagaagatggagtgcccagcaaggtgcagagatgtgctgtgggcctgcggcagcctgcccccttcagtgatgaaattgaggtggacttcagcaagccctacgtgcgggtgaccatggaggaggccagccggggcaccccctgtgagaggcctgtgcgggtgtatgcagatggcatctttgacctcttccacagcggccacgcccgggccctgatgcaggccaagaacctcttccccaacacctacctgattgtgggcgtgtgcagtgatgagctgacccacaacttcaagggcttcaccgtgatgaatgaaaatgaaagatatgatgctgtgcagcactgccgctacgtggatgaggtggtgagaaatgccccctggaccctgaccccagagttcctggccgagcacagaattgactttgtggcccatgatgacatcccctacagcagcgctggcagtgatgatgtgtacaagcacatcaaggaggccggcatgtttgcccccacccagaggacagagggcatcagcaccagtgacatcatcaccagaattgtgcgggactatgatgtgtatgcccggaggaacctgcagaggggctacacagccaaggagctgaatgtgtccttcatcaatgagaagaagtaccacctgcaggagcgggtggacaaggtgaagaagaaggtgaaggatgtggaggagaagagcaaggagtttgtgcagaaggtggaggagaagagcattgacctgatccagaagtgggaggagaagagccgggagttcatcggcagcttcctggagatgtttggacctgagggcgccctgaagcacatgctgaaggagggcaaaggaaggatgctgcaggccatcagccccaagcagagccccagcagcagccccacccgggagaggagccccagccccagcttccgctggcccttcagcggcaagaccagccccccctgcagccctgccaacctgagccgccacaaggctgctgcctatgacatcagtgaagatgaggaggactag

SEQ ID NO: 163758 - DNA, 882 bp, synthetic construct
  misc_feature 1..882: note = Description of Artificial Sequence: Synthetic coding sequence
  source 1..882: mol_type = other DNA
atggatgcccagtgcagcgccaaggtgaatgccaggaagaggaggaaggaggcccctggccccaacggggccacagaagaagatggagtgcccagcaaggtgcagagatgtgctgtgggcctgcggcagcctgcccccttcagtgatgaaattgaggtggacttcagcaagccctacgtgcgggtgaccatggaggaggccagccggggcaccccctgtgagaggcctgtgcgggtgtatgcagatggcatctttgacctcttccacagcggccacgcccgggccctgatgcaggccaagaacctcttccccaacacctacctgattgtgggcgtgtgcagtgatgagctgacccacaacttcaagggcttcaccgtgatgaatgaaaatgaaagatatgatgctgtgcagcactgccgctacgtggatgaggtggtgagaaatgccccctggaccctgaccccagagttcctggccgagcacagaattgactttgtggcccatgatgacatcccctacagcagcgctggcagtgatgatgtgtacaagcacatcaaggaggccggcatgtttgcccccacccagaggacagagggcatcagcaccagtgacatcatcaccagaattgtgcgggactatgatgtgtatgcccggaggaacctgcagaggggctacacagccaaggagctgaatgtgtccttcatcaatgagaagaagtaccacctgcaggagcgggtggacaaggtgaagaagaaggtgaaggatgtggaggagaagagcaaggagtttgtgcagaaggtggaggagaagagcattgacctgatccagaagtgggaggagaagagccgggagttcatcggcagcttcctggagatgttttag

SEQ ID NO: 163759 - DNA, 402 bp, synthetic construct
  misc_feature 1..402: note = Description of Artificial Sequence: Synthetic coding sequence
  source 1..402: mol_type = other DNA
atggatgcccagtgcagcgccaaggtgaatgccaggaagaggaggaaggaggcccctggccccaacggggccacagaagaagatggagtgcccagcaaggtgcagagatgtgctgtgggcctgcggcagcctgcccccttcagtgatgaaattgaggtggacttcagcaagccctacgtgcgggtgaccatggaggaggccagccggggcaccccctgtgagaggcctgtgcgggtgtatgcagatggcatctttgacctcttccacagcggccacgcccgggccctgatgcaggccaagaacctcttccccaacacctacctgattgtgggcgtgtgcagtgatgagctgacccacaacttcaagggcttcaccgtgatgaatgaaaatgaaagatactag

SEQ ID NO: 163760 - DNA, 987 bp, synthetic construct
  misc_feature 1..987: note = Description of Artificial Sequence: Synthetic coding sequence
  source 1..987: mol_type = other DNA
atggatgcccagtgcagcgccaaggtgaatgccaggaagaggaggaaggaggcccctggccccaacggggccacagaggaggccagccggggcaccccctgtgagaggcctgtgcgggtgtatgcagatggcatctttgacctcttccacagcggccacgcccgggccctgatgcaggccaagaacctcttccccaacacctacctgattgtgggcgtgtgcagtgatgagctgacccacaacttcaagggcttcaccgtgatgaatgaaaatgaaagatatgatgctgtgcagcactgccgctacgtggatgaggtggtgagaaatgccccctggaccctgaccccagagttcctggccgagcacagaattgactttgtggcccatgatgacatcccctacagcagcgctggcagtgatgatgtgtacaagcacatcaaggaggccggcatgtttgcccccacccagaggacagagggcatcagcaccagtgacatcatcacccgcatcgtgcgggactatgatgtgtatgcccggaggaacctgcagaggggctacacagccaaggagctgaatgtgtccttcatcaatgagaagaagtaccacctgcaggagcgggtggacaaggtgaagaagaaggtgaaggatgtggaggagaagagcaaggagtttgtgcagaaggtggaggagaagagcattgacctgatccagaagtgggaggagaagagccgggagttcatcggcagcttcctggagatgtttggacctgagggcgccctgaagcacatgctgaaggagggcaagggccgcatgctgcaggccatcagccccaagcagagccccagcagcagccccacccgggagaggagccccagccccagcttccgctggcccttcagcggcaagaccagccccccctgcagccctgccaacctgagccgccacaaggccgccgcctatgacatcagtgaagatgaagaagattag

SEQ ID NO: 163761 - DNA, 1104 bp, synthetic construct; identical to SEQ ID NO: 163757
  misc_feature 1..1104: note = Description of Artificial Sequence: Synthetic coding sequence
  source 1..1104: mol_type = other DNA

SEQ ID NO: 163762 - DNA, 348 bp, synthetic construct
  misc_feature 1..348: note = Description of Artificial Sequence: Synthetic coding sequence
  source 1..348: mol_type = other DNA
atggatgcccagtgcagcgccaaggtgaatgccaggaagaggaggaaggaggcccctggccccaacggggccacagaagaagatggagtgcccagcaaggtgcagagatgtgctgtgggcctgcggcagcctgcccccttcagtgatgaaattgaggtggacttcagcaagccctacgtgcgggtgaccatggaggaggccagccggggcaccccctgtgagaggcctgtgcgggtgtatgcagatggcatctttgacctcttccacagcggccacgcccgggccctgatgcaggccaagaacctcttccccaacacctacctgattgtgggcgtgtgcagcgactag

SEQ ID NO: 163763 - DNA, 2250 bp, synthetic construct
  misc_feature 1..2250: note = Description of Artificial Sequence: Synthetic coding sequence
  source 1..2250: mol_type = other DNA
atggaggccgagaccggcagctctgtggagaccgggaagaaggccaacagaggcaccagaattgccctggtggtgtttgtgggcggcaccctggtgctgggcaccatcctcttcctggtgtcccagggcctgctgagcctgcaggccaagcaggagtactgcctgaagccagagtgcatcgaggccgccgccgccatcctgagcaaggtgaacctgtctgtggacccctgtgacaacttcttccgctttgcctgtgatggctggatcagcaacaaccccatccctgaggacatgcccagctatggagtgtacccctggctgcggcacaacgtggacctgaagctgaaggagctgctggagaagagcatcagcagaagaagagacacagaggccatccagaaggccaagatcctgtacagcagctgcatgaatgagaaggccatcgagaaggcagatgccaagcccctgctgcacatcctgcggcacagccccttccgctggcctgtgctggagagcaacatcggccctgagggcgtgtggagcgagaggaagttcagcctgctgcagaccctggccaccttccggggccagtacagcaacagcgtcttcatccggctgtatgtgtccccagatgacaaggccagcaatgagcacatcctgaagctggaccaggccaccctgagcctggccgtgcgggaggactacctggacaacagcacagaggccaagagctacagagatgccctgtacaagttcatggtggacacagctgtgctgctgggcgccaacagcagcagagctgagcatgacatgaagtctgtgctgcggctggagatcaagattgctgagatcatgatcccccatgaaaatagaacatctgaggccatgtacaacaagatgaacatcagcgagctgagcgccatgatcccccagtttgactggctgggctacatcaagaaggtgattgacacccggctgtacccccacctgaaggacatcagccccagtgaaaatgtggtggtgcgggtgccccagtacttcaaggacctcttccgcatcctgggcagcgagaggaagaagaccatcgccaactacctggtgtggaggatggtgtacagccgcatccccaacctgagccgccgcttccagtaccgctggctggagttcagcagggtcatccagggcaccaccaccctgctgccccagtgggacaagtgtgtgaacttcatcgagagcgccctgccctacgtggtgggcaagatgtttgtggatgtgtacttccaggaggacaagaaggagatgatggaggagctggtggagggcgtgcgctgggccttcatcgacatgctggagaaggaaaatgagtggatggatgctggcaccaagaggaaggccaaggagaaggcccgggctgtgctggccaaggtgggctacccagagttcatcatgaatgacacccacgtgaatgaagacctgaaggccatcaagttcagcgaggccgactactttggaaatgtgctgcagaccaggaagtacctggcccagagcgacttcttctggctgaggaaggctgtgcccaagacagagtggttcaccaaccccaccaccgtgaatgccttctacagcgccagcaccaaccagatccgcttccctgctggggagctgcagaagcccttcttctggggcacagagtaccccaggagcctgtcctatggagccatcggcgtgattgtgggccacgagttcacccacggctttgacaacaatggaagaaaatatgacaagaatggaaacctggacccctggtggagcacagaaagtgaggagaagttcaaggagaagaccaagtgcatgatcaaccagtacagcaactactactggaagaaggccggcctgaatgtgaagggcaagaggaccctgggggagaacattgctgacaatggaggcctgcgggaggccttccgggcctacaggaagtggatcaatgaccggcggcagggcctggaggagcccctgctgcccggcatcaccttcaccaacaaccagctgttcttcctgtcctatgcccacgtgcgctgcaacagctacagacctgaggccgcccgggagcaggtgcagattggagcccacagccccccccagttccgggtgaatggagccatcagcaactttgaggagttccagaaggccttcaactgcccccccaacagcaccatgaacagaggcatggacagctgccgcctgtggtag

SEQ ID NO: 163764 - DNA, 1359 bp, synthetic construct
  misc_feature 1..1359: note = Description of Artificial Sequence: Synthetic coding sequence
  source 1..1359: mol_type = other DNA
atgatccacctgcccaggcctcccaaggtgctgggcctgcagtttgactggctgggctacatcaagaaggtgattgacacccggctgtacccccacctgaaggacatcagccccagtgaaaatgtggtggtgcgggtgccccagtacttcaaggacctcttccgcatcctgggcagcgagaggaagaagaccatcgccaactacctggtgtggaggatggtgtacagccgcatccccaacctgagccgccgcttccagtaccgctggctggagttcagcagggtcatccagggcaccaccaccctgctgccccagtgggacaagtgtgtgaacttcattgaaagtgccctgccctacgtggtgggcaagatgtttgtggatgtgtacttccaggaggacaagaaggagatgatggaggagctggtggagggcgtgcgctgggccttcatcgacatgctggagaaggaaaatgagtggatggatgctggcaccaagaggaaggccaaggagaaggcccgggctgtgctggccaaggtgggctacccagagttcatcatgaatgacacccacgtgaatgaagacctgaaggccatcaagttcagcgaggccgactactttggaaatgtgctgcagaccaggaagtacctggcccagagcgacttcttctggctgaggaaggctgtgcccaagacagagtggttcaccaaccccaccaccgtgaatgccttctacagcgccagcaccaaccagatccgcttccctgctggggagctgcagaagcccttcttctggggcacagagtaccccaggagcctgtcctatggagccatcggggtcatcgtgggccacgagttcacccacggctttgacaacaacggcaggaaatatgacaagaatggaaacctggacccctggtggagcacagagagcgaggagaagttcaaggagaagaccaagtgcatgatcaaccagtacagcaactactactggaagaaggccggcctgaatgtgaagggcaagaggaccctgggagaaaatattgctgacaatggaggcctgcgggaggccttccgggcctacaggaagtggatcaatgaccggcggcagggcctggaggagcccctgctgcccggcatcaccttcaccaacaaccagctgttcttcctgtcctatgcccacgtgcgctgcaacagctacagacctgaggccgcccgggagcaggtgcagatcggggcccacagccccccccagttccgggtgaatggagccatcagcaactttgaggagttccagaaggccttcaactgcccccccaacagcaccatgaacagaggcatggacagctgccgcctgtggtag

SEQ ID NO: 163765 - DNA, 1959 bp, synthetic construct
  misc_feature 1..1959: note = Description of Artificial Sequence: Synthetic coding sequence
  source 1..1959: mol_type = other DNA
atgcccagctatggagtgtacccctggctgcggcacaacgtggacctgaagctgaaggagctgctggagaagagcatcagcagaagaagagacacagaggccatccagaaggccaagatcctgtacagcagctgcatgaatgagaaggccatcgagaaggcagatgccaagcccctgctgcacatcctgcggcacagccccttccgctggcctgtgctggagagcaacatcggccctgagggcgtgtggagcgagaggaagttcagcctgctgcagaccctggccaccttccggggccagtacagcaacagcgtcttcatccggctgtatgtgtccccagatgacaaggccagcaatgagcacatcctgaagctggaccaggccaccctgagcctggccgtgcgggaggactacctggacaacagcacagaggccaagagctacagagatgccctgtacaagttcatggtggacacagctgtgctgctgggcgccaacagcagcagagctgagcatgacatgaagtctgtgctgcggctggagatcaagattgctgagatcatgatcccccatgagaacagaaccagcgaggccatgtacaacaagatgaacatcagcgagctgagcgccatgatcccccagtttgactggctgggctacatcaagaaggtgattgacacccggctgtacccccacctgaaggacatcagccccagtgaaaatgtggtggtgcgggtgccccagtacttcaaggacctcttccgcatcctgggcagcgagaggaagaagaccatcgccaactacctggtgtggaggatggtgtacagccgcatccccaacctgagccgccgcttccagtaccgctggctggagttcagcagggtcatccagggcaccaccaccctgctgccccagtgggacaagtgtgtgaacttcattgaaagtgccctgccctacgtggtgggcaagatgtttgtggatgtgtacttccaggaggacaagaaggagatgatggaggagctggtggagggcgtgcgctgggccttcatcgacatgctggagaaggaaaatgagtggatggatgctggcaccaagaggaaggccaaggagaaggcccgggctgtgctggccaaggtgggctacccagagttcatcatgaatgacacccacgtgaatgaagacctgaaggccatcaagttcagcgaggccgactactttggaaatgtgctgcagaccaggaagtacctggcccagagcgacttcttctggctgaggaaggctgtgcccaagacagagtggttcaccaaccccaccaccgtgaatgccttctacagcgccagcaccaaccagatccgcttccctgctggggagctgcagaagcccttcttctggggcacagagtaccccaggagcctgtcctatggagccatcggggtcatcgtgggccacgagttcacccacggctttgacaacaacggcaggaaatatgacaagaatggaaacctggacccctggtggagcacagagagcgaggagaagttcaaggagaagaccaagtgcatgatcaaccagtacagcaactactactggaagaaggccggcctgaatgtgaagggcaagaggaccctgggagaaaatattgctgacaatggaggcctgcgggaggccttccgggcctacaggaagtggatcaatgaccggcggcagggcctggaggagcccctgctgcccggcatcaccttcaccaacaaccagctgttcttcctgtcctatgcccacgtgcgctgcaacagctacagacctgaggccgcccgggagcaggtgcagatcggggcccacagccccccccagttccgggtgaatggagccatcagcaactttgaggagttccagaaggccttcaactgcccccccaacagcaccatgaacagaggcatggacagctgccgcctgtggtag

SEQ ID NO: 163766 - DNA, 2088 bp, synthetic construct
  misc_feature 1..2088: note = Description of Artificial Sequence: Synthetic coding sequence
  source 1..2088: mol_type = other DNA
atggaggccgagaccggcagctctgtggagaccgggaagaaggccaacagaggcaccagaattgccctggtggtgtttgtgggcggcaccctggtgctgggcaccatcctcttcctggtgtcccagggcctgctgagcctgcaggccaagcaggagtactgcctgaagccagagtgcatcgaggccgccgccgccatcctgagcaaggtgaacctgtctgtggacccctgtgacaacttcttccgctttgcctgtgatggctggatcagcaacaaccccatccctgaggacatgcccagctatggagtgtacccctggctgcggcacaacgtggacctgaagctgaaggagctgctggagaagagcatcagcagaagaagagacacagaggccatccagaaggccaagatcctgtacagcagctgcatgaatgagaaggccatcgagaaggcagatgccaagcccctgctgcacatcctgcggcacagccccttccgctggcctgtgctggagagcaacatcggccctgagggcgtgtggagcgagaggaagttcagcctgctgcagaccctggccaccttccggggccagtacagcaacagcgtcttcatccggctgtatgtgtccccagatgacaaggccagcaatgagcacatcctgaagctggaccaggccaccctgagcctggccgtgcgggaggactacctggacaacagcacagaggccaagagctacagagatgccctgtacaagttcatggtggacacagctgtgctgctgggcgccaacagcagcagagctgagcatgacatgaagtctgtgctgcggctggagatcaagattgctgagatcatgatcccccatgaaaatagaacatctgaggccatgtacaacaagatgaacatcagcgagctgagcgccatgatcccccagtttgactggctgggctacatcaagaaggtgattgacacccggctgtacccccacctgaaggacatcagccccagtgaaaatgtggtggtgcgggtgccccagtacttcaaggacctcttccgcatcctgggcagcgagaggaagaagaccatcgccaactacctggtgtggaggatggtgtacagccgcatccccaacctgagccgccgcttccagtaccgctggctggagttcagcagggtcatccagggcaccaccaccctgctgccccagtgggacaagtgtgtgaacttcatcgagagcgccctgccctacgtggtgggcaagatgtttgtggatgtgtacttccaggaggacaagaaggagatgatggaggagctggtggagggcgtgcgctgggccttcatcgacatgctggagaaggaaaatgagtggatggatgctggcaccaagaggaaggccaaggagaaggcccgggctgtgctggccaaggtgggctacccagagttcatcatgaatgacacccacgtgaatgaagacctgaaggccatcaagttcagcgaggccgactactttggaaatgtgctgcagaccaggaagtacctggcccagagcgacttcttctggctgaggaaggctgtgcccaagacagagtggttcaccaaccccaccaccgtgaatgccttctacagcgccagcaccaaccagatccgcttccctgctggggagctgcagaagcccttcttctggggcacagagtaccccaggagcctgtcctatggagccatcggcgtgattgtgggccacgagttcacccacggctttgacaacaatggaagaaaatatgacaagaatggaaacctggacccctggtggagcacagaaagtgaggagaagttcaaggagaagaccaagtgcatgatcaaccagtacagcaactactactggaagaaggccggcctgaatgtgaagggcaagaggaccctgggggagaacattgctgacaatggaggcctgcgggaggccttccgggcctacaggaagtggatcaatgaccggcggcagggcctggaggagcccctgctgcccggcatcaccttcaccaacaaccagctgttcttcctgtcctatgcccacggccagtggtgcaactag

SEQ ID NO: 163767 - DNA, 888 bp, synthetic construct
  misc_feature 1..888: note = Description of Artificial Sequence: Synthetic coding sequence
  source 1..888: mol_type = other DNA
atgcccagccccaggaggtccatggagggccggcccctgggcgtgtctgccagcagcagcagcagcagccctggcagccctgcccatggaggcggcggcggcggcagcagatttgagttccagagcctgctgagcagccgggccacagctgtggaccccacctgtgcccggctgcgggccagcgagagccctgtgcacagaagaggcagcttccccctggccgccgccggccccagccagagccctgccccacccctgcctgaggaggacaggatggacctgaaccccagcttcctgggcatcgccctgcggagcctgctggccatcgacctgtggctgagcaagaagctgggcgtgtgtgccggggagagcagctcctggggctctgtgcggcccctgatgaagctgctggagatcagcggccacggcatcccctggctgctgggcaccctgtactgcctgtgccgcagtgacagctgggccggccgggaggtgctgatgaacctgctgtttgccctgctgctggacctgctgctggtggccctgatcaagggcctggtgagaagaagaagacctgcccacaaccagatggacatgtttgtgaccctgtctgtggacaagtacagcttccccagcggccacgccacccgggccgccctgatgagccgcttcatcctgaaccacctggtgctggccatccccctgcgggtgctggtggtgctgtgggcctttgtgctgggcctgagccgggtgatgctgggccgccacaacgtgacagatgtggccttcggcttcttcctgggctacatgcagtacagcatcgtggactactgctggctgagcccccacaatgcccctgtgctcttcctgctgtggagccagaggtag

SEQ ID NO: 163768 - DNA, 615 bp, synthetic construct
  misc_feature 1..615: note = Description of Artificial Sequence: Synthetic coding sequence
  source 1..615: mol_type = other DNA
atggacctgaaccccagcttcctgggcatcgccctgcggagcctgctggccatcgacctgtggctgagcaagaagctgggcgtgtgtgccggggagagcagctcctggggctctgtgcggcccctgatgaagctgctggagatcagcggccacggcatcccctggctgctgggcaccctgtactgcctgtgccgcagtgacagctgggccggccgggaggtgctgatgaacctgctgtttgccctgctgctggacctgctgctggtggccctgatcaagggcctggtgagaagaagaagacctgcccacaaccagatggacatgtttgtgaccctgtctgtggacaagtacagcttccccagcggccacgccaccagggctgccctgatgagccgcttcatcctgaaccacctggtgctggccatccccctgcgggtgctggtggtgctgtgggcctttgtgctgggcctgagccgggtgatgctgggccgccacaacgtgacagatgtggccttcggcttcttcctgggctacatgcagtacagcatcgtggactactgctggctgagcccccacaatgcccctgtgctcttcctgctgtggagccagaggtag

SEQ ID NO: 163769 - DNA, 645 bp, synthetic construct
  misc_feature 1..645: note = Description of Artificial Sequence: Synthetic coding sequence
  source 1..645: mol_type = other DNA
atggagctggccgccggcagcttcagcgaggagcagttctgggaggcctgtgccgagctgcagcagcctgccctggccggggctgactggcagctgctggtggagaccagcggcatcagcatctaccgcctgctggacaagaagacaggcctgtatgagtacaaggtgtttggagtgctggaggactgcagccccaccctgctggccgacatctacatggacagcgactacaggaagcagtgggaccagtatgtgaaggagctgtatgagcaggagtgcaatggagaaacagtggtgtactgggaggtgaagtaccccttccccatgagcaacagagattatgtgtacctgcggcagaggcgggacctggacatggagggcaggaagatccacgtgatcctggcccggagcacctccatgccccagctgggggagaggtctggagtcatccgggtgaagcagtacaagcagagcctggccattgaaagtgatggcaagaagggcagcaaggtgttcatgtactactttgacaaccctgggggccagatccccagctggctgatcaactgggccgccaagaatggagtgcccaacttcctgaaggacatggcccgggcctgccagaactacctgaagaagacctag

SEQ ID NO: 163770 - DNA, 582 bp, synthetic construct
  misc_feature 1..582: note = Description of Artificial Sequence: Synthetic coding sequence
  source 1..582: mol_type = other DNA
ctggcccagggccgctgcctgcaggtgacagctgtgcagatccagggctcctggaaggtgactggagtgcagccccagaagacaggcctgtatgagtacaaggtgtttggagtgctggaggactgcagccccaccctgctggccgacatctacatggacagcgactacaggaagcagtgggaccagtatgtgaaggagctgtatgagcaggagtgcaatggagagaccgtggtgtactgggaggtgaagtaccccttccccatgagcaacagagattatgtgtacctgcggcagaggcgggacctggacatggagggcaggaagatccacgtgatcctggcccggagcacctccatgccccagctgggggagaggtctggagtcatccgggtgaagcagtacaagcagagcctggccatcgagagtgatggcaagaagggcagcaaggtgttcatgtactactttgacaaccctgggggccagatccccagctggctgatcaactgggccgccaagaatggagtgcccaacttcctgaaggacatggcccgggcctgccagaactacctgaagaagacctag

SEQ ID NO: 163771 - DNA, 429 bp, synthetic construct
  misc_feature 1..429: note = Description of Artificial Sequence: Synthetic coding sequence
  source 1..429: mol_type = other DNA
atggacagcgactacaggaagcagtgggaccagtatgtgaaggagctgtatgagcaggagtgcaatggagaaacagtggtgtactgggaggtgaagtaccccttccccatgagcaacagagattatgtgtacctgcggcagaggcgggacctggacatggagggcaggaagatccacgtgatcctggcccggagcacctccatgccccagctgggggagaggtctggagtcatccgggtgaagcagtacaagcagagcctggccattgaaagtgatggcaagaagggcagcaaggtgttcatgtactactttgacaaccctgggggccagatccccagctggctgatcaactgggccgccaagaatggagtgcccaacttcctgaaggacatggcccgggcctgccagaactacctgaagaagacctag

SEQ ID NO: 163772 - DNA, 564 bp, synthetic construct
  misc_feature 1..564: note = Description of Artificial Sequence: Synthetic coding sequence
  source 1..564: mol_type = other DNA
atgcctgtggacctgagcaagtggagcggccccctgagcctgcaggaggtggatgagcagccccagcaccccctgcacgtgacctacgccggggctgctgtggatgagctgggcaaggtgctgacccccacccaggtgaagaaccggcccaccagcatctcctgggatggcctggacagcggcaagctgtacaccctggtgctgacagatcctgatgcccccagcaggaaggaccccaagtaccgggagtggcaccacttcctggtggtgaacatgaagggaaatgacatcagcagcggcaccgtgctgagtgactatgtgggcagcggcccccccaagggcaccggcctgcaccgctacgtgtggctggtgtatgagcaggaccggcccctgaagtgtgatgagcccatcctgagcaacagaagtggggaccaccggggcaagttcaaggtggccagcttcaggaagaagtatgagctgcgggcccctgtggccggcacctgctaccaggccgagtgggatgattatgtgcccaagctgtatgagcagctgagcggcaagtag

SEQ ID NO: 163773 - DNA, 468 bp, synthetic construct
  misc_feature 1..468: note = Description of Artificial Sequence: Synthetic coding sequence
  source 1..468: mol_type = other DNA
atgcctgtggacctgagcaagtggagcggccccctgagcctgcaggaggtggatgagcagccccagcaccccctgcacgtgacctacgccggggctgctgtggatgagctgggcaaggtgctgacccccacccaggtgaagaaccggcccaccagcatctcctgggatggcctggacagcggcaagctgtacaccctggtgctgacagatcctgatgcccccagcaggaaggaccccaagtaccgggagtggcaccacttcctggtggtgaacatgaagggaaatgacatcagcagcggcaccgtgctgagtgactatgtgggcagcggcccccccaagggcaccggcctgcaccgctacgtgtggctggtgtatgagcaggaccggcccctgaagtgtgacttcagctgctgcctggccttcatcatcctgctgacccacagcgacctgtgctttgaccagatctag

SEQ ID NO: 163774 - DNA, 6135 bp, synthetic construct
  misc_feature 1..6135: note = Description of Artificial Sequence: Synthetic coding sequence
  source 1..6135: mol_type = other DNA
atgtgccctgtggacttccacggcatcttccagctggatgaaagaagaagagatgctgtgattgccctgggcatcttcctgattgaaagtgacctgcagcacaaggactgtgtggtgccctacctgctgcggctgctgaagggcctgcccaaggtgtactgggtggaggagagcacagccaggaagggccgcggggccctgcctgtggccgagagcttctccttctgcctggtgaccctgctgagtgatgtggcctacagagaccccagcctgagagatgagatcctggaggtgctgctgcaggtgctgcacgtgctgctgggcatgtgccaggccctggagatccaggacaaggagtacctgtgcaagtatgccatcccctgcctgattggcatcagccgggccttcggccgctacagcaacatggaggagagcctgctgagcaagctgttccccaagatccccccccacagcctgcgggtgctggaggagctggagggcgtgagaagaagaagcttcaatgacttccgcagcatcctgcccagcaacctgctgactgtgtgccaggagggcaccctgaagaggaagaccagctctgtgagcagcatcagccaggtgtccccagagcggggcatgcccccacccagcagccctgggggcagcgccttccactactttgaggccagctgcctgcctgatggaacagccctggagcctgagtactacttcagcaccatcagcagcagcttctctgtgagccccctcttcaatggagtgacctacaaggagttcaacatccccctggagatgctgcgggagctgctgaacctggtgaagaagatcgtggaggaggccgtgctgaagagcctggatgccatcgtggcctctgtgatggaggccaaccccagcgctgacctgtactacaccagcttcagtgaccccctgtacctgaccatgttcaagatgctgcgggacaccctgtactacatgaaggacctgcccaccagctttgtgaaggagatccatgactttgtgctggagcagttcaacaccagccagggcgagctgcagaagatcctgcatgatgctgaccgcatccacaatgagctgagccccctgaagctgcgctgccaggccaatgctgcctgtgtggacctgatggtgtgggccgtgaaggatgagcagggcgctgagaacctgtgcatcaagctgtctgagaagctgcagagcaagaccagcagcaaggtgatcatcgcccacctgcccctgctgatctgctgcctgcagggcctgggccgcctgtgtgagcgcttccctgtggtggtgcacagcgtgacccccagcctgcgggacttcctggtgatccccagccctgtgctggtgaagctgtacaagtaccacagccagtaccacacagtggccggaaatgacatcaagatctctgtgaccaatgagcacagcgagagcaccctgaatgtgatgtctgggaagaagagccagcccagcatgtatgagcagctgcgggacatcgccatcgacaacatctgccgctgcctgaaggccggcctgactgtggaccctgtgattgtggaggccttcctggccagcctgagcaacagactctacatcagccaggagagtgacaaggatgcccacctgatcccagaccacaccatccgggccctgggccacatcgctgtggccctgcgggacacccccaaggtgatggagcccatcctgcagatcctgcagcagaagttctgccagccccccagccccctggatgtgctgatcatcgaccagctgggctgcctggtgatcaccggcaaccagtacatctaccaggaggtgtggaacctcttccagcagatctctgtgaaggccagctctgtggtgtacagcgccaccaaggactacaaggaccacggctaccgccactgcagcctggccgtcatcaatgccctggccaacattgctgccaacatccaggatgagcacctggtggatgagctgctgatgaacctgctggagctgtttgtgcagctgggcctggagggcaagagggccagcgagcgggccagcgagaagggccctgccctgaaggccagcagcagcgctggcaacctgggcgtgctgatccctgtgattgctgtgctgacccggcggctgccccccatcaaggaggccaagccccggctgcagaagctgttccgggacttctggctgtacagcgtgctgatgggctttgctgtggagggcagcggcctgtggccagaggagtggtatgagggcgtgtgtgagatcgccaccaagagccccctgctgaccttccccagcaaggagcccctgcggtctgtgctgcagtacaacagcgccatgaagaatgacacagtgaccccagctgagctgtctgagctgcggagcaccatcatcaacctgctggaccccccacctgaggtgtctgccctgatcaacaagctggactttgccatgagcacctacctgctgtctgtgtaccgcctggagtacatgagggtgctgcggagcacagatcctgaccgcttccaggtgatgttctgctactttgaggacaaggccatccagaaggacaagagcggcatgatgcagtgtgtgattgctgtggccgacaaggtgtttgatgccttcctgaacatgatggctgacaaggccaagaccaaggaaaatgaggaggagctggagagacatgcccagttcctgctggtgaacttcaaccacatccacaagaggatcagaagagtggccgacaagtacctgagcggcctggtggacaagttcccccacctgctgtggagcggcaccgtgctgaagaccatgctggacatcctgcagaccctgagcctgagcctgtctgctgacatccacaaggaccagccctactatgacatcccagatgccccctaccgcatcaccgtgcctgacacctatgaggcccgggagagcatcgtgaaggactttgctgcccgctgtggcatgatcctgcaggaggccatgaagtgggcccccaccgtgaccaagagccacctgcaggagtacctgaacaagcaccagaactgggtgtctggcctgagccagcacacaggcctggccatggccacagagagcatcctgcactttgctggctacaacaagcagaacaccaccctgggcgccacccagctgtctgagaggcctgcctgtgtgaagaaggactacagcaacttcatggccagcctgaacctgaggaacagatatgctggggaggtgtatggcatgatccgcttcagcggcaccaccggccagatgtctgacctgaacaagatgatggtgcaggacctgcacagcgccctggacaggagccacccccagcactacacccaggccatgttcaagctgacagccatgctgatcagcagcaaggactgtgacccccagctgctgcaccacctgtgctggggccccctgaggatgtttaatgaacatggcatggagacagccctggcctgctgggagtggctgctggccggcaaggatggagtggaggtgcccttcatgagggagatggccggggcctggcacatgacagtggagcagaagtttggcctcttctctgctgagatcaaggaggccgaccccctggccgccagcgaggccagccagcccaagccctgccccccagaggtgaccccccactacatctggattgacttcctggtgcagagatttgagatcgccaagtactgcagcagtgaccaggtggagatcttcagcagcctgctgcagaggtccatgagcctgaacatcggcggggccaagggctccatgaacagacatgtggccgccatcggcccccgcttcaagctgctgaccctgggcctgagcctgctgcacgcagatgtggtgcccaatgccaccatcagaaatgtgctgcgggagaagatctacagcacagcctttgactacttcagctgcccccccaagttccccacccagggcgagaagaggctgcgggaggacatcagcatcatgatcaagttctggacagccatgttcagtgacaagaagtacctgacagccagccagctggtgcccccagacaaccaggacaccaggagcaacctggacatcaccgtgggcagccggcagcaggccacccagggctggatcaacacctaccccctgagcagcggcatgagcaccatcagcaagaagagcggcatgagcaagaagaccaacagaggcagccagctgcacaagtactacatgaagaggaggaccctgctgctgagcctgctggccacagaaattgaaagactcatcacctggtacaaccccctgagcgcccctgagctggagctggaccaggccggggagaacagcgtggccaactggaggagcaagtacatcagcctgtctgagaagcagtggaaggacaacgtgaacctggcctggagcatcagcccctacctggccgtgcagctgcctgcccgcttcaagaacacagaggccatcggaaatgaggtgacccggctggtgcggctggaccccggggctgtgtctgatgtgcctgaggccatcaagttcctggtgacctggcacaccattgatgctgatgcccctgagctgagccacgtgctgtgctgggcccccacagatcctcccaccggcctgagctacttcagctccatgtacccaccccaccccctgacagcccagtatggagtgaaggtgctgcggagcttccccccagatgccatcctcttctacatcccccagatcgtgcaggccctgcgctatgacaagatgggctacgtgcgggagtacatcctgtgggccgccagcaagagccagctgctggcccaccagttcatctggaacatgaagaccaacatctacctggatgaggagggccaccagaaggaccctgacatcggggacctgctggaccagctggtggaggagatcaccggcagcctgagcggccctgccaaggacttctaccagcgggagtttgacttcttcaacaagatcaccaacgtgtctgccatcatcaagccctaccccaagggagatgagaggaagaaggcctgcctgagcgccctgtctgaggtgaaggtgcagcccggctgctacctgcccagcaaccctgaggccatcgtgctggacatcgactacaagagcggcacccccatgcagagcgctgccaaggccccctacctggccaagttcaaggtgaagagatgtggggtgtctgagctggagaaggagggcctgcgctgccgcagtgacagtgaagatgaatgttccacccaggaggctgatggccagaagatctcctggcaggccgccatcttcaaggtgggagatgactgccggcaggacatgctggccctgcagatcatcgacctcttcaagaacatcttccagctggtgggcctggacctgtttgtgttcccctacagagtggtggccacagcccctggctgtggggtgattgagtgcatcccagactgcaccagccgggaccagctgggccggcagacagactttggcatgtatgactacttcacccggcagtatggagatgagagcaccctggccttccagcaggcccgctacaacttcatccgctccatggccgcctacagcctgctgctcttcctgctgcagatcaaggacagacacaacggcaacatcatgctggacaagaagggccacatcatccacatcgactttggcttcatgtttgagagcagccctgggggcaacctgggctgggagccagacatcaagctgacagatgagatggtgatgatcatgggcggcaagatggaggccacccccttcaagtggttcatggagatgtgtgtgcggggctacctggccgtgcggccctacatggatgctgtggtgtccctggtgaccctgatgctggacaccggcctgccctgcttccggggccagaccatcaagctgctgaagcaccgcttcagccccaacatgacagagcgggaggccgccaacttcatcatgaaggtgatccagagctgcttcctgagcaacagaagcaggacctatgacatgatccagtactaccagaatgacatcccctactag

SEQ ID NO: 163775 - DNA, 1440 bp, synthetic construct
  misc_feature 1..1440: note = Description of Artificial Sequence: Synthetic coding sequence
  source 1..1440: mol_type = other DNA
atggatgagaccagccccctggtgtccccagagcgggcccagcccccagactacaccttccccagcggcagcggggcccacttcccccaggtgcctgggggcgctgtgcgggtggccgctgctgctggcagcggccccagccccccaggcagccctggccatgaccgggagcggcagcccctgctggaccgggcccggggagctgctgcccagggccagacccagacagtggccgcccaggcccaggccctggccgcccaggccgctgctgctgcccacgccgcccaggcccaccgggagagaaatgagttccctgaggaccctgagtttgaggccgtggtgcggcaggccgagctggccatcgagcgctgcatcttccctgagcgcatctaccagggcagcagcggcagctactttgtgaaggacccccagggccgcatcatcgctgtgttcaagcccaagaatgaggagccctacggccacctgaaccccaagtggaccaagtggctgcagaagctgtgctgcccctgctgcttcggccgggactgcctggtgctgaaccagggctacctgtctgaggccggggccagcctggtggaccagaagctggagctgaacatcgtgcccaggaccaaggtggtgtacctggccagcgagaccttcaactacagcgccatcgacagagtgaagagccggggcaagaggctggccctggagaaggtgcccaaggtgggccagcgcttcaacagaattggcctgccccccaaggtgggcagcttccagctgtttgtggagggctacaaggatgctgactactggctgcggagatttgaagctgagcccctgcctgagaacaccaaccggcagctgctgctgcagtttgagcggctggtggtgctggactacatcatccggaacacagacagaggaaatgacaactggctgatcaagtatgactgccccatggacagcagcagcagccgggacacagactgggtggtggtgaaggagcccgtcatcaaggtggccgccatcgacaatggcctggccttccccctgaagcacccagacagctggagggcctaccccttctactgggcctggctgccccaggccaaggtgcccttcagccaggagatcaaggacctgatcctgcccaagatcagtgaccccaactttgtgaaggacctggaggaggacctgtatgagctgttcaagaaggaccccggctttgaccggggccagttccacaagcagattgctgtgatgaggggccagatcctgaacctgacccaggccctgaaggacaacaagagccccctgcacctggtgcagatgcctcctgtgattgtggagacagcccggagccaccagaggagcagcagcgagagctacacccagagcttccagagcaggaagcccttcttctcctggtggtag

SEQ ID NO: 163776 - DNA, 1350 bp, synthetic construct
  misc_feature 1..1350: note = Description of Artificial Sequence: Synthetic coding sequence
  source 1..1350: mol_type = other DNA
atgctgggcccccaggtgtggagctctgtgcggcagggcctgagccgcagcctgagcagaaatgtgggcgtgtgggccagcggggagggcaagaaggtggacattgctggcatctacccacctgtgaccacccccttcaccgccacagctgaggtggactatggcaagctggaggagaacctgcacaagctgggcaccttccccttcagaggagctgtgggcggcgtgtgtgccctggccaacgtgctgggcgcccaggtgtgccagctggagcggctgtgctgcaccggccagtgggaggatgcccagaagctgcagcacaggctcatcgagcccaatgctgcccgcatcatcgctgtgttcaagcccaagaatgaggagccctacggccacctgaaccccaagtggaccaagtggctgcagaagctgtgctgcccctgctgcttcggccgggactgcctggtgctgaaccagggctacctgtctgaggccggggccagcctggtggaccagaagctggagctgaacatcgtgcccaggaccaaggtggtgtacctggccagcgagaccttcaactacagcgccatcgacagagtgaagagccggggcaagaggctggccctggagaaggtgcccaaggtgggccagcgcttcaacagaattggcctgccccccaaggtgggcagcttccagctgtttgtggagggctacaaggatgctgactactggctgcggagatttgaagctgagcccctgcctgagaacaccaaccggcagctgctgctgcagtttgagcggctggtggtgctggactacatcatccggaacacagacagaggaaatgacaactggctgatcaagtatgactgccccatggacagcagcagcagccgggacacagactgggtggtggtgaaggagcccgtcatcaaggtggccgccatcgacaatggcctggccttccccctgaagcacccagacagctggagggcctaccccttctactgggcctggctgccccaggccaaggtgcccttcagccaggagatcaaggacctgatcctgcccaagatcagtgaccccaactttgtgaaggacctggaggaggacctgtatgagctgttcaagaaggaccccggctttgaccggggccagttccacaagcagattgctgtgatgaggggccagatcctgaacctgacccaggccctgaaggacaacaagagccccctgcacctggtgcagatgcctcctgtgattgtggagacagcccggagccaccagaggagcagcagcgagagctacacccagagcttccagagcaggaagcccttcttctcctggtggtag

SEQ ID NO: 163777 - DNA, 1446 bp, synthetic construct
  misc_feature 1..1446: note = Description of Artificial Sequence: Synthetic coding sequence
  source 1..1446: mol_type = other DNA
atggaggaccccagcgagccagaccggctggccagcgcagatggcggcagccctgaggaggaggaggatggagagcgggagcccctgctgcccagaattgcctgggcccaccccaggagaggagcccctggcagcgctgtgcggctgctggatgctgctggggaggagggggaggccggagatgaggagctgcccctgcccccaggagatgtgggcgtgagccgcagcagcagcgctgagctggacaggagcaggcctgctgtgtctgtgaccatcggcaccagcgagatgaatgccttcctggatgatcctgagtttgctgacatcatgctgcgggcagagcaggccatcgaggtgggcatcttccctgagcgcatcagccagggcagcagcggcagctactttgtgaaggaccccaagaggaagatcatcggggtcttcaagcccaagtctgaggagccctacggccagctgaaccccaagtggaccaagtatgtgcacaaggtgtgctgcccctgctgcttcggccggggctgcctgatccccaaccagggctacctgtctgaggccggggcctacctggtggacaacaagctgcacctgagcatcgtgcccaagaccaaggtggtgtggctggtgtctgagaccttcaactacaatgccatcgaccgggccaagagccggggcaagaagtatgccctggagaaggtgcccaaggtgggcaggaagttccacagaattggcctgccccccaagattggcagcttccagctgtttgtggagggctacaaggaggccgagtactggctgaggaagtttgaagctgaccccctgcctgagaacatcaggaagcagttccagagccagtttgagcggctggtgatcctggactacatcatccggaacacagacagaggaaatgacaactggctggtgcgctatgagaagcagaagtgtgagaaggagattgaccacaaggagagcaagtggattgatgatgaggagttcctgatcaagattgctgccatcgacaatggcctggccttccccttcaagcacccagatgagtggagggcctaccccttccactgggcctggctgccccaggccaaggtgcccttcagcgaggagatccggaacctgatcctgccctacatcagtgacatgaactttgtgcaggacctgtgtgaggacctgtatgagctgttcaagacagacaagggctttgacaaggccacctttgagagccagatgtctgtgatgaggggccagatcctgaacctgacccaggccctgagagatggcaagagccccttccagctggtgcagatcccctgcgtcatcgtggagaggagccagggcggcagccagggccgcatcgtgcacctgagcaacagcttcacccagacagtgaactgcaggaagcccttcttcagctcctggtag

SEQ ID NO: 163778 - DNA, 1353 bp, synthetic construct
  misc_feature 1..1353: note = Description of Artificial Sequence: Synthetic coding sequence
  source 1..1353: mol_type = other DNA
atggaggaccccagcgagccagaccggctggccagcgcagatggcggcagccctgaggaggaggaggatggagagcgggagcccctgctgcccagaattgcctgggcccaccccaggagaggagcccctggcagcgctgtgcggctgctggacaggagcaggcctgctgtgtctgtgaccatcggcaccagcgagatgaatgccttcctggatgatcctgagtttgctgacatcatgctgcgggcagagcaggccatcgaggtgggcatcttccctgagcgcatcagccagggcagcagcggcagctactttgtgaaggaccccaagaggaagatcattggagtcttcaagcccaagtctgaggagccctacggccagctgaaccccaagtggaccaagtatgtgcacaaggtgtgctgcccctgctgcttcggccggggctgcctgatccccaaccagggctacctgtctgaggccggggcctacctggtggacaacaagctgcacctgagcatcgtgcccaagaccaaggtggtgtggctggtgtctgagaccttcaactacaatgccatcgaccgggccaagagccggggcaagaagtatgccctggagaaggtgcccaaggtgggcaggaagttccaccgcatcggcctgccccccaagattggcagcttccagctgtttgtggagggctacaaggaggccgagtactggctgaggaagtttgaggccgaccccctgcctgagaacatcaggaagcagttccagagccagtttgagcggctggtgatcctggactacatcatccggaacacagacagaggaaatgacaactggctggtgcgctatgagaagcagaagtgtgagaaggagattgaccacaaggagagcaagtggattgatgatgaggagttcctgatcaagattgctgccatcgacaatggcctggccttccccttcaagcacccagatgagtggagggcctaccccttccactgggcctggctgccccaggccaaggtgcccttcagcgaggagatccggaacctgatcctgccctacatcagtgacatgaactttgtgcaggacctgtgtgaggacctgtatgagctgttcaagacagacaagggctttgacaaggccacctttgagagccagatgtctgtgatgaggggccagatcctgaacctgacccaggccctgagagatggcaagagccccttccagctggtgcagatcccctgtgtgattgtggagaggagccagggcggcagccagggcagaattgtgcacctgagcaacagcttcacccagacagtgaactgcaggaagcccttcttcagctcctggtag

SEQ ID NO: 163779 - DNA, 6135 bp, synthetic construct; identical to SEQ ID NO: 163774
  misc_feature 1..6135: note = Description of Artificial Sequence: Synthetic coding sequence
  source 1..6135: mol_type = other DNA

SEQ ID NO: 163780 - DNA, 2565 bp, synthetic construct
  misc_feature 1..2565: note = Description of Artificial Sequence: Synthetic coding sequence
  source 1..2565: mol_type = other DNA
atgagggagatggccggggcctggcacatgacagtggagcagaagtttggcctcttctctgctgagatcaaggaggccgaccccctggccgccagcgaggccagccagcccaagccctgccccccagaggtgaccccccactacatctggattgacttcctggtgcagagatttgagatcgccaagtactgcagcagtgaccaggtggagatcttcagcagcctgctgcagaggtccatgagcctgaacatcggcggggccaagggctccatgaacagacatgtggccgccatcggcccccgcttcaagctgctgaccctgggcctgagcctgctgcacgcagatgtggtgcccaatgccaccatcagaaatgtgctgcgggagaagatctacagcacagcctttgactacttcagctgcccccccaagttccccacccagggcgagaagaggctgcgggaggacatcagcatcatgatcaagttctggacagccatgttcagtgacaagaagtacctgacagccagccagctggtgcccccagacaaccaggacaccaggagcaacctggacatcaccgtgggcagccggcagcaggccacccagggctggatcaacacctaccccctgagcagcggcatgagcaccatcagcaagaagagcggcatgagcaagaagaccaacagaggcagccagctgcacaagtactacatgaagaggaggaccctgctgctgagcctgctggccacagaaattgaaagactcatcacctggtacaaccccctgagcgcccctgagctggagctggaccaggccggggagaacagcgtggccaactggaggagcaagtacatcagcctgtctgagaagcagtggaaggacaacgtgaacctggcctggagcatcagcccctacctggccgtgcagctgcctgcccgcttcaagaacacagaggccatcggaaatgaggtgacccggctggtgcggctggaccccggggctgtgtctgatgtgcctgaggccatcaagttcctggtgacctggcacaccattgatgctgatgcccctgagctgagccacgtgctgtgctgggcccccacagatcctcccaccggcctgagctacttcagctccatgtacccaccccaccccctgacagcccagtatggagtgaaggtgctgcggagcttccccccagatgccatcctcttctacatcccccagatcgtgcaggccctgcgctatgacaagatgggctacgtgcgggagtacatcctgtgggccgccagcaagagccagctgctggcccaccagttcatctggaacatgaagaccaacatctacctggatgaggagggccaccagaaggaccctgacatcggggacctgctggaccagctggtggaggagatcaccggcagcctgagcggccctgccaaggacttctaccagcgggagtttgacttcttcaacaagatcaccaacgtgtctgccatcatcaagccctaccccaagggagatgagaggaagaaggcctgcctgagcgccctgtctgaggtgaaggtgcagcccggctgctacctgcccagcaaccctgaggccatcgtgctggacatcgactacaagagcggcacccccatgcagagcgctgccaaggccccctacctggccaagttcaaggtgaagagatgtggggtgtctgagctggagaaggagggcctgcgctgccgcagtgacagtgaagatgaatgttccacccaggaggctgatggccagaagatctcctggcaggccgccatcttcaaggtgggagatgactgccggcaggacatgctggccctgcagatcatcgacctcttcaagaacatcttccagctggtgggcctggacctgtttgtgttcccctacagagtggtggccacagcccctggctgtggggtgattgagtgcatcccagactgcaccagccgggaccagctgggccggcagacagactttggcatgtatgactacttcacccggcagtatggagatgagagcaccctggccttccagcaggcccgctacaacttcatccgctccatggccgcctacagcctgctgctcttcctgctgcagatcaaggacagacacaacggcaacatcatgctggacaagaagggccacatcatccacatcgactttggcttcatgtttgagagcagccctgggggcaacctgggctgggagccagacatcaagctgacagatgagatggtgatgatcatgggcggcaagatggaggccacccccttcaagtggttcatggagatgtgtgtgcggggctacctggccgtgcggccctacatggatgctgtggtgtccctggtgaccctgatgctggacaccggcctgccctgcttccggggccagaccatcaagctgctgaagcaccgcttcagccccaacatgacagagcgggaggccgccaacttcatcatgaaggtgatccagagctgcttcctgagcaacagaagcaggacctatgacatgatccagtactaccagaatgacatcccctactag

SEQ ID NO: 163781 - DNA, 264 bp, synthetic construct
  misc_feature 1..264: note = Description of Artificial Sequence: Synthetic coding sequence
  source 1..264: mol_type = other DNA
atgtgccctgtggacttccacggcatcttccagctggatgaaagaagaagagatgctgtgattgccctgggcatcttcctgattgaaagtgacctgcagcacaaggactgtgtggtgccctacctgctgcggctgctgaagggcctgcccaaggtgtactgggtggaggagagcacagccaggaagggccgcggggccctgcctgtggccgagagcttctccttctgcctggtgaccctgctgagtgatgtggcctacagatag

SEQ ID NO: 163782 - DNA, 1959 bp, synthetic construct
  misc_feature 1..1959: note = Description of Artificial Sequence: Synthetic coding sequence
  source 1..1959: mol_type = other DNA
atgagcggccagagcctgacagaccgcatcacagctgcccagcacagcgtgacaggcagcgctgtgtccaagacagtgtgcaaggccaccacccatgagatcatgggccccaagaagaagcacctggactacctgatccagtgcaccaatgagatgaatgtgaacatcccccagctggccgacagcctgtttgagaggaccaccaacagctcctgggtggtggtgttcaagagcctcatcaccacccaccacctgatggtgtatggaaatgaacgcttcatccagtacctggccagcaggaacaccctcttcaacctgagcaacttcctggacaagagcggcctgcagggctatgacatgagcaccttcatccgccgctacagccgctacctgaatgagaaggctgtgtcctaccggcaggtggcctttgacttcaccaaggtgaagagaggagcagatggagtgatgaggaccatgaacacagagaagctgctgaagacagtgcccatcatccagaaccagatggatgccctgctggacttcaacgtgaacagcaatgagctgaccaacggggtcatcaatgctgccttcatgctgctcttcaaggatgccatccggctgtttgctgcctacaatgaaggcatcatcaacctgctggagaagtactttgacatgaagaagaaccagtgcaaggagggcctggacatctacaagaagttcctgaccaggatgacccgcatcagcgagttcctgaaggtggccgagcaggtgggcatcgacagaggagacatcccagacctgagccaggcccccagcagcctgctggatgccctggagcagcacctggccagcctggagggcaagaagatcaaggacagcacagctgccagccgggccaccaccctgagcaatgctgtgagcagcctggccagcacaggcctgagcctgaccaaggtggatgagcgggagaagcaggccgccctggaggaggagcaggcccggctgaaggccctgaaggagcagaggctgaaggagctggccaagaagccccacaccagcctgaccacagctgccagccctgtgtccaccagcgctgggggcatcatgacagccccagccatcgacatcttcagcacccccagcagcagcaacagcaccagcaagctgcccaatgacctgctggacctgcagcagcccaccttccaccccagcgtgcaccccatgagcacagccagccaggtggccagcacctggggagaccccttcagcgccaccgtggatgctgtggatgatgccatccccagcctgaaccccttcctgaccaagagcagtggagatgtgcacctgagcatcagcagtgatgtgtccaccttcaccaccaggacccccacccatgagatgtttgtgggcttcacccccagccctgtggcccagccccaccccagcgctggcctgaatgtggactttgaatctgtgtttggaaacaagagcaccaacgtgattgtggacagcggcggctttgatgagctgggcggcctgctgaagcccaccgtggccagccagaaccagaacctgcctgtggccaagctgccccccagcaagctggtgtctgatgacctggacagcagcctggccaacctggtgggcaacctgggcattggaaatggcaccaccaagaatgatgtgaactggagccagcctggagagaagaagctgactggaggcagcaactggcagcccaaggtggcccccaccacagcctggaatgctgccaccatggcccctcctgtgatggcctacccagccaccacccccaccggcatgattggctacggcatccccccccagatgggctctgtgcctgtgatgacccagcccaccctcatctacagccagcctgtgatgaggcctcccaacccctttggacctgtgtctggggcccagatccagttcatgtag

SEQ ID NO: 163783 - DNA, 1959 bp, synthetic construct; identical to SEQ ID NO: 163782
  misc_feature 1..1959: note = Description of Artificial Sequence: Synthetic coding sequence
  source 1..1959: mol_type = other DNA

SEQ ID NO: 163784 - DNA, 1938 bp, synthetic construct
  misc_feature 1..1938: note = Description of Artificial Sequence: Synthetic coding sequence
  source 1..1938: mol_type = other DNA
atgagcggccagagcctgacagaccgcatcacagctgcccagcacagcgtgacaggcagcgctgtgtccaagacagtgtgcaaggccaccacccatgagatcatgggccccaagaagaagcacctggactacctgatccagtgcaccaatgagatgaatgtgaacatcccccagctggccgacagcctgtttgagaggaccaccaacagctcctgggtggtggtgttcaagagcctcatcaccacccaccacctgatggtgtatggaaatgaacgcttcatccagtacctggccagcaggaacaccctcttcaacctgagcaacttcctggacaagagcggcctgcagggctatgacatgagcaccttcatccgccgctacagccgctacctgaatgagaaggctgtgtcctaccggcaggtggcctttgacttcaccaaggtgaagagaggagcagatggagtgatgaggaccatgaacacagagaagctgctgaagacagtgcccatcatccagaaccagatggatgccctgctggacttcaacgtgaacagcaatgagctgaccaacggggtcatcaatgctgccttcatgctgctcttcaaggatgccatccggctgtttgctgcctacaatgaaggcatcatcaacctgctggagaagtactttgacatgaagaagaaccagtgcaaggagggcctggacatctacaagaagttcctgaccaggatgacccgcatcagcgagttcctgaaggtggccgagcaggtgggcatcgacagaggagacatcccagacctgagccaggcccccagcagcctgctggatgccctggagcagcacctggccagcctggagggcaagaagatcaaggacagcacagctgccagccgggccaccaccctgagcaatgctgtgagcagcctggccagcacaggcctgagcctgaccaaggtggatgagcgggagaagcaggccgccctggaggaggagcaggcccggctgaaggccctgaaggagcagaggctgaaggagctggccaagaagccccacaccagcctgaccacagctgccagccctgtgtccaccagcgctgggggcatcatgacagccccagccatcgacatcttcagcacccccagcagcagcaacagcaccagcaagctgcccaatgacctgctggacctgcagcagcccaccttccaccccagcgtgcaccccatgagcacagccagccaggtggccagcacctggggagatgctgtggatgatgccatccccagcctgaaccccttcctgaccaagagcagtggagatgtgcacctgagcatcagcagtgatgtgtccaccttcaccaccaggacccccacccatgagatgtttgtgggcttcacccccagccctgtggcccagccccaccccagcgctggcctgaatgtggactttgagagcgtgtttggaaacaagagcaccaacgtcatcgtggacagcggcggctttgatgagctgggcggcctgctgaagcccaccgtggccagccagaaccagaacctgcctgtggccaagctgccccccagcaagctggtgtctgatgacctggacagcagcctggccaacctggtgggcaacctgggcattggaaatggcaccaccaagaatgatgtgaactggagccagcccggggagaagaagctgaccggcggcagcaactggcagcccaaggtggcccccaccacagcctggaatgctgccaccatggcccctcctgtgatggcctacccagccaccacccccaccggcatgattggctacggcatccccccccagatgggctctgtgcctgtgatgacccagcccaccctcatctacagccagcctgtgatgaggcctcccaaccccttcggccctgtgtctggggcccagatccagttcatgtag

SEQ ID NO: 163785 - DNA, 1833 bp, synthetic construct
  misc_feature 1..1833: note = Description of Artificial Sequence: Synthetic coding sequence
  source 1..1833: mol_type = other DNA
atgagcggccagagcctgacagaccgcatcacagctgcccagcacagcgtgacaggcagcgctgtgtccaagacagtgtgcaaggccaccacccatgagatcatgggccccaagaagaagcacctggactacctgatccagtgcaccaatgagatgaatgtgaacatcccccagctggccgacagcctgtttgagaggaccaccaacagctcctgggtggtggtgttcaagagcctcatcaccacccaccacctgatggtgtatggaaatgaacgcttcatccagtacctggccagcaggaacaccctcttcaacctgagcaacttcctggacaagagcggcctgcagggctatgacatgagcaccttcatccgccgctacagccgctacctgaatgagaaggctgtgtcctaccggcaggtggcctttgacttcaccaaggtgaagagaggagcagatggagtgatgaggaccatgaacacagagaagctgctgaagacagtgcccatcatccagaaccagatggatgccctgctggacttcaacgtgaacagcaatgagctgaccaacggggtcatcaatgctgccttcatgctgctcttcaaggatgccatccggctgtttgctgcctacaatgaaggcatcatcaacctgctggagaagtactttgacatgaagaagaaccagtgcaaggagggcctggacatctacaagaagttcctgaccaggatgacccgcatcagcgagttcctgaaggtggccgagcaggtgggcatcgacagaggagacatcccagacctgagccaggcccccagcagcctgctggatgccctggagcagcacctggccagcctggagggcaagaagatcaaggacagcacagctgccagccgggccaccaccctgagcaatgctgtgagcagcctggccagcacaggcctgagcctgaccaaggtggatgagcgggagaagcaggccgccctggaggaggagcaggcccggctgaaggccctgaaggagcagaggctgaaggagctggccaagaagccccacaccagcctgaccacagctgccagccctgtgtccaccagcgctgggggcatcatgacagccccagccatcgacatcttcagcacccccagcagcagcaacagcaccagcaagctgcccaatgacctgctggacctgcagcagcccaccttccaccccagcgtgcaccccatgagcacagccagccaggtggccagcacctggggcggcttcacccccagccctgtggcccagccccaccccagcgctggcctgaatgtggactttgaatctgtgtttggaaacaagagcaccaacgtgattgtggacagcggcggctttgatgagctgggcggcctgctgaagcccaccgtggccagccagaaccagaacctgcctgtggccaagctgccccccagcaagctggtgtctgatgacctggacagcagcctggccaacctggtgggcaacctgggcattggaaatggcaccaccaagaatgatgtgaactggagccagcctggagagaagaagctgactggaggcagcaactggcagcccaaggtggcccccaccacagcctggaatgctgccaccatgaatggcatgcacttcccccagtatgcccctcctgtgatggcctacccagccaccacccccaccggcatgattggctacggcatccccccccagatgggctctgtgcctgtgatgacccagcccaccctcatctacagccagcctgtgatgaggcctcccaacccctttggacctgtgtctggggcccagatccagttcatgtag

SEQ ID NO: 163786 - DNA, 1656 bp, synthetic construct
  misc_feature 1..1656: note = Description of Artificial Sequence: Synthetic coding sequence
  source 1..1656: mol_type = other DNA
atgaatgtgaacatcccccagctggccgacagcctgtttgagaggaccaccaacagctcctgggtggtggtgttcaagagcctcatcaccacccaccacctgatggtgtatggaaatgaacgcttcatccagtacctggccagcaggaacaccctcttcaacctgagcaacttcctggacaagagcggcctgcagggctatgacatgagcaccttcatccgccgctacagccgctacctgaatgagaaggctgtgtcctaccggcaggtggcctttgacttcaccaaggtgaagagaggagcagatggagtgatgaggaccatgaacacagagaagctgctgaagacagtgcccatcatccagaaccagatggatgccctgctggacttcaacgtgaacagcaatgagctgaccaatggagtcatcaatgctgccttcatgctgctcttcaaggatgccatccggctgtttgctgcctacaatgaaggcatcatcaacctgctggagaagtactttgacatgaagaagaaccagtgcaaggagggcctggacatctacaagaagttcctgaccaggatgacccgcatcagcgagttcctgaaggtggccgagcaggtgggcatcgacagaggagacatcccagacctgagccaggcccccagcagcctgctggatgccctggagcagcacctggccagcctggagggcaagaagatcaaggacagcacagctgccagccgggccaccaccctgagcaatgctgtgagcagcctggccagcacaggcctgagcctgaccaaggtggatgagcgggagaagcaggccgccctggaggaggagcaggcccggctgaaggccctgaaggagcagaggctgaaggagctggccaagaagccccacaccagcctgaccacagctgccagccctgtgtccaccagcgctgggggcatcatgacagccccagccatcgacatcttcagcacccccagcagcagcaacagcaccagcaagctgcccaatgacctgctggacctgcagcagcccaccttccaccccagcgtgcaccccatgagcacagccagccaggtggccagcacctggggcggcttcacccccagccctgtggcccagccccaccccagcgctggcctgaatgtggactttgagagcgtgtttggaaacaagagcaccaacgtcatcgtggacagcggcggctttgatgagctgggcggcctgctgaagcccaccgtggccagccagaaccagaacctgcctgtggccaagctgccccccagcaagctggtgtctgatgacctggacagcagcctggccaacctggtgggcaacctgggcattggaaatggcaccaccaagaatgatgtgaactggagccagcccggggagaagaagctgaccggcggcagcaactggcagcccaaggtggcccccaccacagcctggaatgctgccaccatggcccctcctgtgatggcctacccagccaccacccccaccggcatgattggctacggcatccccccccagatgggctctgtgcctgtgatgacccagcccaccctcatctacagccagcctgtgatgaggcctcccaaccccttcggccctgtgtctggggcccagatccagttcatgtag

SEQ ID NO: 163787 - DNA, 1455 bp, synthetic construct
  misc_feature 1..1455: note = Description of Artificial Sequence: Synthetic coding sequence
  source 1..1455: mol_type = other DNA
atggcctgccggggcggcgctggaaatggccaccgggccagcgccaccctgagccgggtgtccccaggcagcctgtacacctgcaggaccaggacccacaacatctgcatggtgtctgacttcttctaccccaacatgggcggcgtggagagccacatctaccagctgagccagtgcctgattgagcggggccacaaggtgatcatcgtgacccacgcctacggcaacaggaagggcatccgctacctgaccagcggcctgaaggtgtactacctgcccctgaaggtgatgtacaaccagagcacagccaccaccctcttccacagcctgcccctgctgcgctacatctttgtgcgggagcgggtgaccatcatccacagccacagcagcttcagcgccatggcccatgatgccctcttccacgccaagaccatgggcctgcagacagtgttcacagaccacagcctgtttggatttgctgatgtgtcctctgtgctgaccaacaagctgctgactgtgtccctgtgtgacaccaaccacatcatctgtgtgtcctacaccagcaaggagaacacagtgctgcgggccgccctgaaccctgagatcgtgtctgtcatccccaatgctgtggaccccacagacttcaccccagaccccttcagaagacatgacagcatcaccatcgtggtggtgtcccggctggtgtacaggaagggcatcgacctgctgagcggcatcatccctgagctgtgccagaagtacccagacctgaacttcatcattggaggagagggccccaagaggatcatcctggaggaggtgcgggagcgctaccagctgcatgacagagtgcggctgctgggcgccctggagcacaaggatgtgagaaatgtgctggtgcagggccacatcttcctgaacaccagcctgacagaggccttctgcatggccatcgtggaggccgccagctgtggcctgcaggtggtgtccaccagggtgggcggcatccctgaggtgctgcctgagaacctgatcatcctgtgtgagcccagcgtgaagagcctgtgtgagggcctggagaaggccatcttccagctgaagagcggcaccctgcctgcccctgagaacatccacaacatcgtgaagaccttctacacctggagaaatgtggccgagaggacagagaaggtgtatgacagagtgtctgtggaggccgtgctgcccatggacaagaggctggacaggctcatcagccactgcggccctgtgacaggctacatctttgccctgctggccgtgttcaacttcctgttcctgatcttcctgcgctggatgaccccagacagcatcattgatgtggccattgatgccaccggccccaggggggcctggaccaacaactacagccacagcaagaggggcggggagaacaatgagatcagcgagaccaggtag

SEQ ID NO: 163788 - DNA, 510 bp, synthetic construct
  misc_feature 1..510: note = Description of Artificial Sequence: Synthetic coding sequence
  source 1..510: mol_type = other DNA
atggccatcgtggaggccgccagctgtggcctgcaggtggtgtccaccagggtgggcggcatccctgaggtgctgcctgaaaatctcatcatcctgtgtgagcccagcgtgaagagcctgtgtgagggcctggagaaggccatcttccagctgaagagcggcaccctgcctgcccctgagaacatccacaacatcgtgaagaccttctacacctggagaaatgtggccgagaggacagagaaggtgtatgacagagtgtctgtggaggccgtgctgcccatggacaagaggctggacaggctcatcagccactgcggccctgtgacaggctacatctttgccctgctggccgtgttcaacttcctgttcctgatcttcctgcgctggatgaccccagacagcatcattgatgtggccattgatgccaccggccccaggggggcctggaccaacaactacagccacagcaagagaggaggagaaaataatgagatcagcgagaccaggtag

SEQ ID NO: 163789 - DNA, 753 bp, synthetic construct
  misc_feature 1..753: note = Description of Artificial Sequence: Synthetic coding sequence
  source 1..753: mol_type = other DNA
atggagctgaccggcatcgacctgctgagcggcatcatccctgagctgtgccagaagtacccagacctgaacttcatcattggaggagagggccccaagaggatcatcctggaggaggtgcgggagcgctaccagctgcatgacagagtgcggctgctgggcgccctggagcacaaggatgtgagaaatgtgctggtgcagggccacatcttcctgaacaccagcctgacagaggccttctgcatggccatcgtggaggccgccagctgtggcctgcaggtggtgtccaccagggtgggcggcatccctgaggtgctgcctgagaacctgatcatcctgtgtgagcccagcgtgaagagcctgtgtgagggcctggagaaggccatcttccagctgaagagcggcaccctgcctgcccctgagaacatccacaacatcgtgaagaccttctacacctggagaaatgtggccgagaggacagagaaggtgtatgacagagtgtctgtggaggccgtgctgcccatggacaagaggctggacaggctcatcagccactgcggccctgtgacaggctacatctttgccctgctggccgtgttcaacttcctgttcctgatcttcctgcgctggatgaccccagacagcatcattgatgtggccattgatgccaccggccccaggggggcctggaccaacaactacagccacagcaagaggggcggggagaacaatgagatcagcgagaccaggtag

SEQ ID NO: 163790 - DNA, 1665 bp, synthetic construct
  misc_feature 1..1665: note = Description of Artificial Sequence: Synthetic coding sequence
  source 1..1665: mol_type = other DNA
atgaggcggcccctgagcaaatgtggcatggagcccggcggcggagatgccagcctgaccctgcacggcctgcagaacagaagccacggcaagatcaagctgaggaagaggaagagcaccctgtacttcaacacccaggagaagagcgcccggcggcggggggacctgctgggggagaacatctacctgctgctcttcaccatcgccctgcgcatcctgaactgcttcctggtgcagaccagctttgtgcctgatgagtactggcagagcctggaggtgagccaccacatggtgttcaactacggctacctgacctgggagtggacagagcggctgcggagctacacctaccccctcatctttgccagcatctacaagatcctgcacctgctgggcaaggacagcgtgcagctgctgatctggatcccccggctggcccaggccctgctgtctgctgtggctgatgtgcggctgtacagcctgatgaagcagctggagaaccaggaggtggcccgctgggtgttcttctgccagctgtgctcctggttcacctggtactgctgcaccaggaccctgaccaacaccatggagaccgtgctgaccatcatcgccctcttctactaccccctggagggcagcaagtccatgaacagcgtgaagtacagcagcctggtggccctggccttcatcatccggcccacagctgtgatcctgtggacccccctgctcttccgccacttctgccaggagcccaggaagctggacctgatcctgcaccacttcctgcctgtgggctttgtgaccctgagcctgagcctgatgattgaccgcatcttcttcggccagtggaccctggtgcagttcaacttcctgaagttcaacgtgctgcagaactggggcaccttctacggcagccacccctggcactggtacttcagccagggcttccctgtgatcctgggcacccacctgcccttcttcatccacggctgctacctggcccccaagcgctaccgcatcctgctggtgacagtgctgtggaccctgctggtgtacagcatgctgagccacaaggagttccgcttcatctaccctgtgctgcccttctgcatggtgttctgtggctacagcctgacccacctgaagacctggaagaagccagccctgtccttcctgttcctgagcaacctcttcctggccctgtacacaggcctggtgcaccagaggggcaccctggatgtgatgagccacatccagaaggtgtgctacaacaaccccaacaagagcagcgccagcatcttcatcatgatgccctgccacagcaccccctactacagccacgtgcactgccccctgcccatgaggttcctgcagtgccccccagacctgaccgggaagagccactacctggatgaagcagatgtgttctacctgaaccccctgaactggctgcaccgggagttccatgatgatgccagcctgcccacccacctgatcaccttcagcatcctggaggaggagatcagcgccttcctgatcagcagcaactacaagaggacagctgtgttcttccacacccacctgcctgagggcagaattggcagccacatctacgtgtatgaaaggaagctgaagggcaagttcaacatgaagatgaagttctag

SEQ ID NO: 163791 - DNA, 1080 bp, synthetic construct
  misc_feature 1..1080: note = Description of Artificial Sequence: Synthetic coding sequence
  source 1..1080: mol_type = other DNA
atggagaccgtgctgaccatcatcgccctcttctactaccccctggagggcagcaagtccatgaacagcgtgaagtacagcagcctggtggccctggccttcatcatccggcccacagctgtgatcctgtggacccccctgctcttccgccacttctgccaggagcccaggaagctggacctgatcctgcaccacttcctgcctgtgggctttgtgaccctgagcctgagcctgatgattgaccgcatcttcttcggccagtggaccctggtgcagttcaacttcctgaagttcaacgtgctgcagaactggggcaccttctacggcagccacccctggcactggtacttcagccagggcttccctgtgatcctgggcacccacctgcccttcttcatccacggctgctacctggcccccaagcgctaccgcatcctgctggtgacagtgctgtggaccctgctggtgtacagcatgctgagccacaaggagttccgcttcatctaccctgtgctgcccttctgcatggtgttctgtggctacagcctgacccacctgaagacctggaagaagccagccctgtccttcctgttcctgagcaacctcttcctggccctgtacacaggcctggtgcaccagaggggcaccctggatgtgatgagccacatccagaaggtgtgctacaacaaccccaacaagagcagcgccagcatcttcatcatgatgccctgccacagcaccccctactacagccacgtgcactgccccctgcccatgaggttcctgcagtgccccccagacctgaccgggaagagccactacctggatgaagcagatgtgttctacctgaaccccctgaactggctgcaccgggagttccatgatgatgccagcctgcccacccacctgatcaccttcagcatcctggaggaggagatcagcgccttcctgatcagcagcaactacaagaggacagctgtgttcttccacacccacctgcctgagggccgcatcggcagccacatctacgtgtatgaaaggaagctgaagggcaagttcaacatgaagatgaagttctag

SEQ ID NO: 163792 - DNA, 894 bp, synthetic construct
  misc_feature 1..894: note = Description of Artificial Sequence: Synthetic coding sequence
  source 1..894: mol_type = other DNA
atgtatgcccagcctgtgaccaacaccaaggaggtgaagtggcagaaggtgctgtatgagcggcagcccttcccagacaactacgtggaccggcgcttcctggaggagctgaggaagaacatccacgccaggaagtaccagtactgggccgtggtgtttgagagctctgtggtgatccagcagctgtgcagcgtgtgtgtgtttgtggtgatctggtggtacatggatgagggcctgctggccccccactggctgctgggcaccggcctggccagcagcctgattggctacgtgctgtttgacctgattgatggaggagagggcaggaagaagagcggccagacccgctgggccgacctgaagagcgccctggtgttcatcaccttcacctacggcttcagccctgtgctgaagaccctgacagaatctgtgtccacagacaccatctatgccatgtctgtgttcatgctgctgggccacctgatcttctttgattatggagccaatgctgccatcgtgagcagcaccctgagcctgaacatggccatctttgcctctgtgtgcctggccagccggctgcccaggagcctgcacgccttcatcatggtgacctttgccatccagatctttgccctgtggcccatgctgcagaagaagctgaaggcctgcacccccaggagctatgtgggcgtgaccctgctgtttgccttctctgctgtgggcggcctgctgagcatctctgctgtgggcgctgtgctgtttgccctgctgctgatgagcatcagctgcctgtgccccttctacctgatccggctgcagctgttcaaggagaacatccacggcccctgggatgaggccgagatcaaggaggacctgagccgcttcctgtcctag

SEQ ID NO: 163793 - DNA, 894 bp, synthetic construct; identical to SEQ ID NO: 163792
  misc_feature 1..894: note = Description of Artificial Sequence: Synthetic coding sequence
  source 1..894: mol_type = other DNA

SEQ ID NO: 163794 - DNA, 894 bp, synthetic construct; identical to SEQ ID NO: 163792
  misc_feature 1..894: note = Description of Artificial Sequence: Synthetic coding sequence
  source 1..894: mol_type = other DNA

SEQ ID NO: 163795 - DNA, 660 bp, synthetic construct
  misc_feature 1..660: note = Description of Artificial Sequence: Synthetic coding sequence
  source 1..660: mol_type = other DNA
atgaaggacaatgacatcaagaggctgctgtacacccacctgctgtgcatcttcagcatcatcctgtctgtgttcatccccagcctcttcctggagaacttcagcatcctggagacccacctgacctggctgtgcatctgcagcggctttgtgacagctgtgaacctggtgctgtacctggtggtgaagcccaacaccagcagcaagaggagcagcctgagccacaaggtgacaggcttcctgaagtgctgcatctacttcctgatgagctgcttctccttccacgtgatctttgtgctgtatggagcccccctcatcgagctggccctggagaccttcctgtttgctgtgatcctgagcaccttcaccaccgtgccctgcctgtgcctgctgggccccaacctgaaggcctggctgcgggtcttcagcagaaatggagtgaccagcatctgggagaacagcctgcagatcaccaccatcagcagctttgtgggcgcctggctgggcgccctgcccatccccctggactgggagcggccctggcaggtgtggcccatcagctgcaccctgggcgccaccttcggctacgtggccggcctggtgatcagccccctgtggatctactggaacaggaagcagctgacctacaagaacaactag

SEQ ID NO: 163796 - DNA, 621 bp, synthetic construct
  misc_feature 1..621: note = Description of Artificial Sequence: Synthetic coding sequence
  source 1..621: mol_type = other DNA
atgaaggacaatgacatcaagaggctgctgtacacccacctgctgtgcatcttcagcatcatcctgtctgtgttcatccccagcctcttcctggagaacttcagcatcctggagacccacctgacctggctgtgcatctgcagcggctttgtgacagctgtgaacctggtgctgtacctggtggtgaagcccaacaccagcagcaagaggagcagcctgagccacaaggtgacaggcttcctgaagtgctgcatctacttcctgatgagctgcttctccttccacgtgatctttgtgctgtatggagcccccctcatcgagctggccctggagaccttcctgtttgctgtgatcctgagcaccttcaccaccgtgccctgcctgtgcctgctgggccccaacctgaaggcctggctgcgggtcttcagcagaaatggagtgaccagcatctgggagaacagcctgcagatcaccaccatcagcagctttgtgggcgcctggctgggcgccctgcccatccccctggactgggagcggccctggcagatgacagtggagaggaagaggagcacctaccgcagcctgcacgtgccctgccggggcctgggcaccgtgaagtag

SEQ ID NO: 163797 - DNA, 150 bp, synthetic construct
  misc_feature 1..150: note = Description of Artificial Sequence: Synthetic coding sequence
  source 1..150: mol_type = other DNA
atgaaggacaatgacatcaagaggctgctgtacacccacctgctgtgcatcttcagcatcatcctgtctgtgttcatccccagcctcttcctggagaacttcagcatcctggagacccacctgacctggctgtgcatctgcagcggctag

SEQ ID NO: 163798 - DNA, 999 bp, synthetic construct
  misc_feature 1..999: note = Description of Artificial Sequence: Synthetic coding sequence
  source 1..999: mol_type = other DNA
atggctgtgacagacagcctgagccgggccgccaccgtgctggccaccgtgctgctgctgagctttggatctgtggccgccagccacatcgaggaccaggccgagcagttcttccgcagcggccacaccaacaactgggccgtgctggtgtgcaccagccgcttctggttcaactacagacatgtggccaacaccctgtctgtgtacagatctgtgaagaggctgggcatcccagacagccacatcgtgctgatgctggctgatgacatggcctgcaaccccaggaaccccaagccagccaccgtcttcagccacaagaacatggagctgaatgtgtatggagatgatgtggaggtggactaccgctcctatgaggtgacagtggagaacttcctgcgggtgctgaccggccgcatcccccccagcacccccaggagcaagaggctgctgagtgatgacaggagcaacatcctgatctacatgacaggccacggcggcaatggcttcctgaagttccaggacagcgaggagatcaccaacatcgagctggctgatgcctttgagcagatgtggcagaagaggcgctacaatgagctgctcttcatcatcgacacctgccagggcgcctccatgtatgagcgcttctacagccccaacatcatggccctggccagcagccaggtgggggaggacagcctgagccaccagcctgaccctgccatcggcgtgcacctgatggaccgctacaccttctacgtgctggagttcctggaggagatcaacccagccagccagaccaacatgaatgacctcttccaggtgtgccccaagagcctgtgtgtgtccaccccaggccacaggacagacctcttccagagggaccccaagaatgtgctgatcacagacttcttcggctctgtgaggaaggtggagatcaccacagagaccatcaagctgcagcaggacagcgagatcatggagagccgctacagcagctag

SEQ ID NO: 163799 - DNA, 1188 bp, synthetic construct
  misc_feature 1..1188: note = Description of Artificial Sequence: Synthetic coding sequence
  source 1..1188: mol_type = other DNA
atggctgtgacagacagcctgagccgggccgccaccgtgctggccaccgtgctgctgctgagctttggatctgtggccgccagccacatcgaggaccaggccgagcagttcttccgcagcggccacaccaacaactgggccgtgctggtgtgcaccagccgcttctggttcaactacagacatgtggccaacaccctgtctgtgtacagatctgtgaagaggctgggcatcccagacagccacatcgtgctgatgctggctgatgacatggcctgcaaccccaggaaccccaagccagccaccgtcttcagccacaagaacatggagctgaatgtgtatggagatgatgtggaggtggactaccgctcctatgaggtgacagtggagaacttcctgcgggtgctgaccggccgcatcccccccagcacccccaggagcaagaggctgctgagtgatgacaggagcaacatcctgatctacatgacaggccacggcggcaatggcttcctgaagttccaggacagcgaggagatcaccaacatcgagctggctgatgcctttgagcagatgtggcagaagaggcgctacaatgagctgctcttcatcatcgacacctgccagggcgcctccatgtatgagcgcttctacagccccaacatcatggccctggccagcagccaggtgggggaggacagcctgagccaccagcctgaccctgccatcggcgtgcacctgatggaccgctacaccttctacgtgctggagttcctggaggagatcaacccagccagccagaccaacatgaatgacctcttccaggtgtgccccaagagcctgtgtgtgtccaccccaggccacaggacagacctcttccagagggaccccaagaatgtgctgatcacagacttcttcggctctgtgaggaaggtggagatcaccacagagaccatcaagctgcagcaggacagcgagatcatggagagcagctacaaggaggaccagatggatgagaagctgatggagcccctgaagtatgcagagcagctgcctgtggcccagatcatccaccagaagcccaagctgaaggactggcaccccccaggcggcttcatcctgggcctgtgggccctgatcatcatggtgttcttcaagacctacggcatcaagcacatgaagttcatcttctag

SEQ ID NO: 163800 - DNA, 960 bp, synthetic construct
  misc_feature 1..960: note = Description of Artificial Sequence: Synthetic coding sequence
  source 1..960: mol_type = other DNA
atggctgtgacagacagcctgagccgggccgccaccgtgctggccaccgtgctgctgctgagctttggatctgtggccgccagccacatcgaggaccaggccgagcagttcttccgcagcggccacaccaacaactgggccgtgctggtgacagtggagaacttcctgcgggtgctgaccggccgcatcccccccagcacccccaggagcaagaggctgctgagtgatgacaggagcaacatcctgatctacatgacaggccacggcggcaatggcttcctgaagttccaggacagcgaggagatcaccaacatcgagctggctgatgcctttgagcagatgtggcagaagaggcgctacaatgagctgctcttcatcatcgacacctgccagggcgcctccatgtatgagcgcttctacagccccaacatcatggccctggccagcagccaggtgggggaggacagcctgagccaccagcctgaccctgccatcggcgtgcacctgatggaccgctacaccttctacgtgctggagttcctggaggagatcaacccagccagccagaccaacatgaatgacctcttccaggtgtgccccaagagcctgtgtgtgtccaccccaggccacaggacagacctcttccagagggaccccaagaatgtgctgatcacagacttcttcggctctgtgaggaaggtggagatcaccacagagaccatcaagctgcagcaggacagcgagatcatggagagcagctacaaggaggaccagatggatgagaagctgatggagcccctgaagtatgcagagcagctgcctgtggcccagatcatccaccagaagcccaagctgaaggactggcaccccccaggcggcttcatcctgggcctgtgggccctgatcatcatggtgttcttcaagacctacggcatcaagcacatgaagttcatcttctag

SEQ ID NO: 163801 - DNA, 906 bp, synthetic construct
  misc_feature 1..906: note = Description of Artificial Sequence: Synthetic coding sequence
  source 1..906: mol_type = other DNA
atggctgtgacagacagcctgagccgggccgccaccgtgctggccaccgtgctgctgctgagctttggatctgtggccgccagccacatcgaggtgacagtggagaacttcctgcgggtgctgaccggccgcatcccccccagcacccccaggagcaagaggctgctgagtgatgacaggagcaacatcctgatctacatgacaggccacggcggcaatggcttcctgaagttccaggacagcgaggagatcaccaacatcgagctggctgatgcctttgagcagatgtggcagaagaggcgctacaatgagctgctcttcatcatcgacacctgccagggcgcctccatgtatgagcgcttctacagccccaacatcatggccctggccagcagccaggtgggggaggacagcctgagccaccagcctgaccctgccatcggcgtgcacctgatggaccgctacaccttctacgtgctggagttcctggaggagatcaacccagccagccagaccaacatgaatgacctcttccaggtgtgccccaagagcctgtgtgtgtccaccccaggccacaggacagacctcttccagagggaccccaagaatgtgctgatcacagacttcttcggctctgtgaggaaggtggagatcaccacagagaccatcaagctgcagcaggacagcgagatcatggagagcagctacaaggaggaccagatggatgagaagctgatggagcccctgaagtatgcagagcagctgcctgtggcccagatcatccaccagaagcccaagctgaaggactggcaccccccaggcggcttcatcctgggcctgtgggccctgatcatcatggtgttcttcaagacctacggcatcaagcacatgaagttcatcttctag

SEQ ID NO: 163802 - DNA, 558 bp, synthetic construct
  misc_feature 1..558: note = Description of Artificial Sequence: Synthetic coding sequence
  source 1..558: mol_type = other DNA
atgggcaagaagcagaacaagaagaaggtggaggaggtgctggaggaggaggaggaggagtatgtggtggagaaggtgctggacagaagagtggtgaagggcaaggtggagtacctgctgaagtggaagggcttcagtgatgaggacaacacctgggagcctgaggagaacctggactgcccagacctgattgctgagttcctgcagagccagaagacagcccatgaaacagacaagtctgagggcggcaagaggaaggctgacagcgacagcgaggacaagggggaggagagcaagcccaagaagaagaaggaggagagcgagaagccccggggctttgcccggggcctggagcctgagcgcatcattggagccacagacagcagtggagagctgatgttcctgatgaagtggaagaacagtgatgaggccgacctggtgcctgccaaggaggccaacgtgaagtgcccccaggtggtgatctccttctatgaggagcggctgacctggcacagctaccccagtgaagatgatgacaagaaggatgacaagaactag

SEQ ID NO: 163803 - DNA, 735 bp, synthetic construct
  misc_feature 1..735: note = Description of Artificial Sequence: Synthetic coding sequence
  source 1..735: mol_type = other DNA
atggaggccatgtggctgctgtgtgtggccctggccgtgctggcctggggcttcctgtgggtgtgggacagcagcgagaggatgaagagccgggagcagggcggccgcctgggcgctgagagcaggaccctgctggtgattgcccacccagatgatgaggccatgttctttgcccccaccgtgctgggcctggcccggctgcggcactgggtgtacctgctgtgcttctctgctggcaactactacaaccagggcgagaccaggaagaaggagctgctgcagagctgtgatgtgctgggcatccccctgagctctgtgatgatcatcgacaacagagacttcccagatgaccccggcatgcagtgggacacagagcacgtggcccgggtgctgctgcagcacatcgaggtgaatggcatcaacctggtggtgacctttgatgctgggggcgtgtctggccacagcaaccacatcgccctgtatgctgctgtgcgggtgctgtgtgcccacgcctctgtgtgtgaatgtgccgcccaggtgcacctgcccagcggcagcgccctggtgtctgccagctatgccggctgccccctgcgggcccagcagcagaggtctggaacaggccaggagagccacgtgctgcccccccagcctgcccccctggtgcccccacccctgcactacctgctgcctgtgcatgagaaccagctgacagagctgcccctgaagccctag

SEQ ID NO: 163804 - DNA, 1272 bp, synthetic construct
  misc_feature 1..1272: note = Description of Artificial Sequence: Synthetic coding sequence
  source 1..1272: mol_type = other DNA
atgggcagcaccaagcactggggcgagtggctgctgaacctgaaggtggccccagctggggtgtttggagtggccttcctggcccgggtggccctggtgttctatggagtcttccaggacaggaccctgcacgtgcgctacacagacatcgactaccaggtgttcacagatgctgccaggtttgtgacagagggccgcagcccctacctgcgggccacctaccgctacacccccctgctgggctggctgctgacccccaacatctacctgtctgagctgtttgggaagttcctgttcatcagctgtgacctgctgacagccttcctgctgtaccgcctgctgctgctgaagggcctgggccggcggcaggcctgtggctactgtgtgttctggctgctgaaccccctgcccatggctgtgagcagcagaggaaatgctgacagcatcgtggccagcctggtgctgatggtgctgtacctgatcaagaagaggctggtggcctgtgccgctgtgttctacggctttgctgtgcacatgaagatctaccctgtgacctacatcctgcccatcaccctgcacctgctgcctgaccgggacaatgacaagagcctgcggcagttccgctacaccttccaggcctgcctgtatgagctgctgaagaggctgtgcaacagagctgtgctgctgtttgtggccgtggccggcctgaccttctttgccctgagctttggcttctactatgaatatggctgggagttcctggagcacacctacttctaccacctgacccggcgggacatccgccacaacttcagcccctacttctacatgctgtacctgacagctgagagcaagtggagcttcagcctgggcattgctgccttcctgccccagctgatcctgctgtctgctgtgtcctttgcctactacagagacctggtgttctgctgcttcctgcacaccagcatctttgtgaccttcaacaaggtgtgcaccagccagtacttcctgtggtacctgtgcctgctgcccctggtgatgcccctggtgaggatgccctggaagagagctgtggtgctgctgatgctgtggttcatcggccaggccatgtggctggccccagcctacgtgctggagttccagggcaagaacaccttcctgttcatctggctggccggcctcttcttcctgctgatcaactgcagcatcctgatccagatcatcagccactacaaggaggagcccctgacagagcgcatcaagtatgactag

SEQ ID NO: 163805 - DNA, 2796 bp, synthetic construct
  misc_feature 1..2796: note = Description of Artificial Sequence: Synthetic coding sequence
  source 1..2796: mol_type = other DNA
atgctgctcttcttcaccctgggcctgctgatccactttgtgttctttgccagcatctttgacatctacttcaccagccccctggtgcacggcatgaccccccagttcacccccctgcccccaccagcccggcggctggtgctgtttgtggctgatggcctgcgggcagatgccctgtatgagctggatgaaaatggaaacagccgggcccccttcatccggaacatcatcatgcatgagggctcctggggcatcagccacaccagggtgcccacagagagccggcccggccacgtggccctgattgctggcttctatgaagatgtgtctgctgtggccaagggctggaaggagaaccctgtggagtttgacagcctcttcaatgaaagcaagtacacctggagctggggcagcccagacatcctgcccatgtttgccaagggggccagcggggaccacgtgtacacctacagctatgatgccaagcgggaggactttggagcccaggatgccaccaagctggacacctgggtgtttgacaacgtgaaggacttcttccaccacgccaggaacaaccagagcctcttcagcaagatcaatgaggagaagatcgtgttcttcctgcacctgctgggcatcgacaccaacggccacgcccaccggcccagcagccgggactacaagcacaacatcaagaaggtggatgatggagtgaaggagatcgtgtccatgttcaaccacttctatggaaatgatggcaagaccaccttcatcttcaccagtgaccacggcatgacagactggggcagccatggagctggccaccccagcgagaccctgacccccctggtgacctggggcgccggcatcaagtacccccagagggtgtctgcccagcagtttgatgatgccttcctgaaggagtggaggctggagaactggaagaggctggatgtgaaccaggccgacatcgcccccctgatgaccagcctcatcggcgtgcccttccccctgaacagcgtgggcatcctgcctgtggactacctgaacaacacagacctcttcaaggccgagagcatgttcaccaatgctgtgcagatcctggagcagttcaaggtgaagatgacccagaagaaggaggtgaccctgcccttcctgttcacccccttcaagctgctgagtgacagcaagcagttcaacatcctgaggaaggcccggagctacatcaagcacaggaagtttgatgaggtggtgtccctgtgcaaggagctgatccacctggccctgaagggcctgagctactaccacacctatgaccgcttcttcctgggcgtgaatgtggtgattggatttgtgggctggatctcctatgccagcctgctgatcatcaagagccacagcaacctgatcaagggcgtgtccaaggaggtgaagaagcccagccacctgctgccctgcagctttgtggccatcggcatcctggtggccttcttcctgctgatccaggcctgcccctggacctactacgtgtatggcctgctgcccctgcccatctggtatgctgtgctgcgggagttccaggtgatccaggacctggtggtgtctgtgctgacctaccccctgagccactttgtgggctacctgctggccttcaccctgggcatcgaggtgctggtgctgtccttcttctaccgctacatgctgacagctggcctgacagcctttgctgcctggcccttcctgacccggctgtggacccgggccaagatgaccagcctgtcctggaccttcttcagcctgctgctggccgtgttccccctgatgcctgtggtgggcaggaagccagacatcagcctggtgatgggcgccggcctgctggtgctgctgctgagcctgtgtgtggtgaccagcctgatgaagaggaaggacagcttcatcaaggaggagctgctggtgcacctgctgcaggtgctgagcacagtgctgtccatgtatgtggtgtacagcacccagagcagcctgctgaggaagcagggcctgcccctgatgaaccagatcatctcctgggccaccctggccagcagcctggtggtgcccctgctgagcagccctgtgctcttccagaggctcttcagcatcctgctgagcctgatgagcacctacctgctgctgagcacaggctatgaggccctcttccccctggtgctgagctgcctgatgtttgtgtggatcaacatcgagcaggagaccctgcagcagagcggcgtgtgctgcaagcagaagctgaccagcatccagttctcctacaacacagacatcacccagttccggcagctgtacctggatgacatcagaagagccttcttcctggtgttcttcctggtgacagccttctttggaactggaaacatcgccagcatcaacagctttgacctggcctctgtgtactgcttcctgaccgtcttcagccccttcatgatgggcgccctgatgatgtggaagatcctgatcccctttgtgctggtgatgtgtgcctttgaggccgtgcagctgaccacccagctgagcagcaagagcctcttcctgattgtgctggtgatcagtgacatcatggccctgcacttcttcttcctggtgaaggactatggctcctggctggacatcggcaccagcatcagccactacgtgattgtgatgtccatgaccatcttcctggtgttcctgaatggcctggcccagctgctgaccaccaagaagctgcggctgtgtgggaagcccaagagccacttcatgtag

SEQ ID NO: 163806 - DNA, 2796 bp, synthetic construct; identical to SEQ ID NO: 163805
  misc_feature 1..2796: note = Description of Artificial Sequence: Synthetic coding sequence
  source 1..2796: mol_type = other DNA

SEQ ID NO: 163807 - DNA, 405 bp, synthetic construct
  misc_feature 1..405: note = Description of Artificial Sequence: Synthetic coding sequence
  source 1..405: mol_type = other DNA
atggtggagaacagccccagccccctgcctgagcgggccatctacggctttgtgctcttcctgagcagccagtttggcttcatcctgtacctggtgtgggccttcatccctgagagctggctgaacagcctgggcctgacctactggccccagaagtactgggccgtggccctgcctgtgtacctgctgattgccatcgtcatcggctacgtgctgctgtttggcatcaacatgatgagcaccagccccctggacagcatccacaccatcacagacaactatgccaagaaccagcagcagaagaagtaccaggaggaggccatcccagccctgcgggacatcagcatcagcgaggtgaaccagatgttcttcctggccgccaaggagctgtacaccaagaactag

SEQ ID NO: 163808 - DNA, 327 bp, synthetic construct
  misc_feature 1..327: note = Description of Artificial Sequence: Synthetic coding sequence
  source 1..327: mol_type = other DNA
atggtgctgtacctggtgtgggccttcatccctgagagctggctgaacagcctgggcctgacctactggccccagaagtactgggccgtggccctgcctgtgtacctgctgattgccatcgtcatcggctacgtgctgctgtttggcatcaacatgatgagcaccagccccctggacagcatccacaccatcacagacaactatgccaagaaccagcagcagaagaagtaccaggaggaggccatcccagccctgcgggacatcagcatcagcgaggtgaaccagatgttcttcctggccgccaaggagctgtacaccaagaactag

SEQ ID NO: 163809 - DNA, 405 bp, synthetic construct; identical to SEQ ID NO: 163807
  misc_feature 1..405: note = Description of Artificial Sequence: Synthetic coding sequence
  source 1..405: mol_type = other DNA

SEQ ID NO: 163810 - DNA, 405 bp, synthetic construct; identical to SEQ ID NO: 163807
  misc_feature 1..405: note = Description of Artificial Sequence: Synthetic coding sequence
  source 1..405: mol_type = other DNA

SEQ ID NO: 163811 - DNA, 78 bp, synthetic construct
  misc_feature 1..78: note = Description of Artificial Sequence: Synthetic coding sequence
  source 1..78: mol_type = other DNA
atggtgctgtacctggtgtgggccttcatccctgagagctggctgaacagcctgggcctgacctactggccccagtag

SEQ ID NO: 163812 - DNA, 477 bp, synthetic construct
  misc_feature 1..477: note = Description of Artificial Sequence: Synthetic coding sequence
  source 1..477: mol_type = other DNA
atggtgcccaggagcaccagcctggccctgattgtgttcctgttccaccggctgagcaaggcccctgggaagatggtggagaacagccccagccccctgcctgagcgggccatctacggctttgtgctcttcctgagcagccagtttggcttcatcctgtacctggtgtgggccttcatccctgagagctggctgaacagcctgggcctgacctactggccccagaagtactgggccgtggccctgcctgtgtacctgctgattgccatcgtcatcggctacgtgctgctgtttggcatcaacatgatgagcaccagccccctggacagcatccacaccatcacagacaactatgccaagaaccagcagcagaagaagtaccaggaggaggccatcccagccctgcgggacatcagcatcagcgaggtgaaccagatgttcttcctggccgccaaggagctgtacaccaagaactag

SEQ ID NO: 163813 - DNA, 1848 bp, synthetic construct
  misc_feature 1..1848: note = Description of Artificial Sequence: Synthetic coding sequence
  source 1..1848: mol_type = other DNA
atggcccgggcctgcctgatccagaggctgcccatcaagagggactgcacccctgtgtttgtgcggggcctgagcagccccagcgctgccatggccctgctgtctgagggcctggatgaggtgcctgctgcctgcctgagcccctgtggcccccccaaccccacagagctgttcagcgagagccggcggctggccctggaggagctggtggccggcggccctgaggcctttgctgccttcctgcggcgggagcggctggcccgcttcctgaacccagatgaggtgcacgccatcctgcgggctgctgagaggcctggagaggagggcgctgctgctgctgctgctgctgaagattcttttggcagcagccatgactgcagcagcggcacctacttccctgagcagagcgacctggagccccccctgctggagctgggctggccagccttctaccagggcgcctacagaggagccaccagggtggagacccacttccagcccaggggggccggggagggcggcccctacggctgcaaggatgccctgcggcagcagctgcggagcgcccgggaggtgattgctgtggtgatggatgtgttcacagacatcgacatcttccgggacctgcaggagatctgcaggaagcagggcgtggccgtgtacatcctgctggaccaggccctgctgagccagttcctggacatgtgcatggacctgaaggtgcaccctgagcaggagaagctgatgacagtgaggaccatcactggaaacatctactatgcccggagcggcaccaagatcatcggcaaggtgcatgagaagttcaccctgattgatggcatccgggtggccaccggcagctacagcttcacctggacagatggcaagctgaacagcagcaacctggtgatcctgagcggccaggtggtggagcactttgacctggagttccgcatcctgtatgcccagagcaagcccatcagccccaagctgctgagccacttccagagcagcaacaagtttgaccacctgaccaacaggaagccccagagcaaggagctgaccctgggcaacctgctgaggatgaggctggcccggctgagcagcacccccaggaaggctgacctggaccctgagatgcctgctgagggcaaggccgagaggaagccccatgactgtgagagcagcacagtgtctgaggaggactacttcagcagccacagagatgagctgcagagcaggaaggccattgatgctgccacccagacagagcctggagaggagatgcctggcctgtctgtgtctgaggtgggcacccagaccagcatcaccacagcctgtgccggcacccagacagctgtgatcacccgcatcgccagcagccagaccaccatctggagccgcagcaccaccacccagacagacatggatgagaacatcctcttcccccggggcacccagagcacagagggcagccctgtgtccaagatgtctgtgagccgcagcagcagcctgaagagcagcagctctgtgagcagccagggctctgtggccagcagcacaggcagccctgccagcatccgcaccacagacttccacaaccctggctaccccaagtacctgggcaccccccacctggagctgtacctgagtgacagcctgaggaacctgaacaaggagcggcagttccactttgctggcatccgcagccggctgaaccacatgctggccatgctgagcaggaggaccctcttcacagagaaccacctgggcctgcacagcggcaacttcagccgggtgaacctgctggccgtgagagatgtggccctgtaccccagctaccagtag

SEQ ID NO: 163814 - DNA, 1248 bp, synthetic construct
  misc_feature 1..1248: note = Description of Artificial Sequence: Synthetic coding sequence
  source 1..1248: mol_type = other DNA
atggccgcccccctggtgctggtgctggtggtggccgtgacagtgcgggccgccctcttccgcagcagcctggccgagttcatcagcgagcgggtggaggtggtgagccccctgagctcctggaagagggtggtggagggcctgagcctgctggacctgggcgtgagcccctacagcggggctgtgttccacgagatcacagatgccctgacagccatcgccctgtactttgccatccaggacttcaacaaggtggtgttcaagaagcagaagctgctgctggagctggaccagtatgccccagatgtggccgagctgatccgcacccccatggagatgagatacatccccctgaaggtggccctcttctacctgctgaacccctacaccatcctgagctgtgtggccaagagcacctgtgccatcaacaacaccctgattgccttcttcatcctgaccaccatcaagggcagcgccttcctgagcgccatcttcctggccctggccacctaccagagcctgtaccccctgaccctgtttgtgcccggcctgctgtacctgctgcagaggcagtacatccctgtgaagatgaagagcaaggccttctggatcttctcctgggagtatgccatgatgtatgtgggcagcctggtggtgatcatctgcctgtccttcttcctgctgagctcctgggacttcatcccagctgtgtatggcttcatcctgtctgtgcctgacctgacccccaacatcggcctcttctggtacttctttgctgagatgtttgagcacttcagcctcttctttgtgtgtgtgttccagatcaacgtgttcttctacaccatccccctggccatcaagctgaaggagcaccccatcttcttcatgttcatccagattgctgtgattgccatcttcaagagctaccccaccgtgggagatgtggccctgtacatggccttcttccctgtgtggaaccacctgtaccgcttcctgaggaacatctttgtgctgacctgcatcatcatcgtgtgcagcctgctcttccctgtgctgtggcacctgtggatctatgccggcagcgccaacagcaacttcttctacgccatcaccctgaccttcaacgtgggccagatcctgctgatcagtgactacttctacgccttcctgcggcgggagtactacctgacccacggcctgtacctgacagccaaggatggaacagaggccatgctggtgctgaagtag

SEQ ID NO: 163815 - DNA, 513 bp, synthetic construct
  misc_feature 1..513: note = Description of Artificial Sequence: Synthetic coding sequence
  source 1..513: mol_type = other DNA
gtgtctgtgcccacccacctggtgtgccccaggacccccctgagccccccagctgctgtgcacacctgtgaaaatgaggagcagagcctgctggacctcttcctgggcgtgtgccacgacatcaacgtgttcttctacaccatccccctggccatcaagctgaaggagcaccccatcttcttcatgttcatccagattgctgtgattgccatcttcaagagctaccccaccgtgggagatgtggccctgtacatggccttcttccctgtgtggaaccacctgtaccgcttcctgaggaacatctttgtgctgacctgcatcatcatcgtgtgcagcctgctcttccctgtgctgtggcacctgtggatctatgccggcagcgccaacagcaacttcttctacgccatcaccctgaccttcaacgtgggccagatcctgctgatcagtgactacttctacgccttcctgcggcgggagtactacctgacccacggcctgtacctgacagcctag

SEQ ID NO: 163816 - DNA, 1272 bp, synthetic construct
  misc_feature 1..1272: note = Description of Artificial Sequence: Synthetic coding sequence
  source 1..1272: mol_type = other DNA
atggccgcccccctggtgctggtgctggtggtggccgtgacagtgcgggccgccctcttccgcagcagcctggccgagttcatcagcgagcgggtggaggtggtgagccccctgagctcctggaagagggtggtggagggcctgagcctgctggacctgggcgtgagcccctacagcggggctgtgttccacgagacccccctcatcatctacctgttccacttcctgattgattatgcagagctggtgttcatgatcacagatgccctgacagccatcgccctgtactttgccatccaggacttcaacaaggtggtgttcaagaagcagaagctgctgctggagctggaccagtatgccccagatgtggccgagctgatccgcacccccatggagatgagatacatccccctgaaggtggccctcttctacctgctgaacccctacaccatcctgagctgtgtggccaagagcacctgtgccatcaacaacaccctgattgccttcttcatcctgaccaccatcaagggcagcgccttcctgagcgccatcttcctggccctggccacctaccagagcctgtaccccctgaccctgtttgtgcccggcctgctgtacctgctgcagaggcagtacatccctgtgaagatgaagagcaaggccttctggatcttctcctgggagtatgccatgatgtatgtgggcagcctggtggtgatcatctgcctgtccttcttcctgctgagctcctgggacttcatcccagctgtgtatggcttcatcctgtctgtgcctgacctgacccccaacatcggcctcttctggtacttctttgctgagatgtttgagcacttcagcctcttctttgtgtgtgtgttccagatcaacgtgttcttctacaccatccccctggccatcaagctgaaggagcaccccatcttcttcatgttcatccagattgctgtgattgccatcttcaagagctaccccaccgtgggagatgtggccctgtacatggccttcttccctgtgtggaaccacctgtaccgcttcctgaggaacatctttgtgctgacctgcatcatcatcgtgtgcagcctgctcttccctgtgctgtggcacctgtggatctatgccggcagcgccaacagcaacttcttctacgccatcaccctgaccttcaacgtgggccagatgggcttctgtggggacaggatggccggcacctgcccagaggccatccgggctgctggggacaggacccccagctag

SEQ ID NO: 163817 - DNA, 1482 bp, synthetic construct
  misc_feature 1..1482: note = Description of Artificial Sequence: Synthetic coding sequence
  source 1..1482: mol_type = other DNA
atgtggccccaggaccccagcaggaaggaggtgctgcgctttgctgtgtcctgccgcatcctgaccctgatgctgcaggccctcttcaatgccatcatcccagaccaccacgccgaggccttcagccccccccggctggcccccagcggctttgtggaccagctggtggagggcctgctgggcggcctgagccactgggatgctgagcacttcctgttcatcgccgagcacggctacctgtatgagcacaactttgccttcttccctggcttccccctggccctgctggtgggcacagagctgctgcggcccctgcggggcctgctgagcctgcggagctgcctgctgatctctgtggccagcctgaacttcctgttcttcatgctggccgctgtggccctgcatgacctgggctgcctggtgctgcactgcccccaccagagcttctatgctgccctgctcttctgcctgagccctgccaacgtgttcctggccgccggctacagcgaggccctgtttgccctgctgaccttcagcgccatgggccagctggagcggggccgggtgtggacctctgtgctgctgtttgcctttgccaccggggtgcgcagcaatggcctggtgtctgtgggcttcctgatgcacagccagtgccagggcttcttcagcagcctgaccatgctgaaccccctgcggcagctgttcaagctgatggccagcctcttcctgagcgtcttcaccctgggcctgccctttgccctcttccagtactatgcctacacccagttctgcctgcccggcagcgcccggcccatccctgagcccctggtgcagctggccgtggacaagggctacagaattgctgagggcaatgaaccaccctggtgcttctgggatgtgcccctcatctacagctacatccaggatgtgtactggaatgtgggcttcctgaagtactatgagctgaagcaggtgcccaacttcctgctggccgcccctgtggccatcctggtggcctgggccacctggacctacgtgaccacccacccctggctgtgcctgaccctgggcctgcagaggagcaagaacaacaagaccctggagaagccagacctgggcttcctgagcccccaggtgtttgtgtatgtggtgcacgccgctgtgctgctgctgtttggaggcctgtgcatgcacgtgcaggtgctgacccgcttcctgggcagcagcacccccatcatgtactggttccctgcccacctgctgcaggaccaggagcccctgctgcggagcctgaagacagtgccctggaagcccctggccgaggacagccccccaggccagaaggtgcccaggaaccccatcatgggcctgctgtaccactggaagacctgcagccctgtgacccgctacatcctgggctacttcctgacctactggctgctgggcctgctgctgcactgcaacttcctgccctggacctag

SEQ ID NO: 163818 - DNA, 1482 bp, synthetic construct; identical to SEQ ID NO: 163817
  misc_feature 1..1482: note = Description of Artificial Sequence: Synthetic coding sequence
  source 1..1482: mol_type = other DNA

SEQ ID NO: 163819 - DNA, 219 bp, synthetic construct
  misc_feature 1..219: note = Description of Artificial Sequence: Synthetic coding sequence
  source 1..219: mol_type = other DNA
atgtggccccaggaccccagcaggaaggaggtgctgcgctttgctgtgtcctgccgcatcctgaccctgatgctgcaggccctcttcaatgccatcatcccagaccaccacgccgaggccttcagccccccccggctggcccccagcggctttgtggaccagctggtggagggcctgctgggcggcctgagccactgggatgctgagcacttcctgtag

SEQ ID NO: 163820 - DNA, 366 bp, synthetic construct
  misc_feature 1..366: note = Description of Artificial Sequence: Synthetic coding sequence
  source 1..366: mol_type = other DNA
atgtggccccaggaccccagcaggaaggaggtgctgcgctttgctgtgtcctgccgcatcctgaccctgatgctgcaggccctcttcaatgccatcatcccagaccaccacgccgaggccttcagccccccccggctggcccccagcggctttgtggaccagctggtggagggcctgctgggcggcctgagccactgggatgctgagcacttcctgttcatcgccgagcacggctacctgtatgagcacaactttgccttcttccctggcttccccctggccctgctggtgggcacagagctgctgcggcccctgcggggcctgctgagcctgcggagctgcctgctgatctctgtggccagctag

SEQ ID NO: 163821 - DNA, 798 bp, synthetic construct
  misc_feature 1..798: note = Description of Artificial Sequence: Synthetic coding sequence
  source 1..798: mol_type = other DNA
atgcccagcagccagatcaccatgcagaagcccagcctgctgctggcctggccaccccaggccctgtggaccaacagctggaagtactatgcctacacccagttctgcctgcccggcagcgcccggcccatccctgagcccctggtgcagctggccgtggacaagggctacagaattgctgagggcaatgaaccaccctggtgcttctgggatgtgcccctcatctacagctacatccaggatgtgtactggaatgtgggcttcctgaagtactatgagctgaagcaggtgcccaacttcctgctggccgcccctgtggccatcctggtggcctgggccacctggacctacgtgaccacccacccctggctgtgcctgaccctgggcctgcagaggagcaagaacaacaagaccctggagaagccagacctgggcttcctgagcccccaggtgtttgtgtatgtggtgcacgccgctgtgctgctgctgtttggaggcctgtgcatgcacgtgcaggtgctgacccgcttcctgggcagcagcacccccatcatgtactggttccctgcccacctgctgcaggaccaggagcccctgctgcggagcctgaagacagtgccctggaagcccctggccgaggacagccccccaggccagaaggtgcccaggaaccccatcatgggcctgctgtaccactggaagacctgcagccctgtgacccgctacatcctgggctacttcctgacctactggctgctgggcctgctgctgcactgcaacttcctgccctggacctag

SEQ ID NO: 163822 - DNA, 549 bp, synthetic construct
  misc_feature 1..549: note = Description of Artificial Sequence: Synthetic coding sequence
  source 1..549: mol_type = other DNA
atgtggccccaggaccccagcaggaaggaggtgctgcgctttgctgtgtcctgccgcatcctgaccctgatgctgcaggccctcttcaatgccatcatcccagaccaccacgccgaggccttcagccccccccggctggcccccagcggctttgtggaccagctggtggagggcctgctgggcggcctgagccactgggatgctgagcacttcctgttcatcgccgagcacggctacctgtatgagcacaactttgccttcttccctggcttccccctggccctgctggtgggcacagagctgctgcggcccctgcggggcctgctgagcctgcggagctgcctgctgatctctgtggccagcctgaacttcctgttcttcatgctggccgctgtggccctgcatgacctgggctgcctggtgctgcactgcccccaccagagcttctatgctgccctgctcttctgcctgagccctgccaacgtgttcctggccgccggctacagcgaggccctgtttgccctgctgaccttcagcgccatgggctag

SEQ ID NO: 163823 - DNA, 1515 bp, synthetic construct
  misc_feature 1..1515: note = Description of Artificial Sequence: Synthetic coding sequence
  source 1..1515: mol_type = other DNA
atgtctgagaagcagatgaaggaggcctttgtgagcaacctgaatggcaccaccgtgctggagatcacccagggcctgtgcttccctgccttctgcatcctgtgccggggcttcctgatcatcttcagccagtacctgtgcagcttcagccccacctggaagacccgcttcctgacagactttgtggtgctgattgtgcccatggtggccaccctgaccatctgggccagcttcatcctgctggagctgctgggcgtcatcatctttggagctggcctgctgtaccagatctacagaagaaggacctgctacgcccggctgcccttcctgaagatcctggagaagttcctgaacatcagcctggagagcgagtacaacccagccatcagctgcttccgggtcatcaccagcgccttcaccgccatcgccatcctggccgtggacttccccctcttccccaggagatttgccaagacagagctgtatggcaccggggccatggactttggagtgggcggctttgtgtttggcagcgccatggtgtgcctggaggtgagaagaaggaagtacatggagggcagcaagctgcactacttcaccaacagcctgtacagcgtgtggcccctggtgttcctgggcatcggccgcctggccatcatcaagagcatcggctaccaggagcacctgacagaatatggagtgcactggaacttcttcttcaccatcatcgtggtgaagctgatcacccccctgctgctgatcatcttccccctgaacaagtcctggatcatcgccctgggcatcaccgtgctgtaccagctggccctggacttcaccagcctgaagaggctcatcctgtatggaacagatggcagcggcaccagggtgggcctgctgaatgccaaccgggagggcatcatcagcaccctgggctacgtggccatccacatggccggcgtgcagacaggcctgtacatgcacaagaacagaagccacatcaaggacctgatcaaggtggcctgcttcctgctgctggccgccatcagcctcttcatcagcctgtatgtggtgcaggtgaatgtggaggccgtgtccaggaggatggccaacctggccttctgcatctggatcgtggccagcagcctcatcctgctgagcagcctgctgctgggggacatcatcctgagctttgccaagttcctgatcaagggggccctggtgccctgctcctggaagctgatccagagccctgtgaccaacaagaagcacagcgagagcctggtgcctgaggccgagaggatggagcccagcctgtgcctgatcacagccctgaacaggaagcagctgatcttcttcctgctgagcaacatcaccaccggcctcatcaacctgatggtggacaccctgcacagcagcaccctgtgggccctgtttgtggtgaacctgtacatgttcagcaactgcctgattgtgtatgtgctgtacctgcaggacaagacagtgcagttctggtag

SEQ ID NO: 163824 - DNA, 318 bp, synthetic construct
  misc_feature 1..318: note = Description of Artificial Sequence: Synthetic coding sequence
  source 1..318: mol_type = other DNA
atgtctgagaagcagatgaaggaggcctttgtgagcaacctgaatggcaccaccgtgctggagatcacccagggcctgtgcttccctgccttctgcatcctgtgccggggcttcctgatcatcttcagccagtacctgtgcagcttcagccccacctggaagacccgcttcctgacagactttgtggtgctgattgtgcccatggtggccaccctgaccatctgggccagcttcatcctgctggagctgctgggcgtcatcatctttggagctggcctgctgtaccagatctacagaagaaggacctgctacgcctag

SEQ ID NO: 163825 - DNA, 831 bp, synthetic construct
  misc_feature 1..831: note = Description of Artificial Sequence: Synthetic coding sequence
  source 1..831: mol_type = other DNA
ctggccgcccgggtggccgctgtgcgggctgctgcctggctgctgctgggcgccgccaccggcctgacccggggccctgctgctgccttcaccgctgcccggagtgatgctggcatccgggccatgtgcagcgagatcatcctgcggcaggaggtgctgaaggatggcttccaccgggacctgctgatcaaggtgaagtttggagagagcattgaggacctgcacacctgccgcctgctgatcaagcaggacatcccagctggcctgtatgtggacccctatgagctggccagcctgcgggagaggaacatcacagaagctgtgatggtgtctgagaactttgacatcgaggcccccaactacctgagcaaggagagcgaggtgctgatctatgcccggcgggacagccagtgcatcgactgcttccaggccttcctgcctgtgcactgccgctaccaccggccccacagtgaagatggagaggccagcatcgtggtgaacaacccagacctgctgatgttctgtgaccaggccggcagcaggaggatgatccgcttccgctttgacagctttgacaagaccatcgagttccccatcctgaagtgctgggcccacagcgaggtggccgccccctgtgccctggagaatgaagacatctgccagtggaacaagatgaagtacaagtctgtgtacaagaatgtcatcctgcaggtgcctgtgggcctgactgtgcacaccagcctggtgtgcagcgtgaccctgctgatcaccatcctgtgcagcaccctcatcctggtggccgtgttcaagtatggccacttcagcctgtag

SEQ ID NO: 163826 - DNA, 654 bp, synthetic construct
  misc_feature 1..654: note = Description of Artificial Sequence: Synthetic coding sequence
  source 1..654: mol_type = other DNA
atgtgcagcgagatcatcctgcggcaggaggtgctgaaggatggcttccaccgggacctgctgatcaaggtgaagtttggagagagcattgaggacctgcacacctgccgcctgctgatcaagcaggacatcccagctggcctgtatgtggacccctatgagctggccagcctgcgggagaggaacatcacagaggccgtgatggtgtctgaaaattttgatattgaggcccccaactacctgagcaaggagagcgaggtgctgatctatgcccggcgggacagccagtgcatcgactgcttccaggccttcctgcctgtgcactgccgctaccaccggccccacagtgaagatggagaggccagcatcgtggtgaacaacccagacctgctgatgttctgtgaccaggagttccccatcctgaagtgctgggcccacagcgaggtggccgccccctgtgccctggagaatgaagacatctgccagtggaacaagatgaagtacaagtctgtgtacaagaatgtcatcctgcaggtgcctgtgggcctgactgtgcacaccagcctggtgtgcagcgtgaccctgctgatcaccatcctgtgcagcaccctcatcctggtggccgtgttcaagtatggccacttcagcctgtag

SEQ ID NO: 163827 - DNA, 777 bp, synthetic construct
  misc_feature 1..777: note = Description of Artificial Sequence: Synthetic coding sequence
  source 1..777: mol_type = other DNA
ctggccgcccgggtggccgctgtgcgggctgctgcctggctgctgctgggcgccgccaccggcctgacccggggccctgctgctgccttcaccgctgcccggagtgatgctggcatccgggccatgtgcagcgagatcatcctgcggcaggaggtgctgaaggatggcttccaccgggacctgctgatcaaggtgaagtttggagagagcattgaggacctgcacacctgccgcctgctgatcaagcaggacatcccagctggcctgtatgtggacccctatgagctggccagcctgcgggagaggaacatcacagaagctgtgatggtgtctgagaactttgacatcgaggcccccaactacctgagcaaggagagcgaggtgctgatctatgcccggcgggacagccagtgcatcgactgcttccaggccttcctgcctgtgcactgccgctaccaccggccccacagtgaagatggagaggccagcatcgtggtgaacaacccagacctgctgatgttctgtgaccaggagttccccatcctgaagtgctgggcccacagcgaggtggccgccccctgtgccctggagaatgaagacatctgccagtggaacaagatgaagtacaagtctgtgtacaagaatgtcatcctgcaggtgcctgtgggcctgactgtgcacaccagcctggtgtgcagcgtgaccctgctgatcaccatcctgtgcagcaccctcatcctggtggccgtgttcaagtatggccacttcagcctgtag

SEQ ID NO: 163828 - DNA, 507 bp, synthetic construct
  misc_feature 1..507: note = Description of Artificial Sequence: Synthetic coding sequence
  source 1..507: mol_type = other DNA
atggtgtctgagaactttgacatcgaggcccccaactacctgagcaaggagagcgaggtgctgatctatgcccggcgggacagccagtgcatcgactgcttccaggccttcctgcctgtgcactgccgctaccaccggccccacagtgaagatggagaggccagcatcgtggtgaacaacccagacctgctgatgttctgtgaccaggccggcagcaggaggatgatccgcttccgctttgacagctttgacaagaccatcgagttccccatcctgaagtgctgggcccacagcgaggtggccgccccctgtgccctggagaatgaagacatctgccagtggaacaagatgaagtacaagtctgtgtacaagaatgtcatcctgcaggtgcctgtgggcctgactgtgcacaccagcctggtgtgcagcgtgaccctgctgatcaccatcctgtgcagcaccctcatcctggtggccgtgttcaagtatggccacttcagcctgtag

SEQ ID NO: 163829 - DNA, 1740 bp, synthetic construct
  misc_feature 1..1740: note = Description of Artificial Sequence: Synthetic coding sequence
  source 1..1740: mol_type = other DNA
atgcagatctgtggcagctctgtggcctctgtggccgccggcaccagcttccaggtgctgggccctgtgtgctggcagcagctggacctgaagatggctgtgcgggtgctgtggggcggcctgagcctgctgcgggtgctgtggtgcctgctgccccagacaggctacgtgcacccagatgagttcttccagagccctgaggtgatggccgaggacatcctgggcgtgcaggccgcccggccctgggagttctaccccagcagcagctgccgctctgtgctcttccccctgctgatcagcggcagcaccttctggctgctgcggctgtgggaggagctgggcccctggccaggcctggtgtctggctacgccctgctggtgggcccccggctgctgctgacagccctgagctttgccctggatggagctgtgtaccacctggccccacccatgggcgctgaccgctggaatgccctggccctgctgagcggcagctatgtgaccctggtgttctacaccaggaccttcagcaacaccatcgagggcctgctcttcacctggctgctggtgctggtgagcagccacgtgacctggggccccaccaggaaggagcccgcccctggcccccgctggaggtcctggctgctgggcggcatcgtggccgccggcttcttcaaccggcccaccttcctggcctttgctgtggtgcccctgtacctgtggggcaccaggggggccaccaaccctggcctgaagagcctgacccgggaggccctggtgctgctgcctggagctgccctgacagctgctgtgtttgtggccacagacagctggtacttcagcagccctgccaccagcaggaacctggtgctgacccctgtgaacttcctgcactacaacctgaacccccagaacctggcccggcacggcacccacgcccggctgacccacctggccgtgaatggcttcctgctgtttggagtgctgcacgcccaggccctgcaggccgcctggcagaggctgcaggtgggcctgcaggccagcgcccagatgggcctgctgcgggccctgggcgcccggagcctgctgagcagccccaggagctacctgctgctgctgtacttcatgcccctggccctgctgagcgccttcagccaccaggaggcccgcttcctgatccccctgctggtgcccctggtgctgctgtgcagcccccagacccagcctgtgccctggaagggcaccgtggtgctcttcaatgccctgggcgccctgctgtttggctgcctgcaccagggcggcctggtgcccggcctggagtacctggagcaggtggtgcacgcccctgtgctgcccagcacccccacccactacaccctgctcttcacccacacctacatgccacccaggcacctgctgcacctgcccggcctgggcgcccctgtggaggtggtggacatgggcggcacagaggactgggccctgtgccagaccctgaagagcttcacccggcagcctgcctgccaggtggccggcggcccctggctgtgccgcctgtttgtggtgaccccaggcaccacccggcgggctgtggagaagtgcagcttccccttcaagaatgagaccctgctcttcccccacctgaccctggaggaccccccagccctgagcagcctgctgagcggggcctggagggaccacctgagcctgcacatcgtggagctgggggaggagacctag

SEQ ID NO: 163830 - DNA, 813 bp, synthetic construct
  misc_feature 1..813: note = Description of Artificial Sequence: Synthetic coding sequence
  source 1..813: mol_type = other DNA
atggtgctgctgaaggagtacagagtcatcctgcctgtgtctgtggatgagtaccaggtgggccagctgtacagcgtggccgaggccagcaagaatgagaccggcggcggggagggcgtggaggtgctggtgaatgagccctatgagaaggatggagagaagggccagtacacccacaagatctaccacctgcagagcaaggtgcccacctttgtgaggatgctggcccctgagggcgccctgaacatccacgagaaggcctggaatgcctacccctactgcaggacagtcatcaccaatgagtacatgaaggaggacttcctgatcaagattgagacctggcacaagccagacctgggcacccaggagaatgtgcacaagctggagcctgaggcctggaagcacgtggaggccgtgtacattgatattgctgacaggagccaggtgctgagcaaggactacaaggccgaggaggaccctgccaagttcaagagcatcaagacaggccggggccccctgggccccaactggaagcaggagctggtgaaccagaaggactgcccctacatgtgtgcctacaagctggtgacagtgaagttcaagtggtggggcctgcagaacaaggtggagaacttcatccacaagcaggagcggcggctcttcaccaacttccaccggcagctgttctgctggctggacaagtgggtggacctgaccatggatgacatccggaggatggaggaggagaccaagaggcagctggatgagatgaggcagaaggaccctgtgaagggcatgacagcagatgactag

SEQ ID NO: 163831 - DNA, 813 bp, synthetic construct
  misc_feature 1..813: note = Description of Artificial Sequence: Synthetic coding sequence
  source 1..813: mol_type = other DNA
atggtgctgctgaaggagtacagagtcatcctgcctgtgtctgtggatgagtaccaggtgggccagctgtacagcgtggccgaggccagcaagaatgagaccggcggcggggagggcgtggaggtgctggtgaatgagccctatgagaaggatggagagaagggccagtacacccacaagatctaccacctgcagagcaaggtgcccacctttgtgaggatgctggcccctgagggcgccctgaacatccacgagaaggcctggaatgcctacccctactgcaggacagtgctgcccaatgagtacatgaaggaggacttcctgatcaagattgagacctggcacaagccagacctgggcacccaggagaatgtgcacaagctggagcctgaggcctggaagcacgtggaggccgtgtacattgatattgctgacaggagccaggtgctgagcaaggactacaaggccgaggaggaccctgccaagttcaagagcatcaagacaggccggggccccctgggccccaactggaagcaggagctggtgaaccagaaggactgcccctacatgtgtgcctacaagctggtgacagtgaagttcaagtggtggggcctgcagaacaaggtggagaacttcatccacaagcaggagcggcggctcttcaccaacttccaccggcagctgttctgctggctggacaagtgggtggacctgaccatggatgacatccggaggatggaggaggagaccaagaggcagctggatgagatgaggcagaaggaccctgtgaagggcatgacagcagatgactag

SEQ ID NO: 163832 - DNA, 594 bp, synthetic construct
  misc_feature 1..594: note = Description of Artificial Sequence: Synthetic coding sequence
  source 1..594: mol_type = other DNA
atgctggcccctgagggcgccctgaacatccacgagaaggcctggaatgcctacccctactgcaggacagtgctgcccaatgagtacatgaaggaggacttcctgatcaagattgagacctggcacaagccagacctgggcacccaggagaatgtgcacaagctggagcctgaggcctggaagcacgtggaggccgtgtacatcgacattgctgacaggagccaggtgctgagcaaggactacaaggccgaggaggaccctgccaagttcaagagcatcaagacaggccggggccccctgggccccaactggaagcaggagctggtgaaccagaaggactgcccctacatgtgtgcctacaagctggtgacagtgaagttcaagtggtggggcctgcagaacaaggtggagaacttcatccacaagcaggagaggaggctcttcaccaacttccaccggcagctgttctgctggctggacaagtgggtggacctgaccatggatgacatccggaggatggaggaggagaccaagaggcagctggatgagatgaggcagaaggaccctgtgaagggcatgacagcagatgactag

SEQ ID NO: 163833 - DNA, 819 bp, synthetic construct
  misc_feature 1..819: note = Description of Artificial Sequence: Synthetic coding sequence
  source 1..819: mol_type = other DNA
atggtgctgatcaaggagttccgggtggtgctgccctgcagcgtgcaggagtaccaggtgggccagctgtacagcgtggccgaggccagcaagaatgagaccggcggcggggagggcatcgaggtgctgaagaatgagccctatgagaaggatggagagaagggccagtacacccacaagatctaccacctgaagagcaaggtgcctgcctttgtgaggatgattgcccctgagggcagcctggtgttccacgagaaggcctggaatgcctacccctactgcaggaccatcgtgaccaatgagtacatgaaggatgacttcttcatcaagattgagacctggcacaagccagacctgggcaccctggagaatgtgcacggcctggaccccaacacctggaagacagtggagatcgtgcacattgatattgctgacaggagccaggtggagcctgctgactacaaggcagatgaggaccctgccctcttccagagcgtgaagaccaagaggggccccctgggccccaactggaagaaggagctggccaacagcccagactgcccccagatgtgtgcctacaagctggtgaccatcaagttcaagtggtggggcctgcagagcaaggtggagaacttcatccagaagcaggagaagaggatcttcaccaacttccaccggcagctgttctgctggattgacaagtggattgacctgaccatggaggacatccggaggatggaggatgagacccagaaggagctggagaccctgaggaaccagggccaggtgcggggcaccagcgctgccagtgatgaatag

SEQ ID NO: 163834 - DNA, 816 bp, synthetic construct
  misc_feature 1..816: note = Description of Artificial Sequence: Synthetic coding sequence
  source 1..816: mol_type = other DNA
atggtgctgatcaaggagttccgggtggtgctgccctgcagcgtgcaggagtaccaggtgggccagctgtacagcgtggccgaggccagcaagaatgagaccggcggcggggagggcatcgaggtgctgaagaatgagccctatgagaaggatggagagaagggccagtacacccacaagatctaccacctgaagagcaaggtgcctgcctttgtgaggatgattgcccctgagggcagcctggtgttccacgagaaggcctggaatgcctacccctactgcaggaccatcgtgaccaatgagtacatgaaggatgacttcttcatcaagattgagacctggcacaagccagacctgggcaccctggagaatgtgcacggcctggaccccaacacctggaagacagtggagatcgtgcacattgatattgctgacaggagccaggtggagcctgctgactacaaggcagatgaggaccctgccctcttccagagcgtgaagaccaagaggggccccctgggccccaactggaagaaggagctggccaacagcccagactgcccccagatgtgtgcctacaagctggtgaccatcaagttcaagtggtggggcctgcagagcaaggtggagaacttcatccagaagcaggagaagaggatcttcaccaacttccaccggcagctgttctgctggattgacaagtggattgacctgaccatggaggacatccggaggatggaggatgagacccagaaggagctggagaccatgaggaagaggggctctgtgcggggcaccagcgctgctgatgtgtag

SEQ ID NO: 163835 - DNA, 363 bp, synthetic construct
  misc_feature 1..363: note = Description of Artificial Sequence: Synthetic coding sequence
  source 1..363: mol_type = other DNA
atgattgcccctgagggcagcctggtgttccacgagaaggcctggaatgcctacccctactgcaggaccatcgtgaccaatgagtacatgaaggatgacttcttcatcaagattgagacctggcacaagccagacctgggcaccctggagaatgtgcacggcctggaccccaacacctggaagacagtggagatcgtgcacatcgacattgctgacaggagccaggtggagcctgctgactacaaggcagatgaagatcctgccctcttccagagcgtgaagaccaagaggggccccctgggccccaactggaagaaggagctggccaacagcccagactgcccccagatgtgtgcctactag

SEQ ID NO: 163836 - DNA, 507 bp, synthetic construct
  misc_feature 1..507: note = Description of Artificial Sequence: Synthetic coding sequence
  source 1..507: mol_type = other DNA
atgggagacctgctgatggagaagtgccgggtggtgctgccctgcagcgtgcaggagtaccaggtgggccagctgtacagcgtggccgaggccagcaagaatgagaccggcggcggggagggcatcgaggtgctgaagaatgagccctatgagaaggatggagagaagggccagtacacccacaagatctaccacctgaagagcaaggtgcctgcctttgtgaggatgattgcccctgagggcagcctggtgttccacgagaaggcctggaatgcctacccctactgcaggaccatcgtgaccaatgagtacatgaaggatgacttcttcatcaagattgagacctggcacaagccagacctgggcaccctggagaatgtgcacggcctggaccccaacacctggaagacagtggagatcgtgcacattgatattgctgacaggagccaggtggagcctgctgactacaaggcagatgaggaccctgccctcttccagagcgtgtag

SEQ ID NO: 163837 - DNA, 822 bp, synthetic construct
  misc_feature 1..822: note = Description of Artificial Sequence: Synthetic coding sequence
  source 1..822: mol_type = other DNA
atgggagacctgctgatggagaagtgccgggtggtgctgccctgcagcgtgcaggagtaccaggtgggccagctgtacagcgtggccgaggccagcaagaatgagaccggcggcggggagggcatcgaggtgctgaagaatgagccctatgagaaggatggagagaagggccagtacacccacaagatctaccacctgaagagcaaggtgcctgcctttgtgaggatgattgcccctgagggcagcctggtgttccacgagaaggcctggaatgcctacccctactgcaggaccatcgtgaccaatgagtacatgaaggatgacttcttcatcaagattgagacctggcacaagccagacctgggcaccctggagaatgtgcacggcctggaccccaacacctggaagacagtggagatcgtgcacattgatattgctgacaggagccaggtggagcctgctgactacaaggcagatgaggaccctgccctcttccagagcgtgaagaccaagaggggccccctgggccccaactggaagaaggagctggccaacagcccagactgcccccagatgtgtgcctacaagctggtgaccatcaagttcaagtggtggggcctgcagagcaaggtggagaacttcatccagaagcaggagaagaggatcttcaccaacttccaccggcagctgttctgctggattgacaagtggattgacctgaccatggaggacatccggaggatggaggatgagacccagaaggagctggagaccatgaggaagaggggctctgtgcggggcaccagcgctgctgatgtgtag

SEQ ID NO: 163838 - DNA, 4980 bp, synthetic construct
  misc_feature 1..4980: note = Description of Artificial Sequence: Synthetic coding sequence
  source 1..4980: mol_type = other DNA
atggaggcccccagcggcagcgagcctggaggagatggagctggggactgtgcccacccagacccccgggcccctggagctgctgcccccagcagcggccctggcccctgtgccgccgcccgggagagcgagcggcagctgcggctgcggctgtgtgtgctgaatgagatcctgggcacagagcgggactatgtgggcaccctgcgcttcctgcagagcgccttcctgcaccgcatccggcagaatgtggccgacagcgtggagaagggcctgacagaggagaatgtgaaggtgctcttcagcaacatcgaggacatcctggaggtgcacaaggacttcctggccgccctggagtactgcctgcaccctgagccccagagccagcacgagctgggcaatgtgttcctgaagttcaaggacaagttctgtgtgtatgaggagtactgcagcaaccacgagaaggccctgcggctgctggtggagctgaacaagatccccaccgtgcgggccttcctgctgagctgcatgctgctgggcggcaggaagaccacagacatccccctggagggctacctgctgagccccatccagaggatctgcaagtaccccctgctgctgaaggagctggccaagaggacccctgggaagcacccagaccaccctgctgtgcagagcgccctgcaggccatgaagacagtgtgcagcaacatcaatgagaccaagaggcagatggagaagctggaggccctggagcagctgcagagccacatcgagggctgggagggcagcaacctgacagacatctgcacccagctgctgctgcagggcaccctgctgaagatctctgctggcaacatccaggagcgggccttcttcctgtttgacaacctgctggtgtactgcaagaggaagagccgggtgacaggcagcaagaagagcaccaagaggaccaagagcatcaatggcagcctgtacatcttccggggccgcatcaacacagaggtgatggaggtggagaatgtggaggatggaacagctgactaccacagcaatggctacacagtgaccaacggctggaagatccacaacacagccaagaacaagtggtttgtgtgcatggccaagacagctgaggagaagcagaagtggctggatgccatcatccgggagcgggagcagcgggagagcctgaagctgggcatggagagagatgcctacgtgatgattgctgagaagggggagaagctgtaccacatgatgatgaacaagaaggtgaacctgatcaaggacagaagaaggaagctgagcacagtgcccaagtgcttcctgggcaatgaatttgtggcctggctgctggagatcggggagatcagcaagacagaggagggcgtgaacctgggccaggccctgctggagaatggcatcatccaccacgtgtctgacaagcaccagttcaagaatgagcaggtgatgtaccgcttccgctatgatgatggcacctacaaggcccggtctgagctggaggacatcatgagcaaaggagtgcggctgtactgccgcctgcacagcctgtacacccctgtgatcaaggaccgggactaccacctgaagacctacaagtctgtgctgcccggcagcaagctggtggactggctgctggcccagggcgactgccagacccgggaggaggccgtggccctgggcgtgggcctgtgcaacaacggcttcatgcaccacgtgctggagaagtctgagttcagagatgagagccagtacttccgcttccacgcagatgaggagatggagggcaccagcagcaagaacaagcagctgagaaatgacttcaagctggtggagaacatcctggccaagaggctgctgatcctgccccaggaggaggactatggctttgatattgaggagaagaacaaggctgtggtggtgaagtctgtgcagaggggcagcctggccgaggtggccggcctgcaggtgggcaggaagatctacagcatcaatgaagacctggtgttcctgcggcccttcagcgaggtggagagcatcctgaaccagagcttctgcagcagaagacccctgcggctgctggtggccaccaaggccaaggagatcatcaagatcccagaccagcctgacaccctgtgcttccagatccggggggccgccccaccctacgtgtatgctgtgggccggggcagcgaggccatggctgctggcctgtgtgccggccagtgcatcctgaaggtgaatggcagcaatgtgatgaatgatggagcccctgaggtgctggagcacttccaggccttccgcagcagaagagaggaggccctgggcctgtaccagtggatctaccacacccatgaagatgcccaggaggcccgggccagccaggaggccagcacagaggaccccagcggggagcaggcccaggaggaggaccaggccgacagcgccttccccctgctgagcctgggcccccggctgagcctgtgtgaggacagccccatggtgaccctgactgtggacaacgtgcacctggagcacggcgtggtgtatgaatatgtgtccacagctggggtgcgctgccacgtgctggagaagatcgtggagccccggggctgcttcggcctgacagccaagatcctggaggcctttgctgccaatgattctgtgtttgtggagaactgccggcggctgatggccctgagcagcgccatcgtgaccatgccccactttgagttcaggaacatctgtgacaccaagctggagagcatcggccagagaattgcctgctaccaggagtttgctgcccagctgaagagccgggtgagcccccccttcaagcaggcccccctggagccccaccccctgtgtggcctggacttctgccccaccaactgccacatcaacctgatggaggtgtcctaccccaagaccaccccatctgtgggccgctccttcagcatccgcttcggcaggaagcccagcctgattggcctggaccctgagcagggccacctgaaccccatgagctacacccagcactgcatcaccaccatggccgcccccagctggaagtgcctgcctgctgctgagggggacccccagggccagggcctgcatgatggcagctttggacctgccagcggcaccctgggccaggaggaccggggcctgtccttcctgctgaagcaggaggaccgggagatccaggatgcctacctgcagctgttcaccaagctggatgtggccctgaaggagatgaagcagtatgtgacccagatcaaccggctgctgagcaccatcacagagcccaccagcggcggcagctgtgatgccagcctggccgaggaggccagcagcctgcccctggtgtctgaggagagcgagatggacagaagtgaccatggaggcatcaagaaggtgtgcttcaaggtggccgaggaggaccaggaggacagcggccatgacaccatgagctacagagacagctacagcgagtgcaacagcaacagagattctgtgctgagctacacctctgtgcgcagcaacagcagctacctgggcagtgatgagatgggcagcggagatgagctgccctgtgacatgaggatccccagcgacaagcaggacaagctgcacggctgcctggagcacctgttcaaccaggtggacagcatcaatgccctgctgaagggccctgtgatgagccgggcctttgaggagaccaagcacttccccatgaaccacagcctgcaggagttcaagcagaaggaggagtgcaccatccggggccgcagcctcatccagatcagcatccaggaggacccctggaacctgcccaacagcatcaagaccctggtggacaacatccagagatatgtggaggatggcaagaaccagctgctgctggccctgctgaagtgcacagacacagagctgcagctgcggagagatgccatcttctgccaggccctggtggccgctgtgtgcaccttcagcaagcagctgctggccgccctgggctaccgctacaacaacaatggagaatatgaggagagcagcagagatgccagcaggaagtggctggagcaggtggccgccaccggggtgctgctgcactgccagagcctgctgagccctgccaccgtgaaggaggagaggaccatgctggaggacatctgggtgaccctgtctgagctggacaacgtgaccttctccttcaagcagctggatgagaactacgtggccaacaccaacgtgttctaccacatcgagggcagccggcaggccctgaaggtgatcttctacctggacagctaccacttcagcaagctgcccagccggctggagggcggggccagcctgcggctgcacacagccctcttcaccaaggtgctggagaatgtggagggcctgcccagccctggcagccaggccgctgaggacctgcagcaggacatcaatgcccagagcctggagaaggtgcagcagtactacaggaagctgcgggccttctacctggagaggagcaacctgcccacagatgccagcaccacagctgtgaagattgaccagctgatccggcccatcaatgccctggatgagctgtgccgcctgatgaagagctttgtgcaccccaagccaggagctgctggctctgtgggcgccggcctcatccccatcagcagcgagctgtgctaccgcctgggcgcctgccagatggtgatgtgtggcaccggcatgcagaggagcaccctgtctgtgtccctggagcaggccgccatcctggcccggagccacggcctgctgcccaagtgcatcatgcaggccacagacatcatgaggaagcagggcccccgggtggagatcctggccaagaacctgcgggtgaaggaccagatgccccagggcgccccccggctgtaccgcctgtgccagccccctgtggatggagacctgtag

SEQ ID NO: 163839 - DNA, 4686 bp, synthetic construct
  misc_feature 1..4686: note = Description of Artificial Sequence: Synthetic coding sequence
  source 1..4686: mol_type = other DNA
atggaggcccccagcggcagcgagcctggaggagatggagctggggactgtgcccacccagacccccgggcccctggagctgctgcccccagcagcggccctggcccctgtgccgccgcccgggagagcgagcggcagctgcggctgcggctgtgtgtgctgaatgagatcctgggcacagagcgggactatgtgggcaccctgcgcttcctgcagagcgccttcctgcaccgcatccggcagaatgtggccgacagcgtggagaagggcctgacagaggagaatgtgaaggtgctcttcagcaacatcgaggacatcctggaggtgcacaaggacttcctggccgccctggagtactgcctgcaccctgagccccagagccagcacgagctgggcaatgtgttcctgaagttcaaggacaagttctgtgtgtatgaggagtactgcagcaaccacgagaaggccctgcggctgctggtggagctgaacaagatccccaccgtgcgggccttcctgctgagctgcatgctgctgggcggcaggaagaccacagacatccccctggagggctacctgctgagccccatccagaggatctgcaagtaccccctgctgctgaaggagctggccaagaggacccctgggaagcacccagaccaccctgctgtgcagagcgccctgcaggccatgaagacagtgtgcagcaacatcaatgagaccaagaggcagatggagaagctggaggccctggagcagctgcagagccacatcgagggctgggagggcagcaacctgacagacatctgcacccagctgctgctgcagggcaccctgctgaagatctctgctggcaacatccaggagcgggccttcttcctgtttgacaacctgctggtgtactgcaagaggaagagccgggtgacaggcagcaagaagagcaccaagaggaccaagagcatcaatggcagcctgtacatcttccggggccgcatcaacacagaggtgatggaggtggagaatgtggaggatggaacagctgactaccacagcaatggctacacagtgaccaacggctggaagatccacaacacagccaagaacaagtggtttgtgtgcatggccaagacagctgaggagaagcagaagtggctggatgccatcatccgggagcgggagcagcgggagagcctgaagctgggcatggagagagatgcctacgtgatgattgctgagaagggggagaagctgtaccacatgatgatgaacaagaaggtgaacctgatcaaggacagaagaaggaagctgagcacagtgcccaagtgcttcctgggcaatgaatttgtggcctggctgctggagatcggggagatcagcaagacagaggagggcgtgaacctgggccaggccctgctggagaatggcatcatccaccacgtgtctgacaagcaccagttcaagaatgagcaggtgatgtaccgcttccgctatgatgatggcacctacaaggcccggtctgagctggaggacatcatgagcaaaggagtgcggctgtactgccgcctgcacagcctgtacacccctgtgatcaaggaccgggactaccacctgaagacctacaagtctgtgctgcccggcagcaagctggtggactggctgctggcccagggcgactgccagacccgggaggaggccgtggccctgggcgtgggcctgtgcaacaacggcttcatgcaccacgtgctggagaagtctgagttcagagatgagagccagtacttccgcttccacgcagatgaggagatggagggcaccagcagcaagaacaagcagctgagaaatgacttcaagctggtggagaacatcctggccaagaggctgctgatcctgccccaggaggaggactatggctttgatattgaggagaagaacaaggctgtggtggtgaagtctgtgcagaggggcagcctggccgaggtggccggcctgcaggtgggcaggaagatctacagcatcaatgaagacctggtgttcctgcggcccttcagcgaggtggagagcatcctgaaccagagcttctgcagcagaagacccctgcggctgctggtggccaccaaggccaaggagatcatcaagatcccagaccagcctgacaccctgtgcttccagatccggggggccgccccaccctacgtgtatgctgtgggccggggcagcgaggccatggctgctggcctgtgtgccggccagtgcatcctgaaggtgaatggcagcaatgtgatgaatgatggagcccctgaggtgctggagcacttccaggccttccgcagcagaagagaggaggccctgggcctgtaccagtggatctaccacacccatgaagatgcccaggaggcccgggccagccaggaggccagcacagaggaccccagcggggagcaggcccaggaggaggaccaggccgacagcgccttccccctgctgagcctgggcccccggctgagcctgtgtgaggacagccccatggtgaccctgactgtggacaacgtgcacctggagcacggcgtggtgtatgaatatgtgtccacagctggggtgcgctgccacgtgctggagaagatcgtggagccccggggctgcttcggcctgacagccaagatcctggaggcctttgctgccaatgattctgtgtttgtggagaactgccggcggctgatggccctgagcagcgccatcgtgaccatgccccactttgagttcaggaacatctgtgacaccaagctggagagcatcggccagagaattgcctgctaccaggagtttgctgcccagctgaagagccgggtgagcccccccttcaagcaggcccccctggagccccaccccctgtgtggcctggacttctgccccaccaactgccacatcaacctgatggaggtgtcctaccccaagaccaccccatctgtgggccgctccttcagcatccgcttcggcaggaagcccagcctgattggcctggaccctgagcagggccacctgaaccccatgagctacacccagcactgcatcaccaccatggccgcccccagctggaagtgcctgcctgctgctgagggggacccccagggccagggcctgcatgatggcagctttggacctgccagcggcaccctgggccaggaggaccggggcctgtccttcctgctgaagcaggaggaccgggagatccaggatgcctacctgcagctgttcaccaagctggatgtggccctgaaggagatgaagcagtatgtgacccagatcaaccggctgctgagcaccatcacagagcccaccagcggcggcagctgtgatgccagcctggccgaggaggccagcagcctgcccctggtgtctgaggagagcgagatggacagaagtgaccatggaggcatcaagaaggtgtgcttcaaggtggccgaggaggaccaggaggacagcggccatgacaccatgagctacagagacagctacagcgagtgcaacagcaacagagattctgtgctgagctacacctctgtgcgcagcaacagcagctacctgggcagtgatgagatgggcagcggagatgagctgccctgtgacatgaggatccccagcgacaagcaggacaagctgcacggctgcctggagcacctgttcaaccaggtggacagcatcaatgccctgctgaagggccctgtgatgagccgggcctttgaggagaccaagcacttccccatgaaccacagcctgcaggagttcaagcagaaggaggagtgcaccatccggggccgcagcctcatccagatcagcatccaggaggacccctggaacctgcccaacagcatcaagaccctggtggacaacatccagagatatgtggaggatggcaagaaccagctgctgctggccctgctgaagtgcacagacacagagctgcagctgcggagagatgccatcttctgccaggccctggtggccgctgtgtgcaccttcagcaagcagctgctggccgccctgggctaccgctacaacaacaatggagaatatgaggagagcagcagagatgccagcaggaagtggctggagcaggtggccgccaccggggtgctgctgcactgccagagcctgctgagccctgccaccgtgaaggaggagaggaccatgctggaggacatctgggtgaccctgtctgagctggacaacgtgaccttctccttcaagcagctggatgagaactacgtggccaacaccaacgtgttctaccacatcgagggcagccggcaggccctgaaggtgatcttctacctggacagctaccacttcagcaagctgcccagccggctggagggcggggccagcctgcggctgcacacagccctcttcaccaagggggagctgcaggcctggggcagagaagatcatggaggccgggccaaggccaccaagcacacaggcagccagcccccagcccggcccaggcacctgcccagccagtgctggaggacctggaggggctgcctgctgcaggccgcccggccccggcgcatctgcagcaggaccagcaccaggagcccctggaggaagttcagcagcatcacagccaacagcggccacttcacctggagcggcctgacctgccccaggatgcctgcccccaggaggtag

SEQ ID NO: 163840 - DNA, 4821 bp, synthetic construct
  misc_feature 1..4821: note = Description of Artificial Sequence: Synthetic coding sequence
  source 1..4821: mol_type = other DNA
atgtctgaggacagcagaggagacagcagagctgagagcgccaaggacctggagaagcagctgcggctgcgggtgtgtgtgctgtctgagctgcagaagacagagcgggactatgtgggcaccctggagttcctggtgtctgccttcctgcacaggatgaaccagtgtgccgccagcaaggtggacaagaatgtgacagaggagaccgtgaagatgctgttcagcaacatcgaggacatcctggccgtgcacaaggagttcctgaaggtggtggaggagtgcctgcaccctgagcccaatgcccagcaggaggtgggcacctgcttcctgcacttcaaggacaagttccgcatctatgatgagtactgcagcaaccacgagaaggcccagaagctgctgctggagctgaacaagatccgcaccatccgcaccttcctgctgaactgcatgctgctgggcggcaggaagaacacagatgtgcccctggagggctacctggtgacccccatccagaggatctgcaagtaccccctcatcctgaaggagctgctgaagaggacccccaggaagcacagcgactatgctgctgtgatggaggccctgcaggccatgaaggctgtgtgcagcaacatcaatgaggccaagaggcagatggagaagctggaggtgctggaggagtggcagagccacatcgagggctgggagggcagcaacatcacagacacctgcacagagatgctgatgtgtggggtgctgctgaagatcagcagcggcaacatccaggagagggtcttcttcctgtttgacaacctgctggtgtactgcaagaggaagcaccggcggctgaagaacagcaaggccagcacagatggccaccgctacctgttccggggccgcatcaacacagaggtgatggaggtggagaatgtggatgatggaacagctgacttccacagcagcggccacatcgtggtgaatggctggaagatccacaacacagccaagaacaagtggtttgtgtgcatggccaagaccccagaggagaagcatgagtggtttgaggccatcctgaaggagcgggagaggaggaagggcctgaagctgggcatggagcaggacacctgggtgatgatcagcgagcagggcgagaagctgtacaagatgatgtgccggcagggcaacctgatcaaggacaggaagaggaagctgaccaccttccccaagtgcttcctgggcagcgagtttgtgtcctggctgctggagatcggggagatccacaggcctgaggagggcgtgcacctgggccaggccctgctggagaatggcatcatccaccacgtgacagacaagcaccagttcaagccagagcagatgctgtaccgcttccgctatgatgatggcaccttctaccccagaaatgagatgcaggatgtgatcagcaaaggagtgcggctgtactgccgcctgcacagcctcttcacccctgtgatccgggacaaggactaccacctgcggacctacaagtctgtggtgatggccaacaagctgattgactggctgattgcccagggcgactgcaggacccgggaggaggccatgatctttggagtgggcctgtgtgacaatggcttcatgcaccacgtgctggagaagtctgagttcaaggatgagcccctgctcttccgcttcttcagtgatgaggagatggagggcagcaacatgaagcaccggctgatgaagcatgacctgaaggtggtggagaatgtcatcgccaagagcctgctgatcaagagcaatgaaggcagctatggcttcggcctggaggacaagaacaaggtgcccatcatcaagctggtggagaagggcagcaatgctgagatggccggcatggaggtgggcaagaagatctttgccatcaacggggacctggtgttcatgaggcccttcaatgaggtggactgcttcctgaagagctgcctgaacagcaggaagcccctgcgggtgctggtgtccaccaagccccgggagaccgtgaagatcccagattctgcagatggcctgggcttccagatccggggcttcggccccagcgtggtgcatgctgtgggccggggcaccgtggccgctgctgctggcctgcaccctggccagtgcatcatcaaggtgaatggcatcaacgtgtccaaggagacccacgccagcgtcatcgcccacgtgacagcctgcaggaagtaccgccggcccaccaagcaggacagcatccagtgggtgtacaacagcattgaaagtgcccaggaggacctgcagaagagccacagcaagcccccaggagatgaggccggagatgcctttgactgcaaggtggaggaggtgattgacaagttcaacaccatggccatcattgatggcaagaaggagcacgtgtccctgactgtggacaacgtgcacctggagtatggagtggtgtatgaatatgacagcacagctggcatcaagtgcaatgtggtggagaagatgattgagcccaagggcttcttcagcctgacagccaagatcctggaggccctggccaagagtgatgagcactttgtgcagaactgcaccagcctgaacagcctgaatgaggtgatccccacagacctgcagagcaagttcagcgccctgtgcagcgagagaattgagcacctgtgccagaggatcagcagctacaagaagttcagccgggtgctgaagaacagagcctggcccaccttcaagcaggccaagagcaagatcagccccctgcacagcagtgacttctgccccaccaactgccacgtgaatgtgatggaggtgtcctaccccaagaccagcaccagcctgggcagcgccttcggcgtgcagctggacagcaggaagcacaacagccatgacaaggagaacaagagcagcgagcagggcaagctgagccccatggtgtacatccagcacaccatcaccaccatggccgcccccagcggcctgagcctgggccagcaggacggccacggcctgcgctacctgctgaaggaggaggacctggagacccaggacatctaccagaagctgctgggcaagctgcagacagccctgaaggaggtggagatgtgtgtgtgccagattgatgacctgctgagcagcatcacctacagccccaagctggagaggaagaccagcgagggcatcatccccacagacagcgacaatgaaaaaggagagaggaacagcaagagggtgtgcttcaacgtggccggagatgagcaggaggacagcggccatgacaccatcagcaacagagacagctacagcgactgcaacagcaacagaaattccatcgccagcttcaccagcatctgcagcagccagtgcagcagctacttccacagtgatgagatggacagcggagatgagctgcccctgtctgtgcgcatcagccatgacaagcaggacaagatccacagctgcctggagcacctgttcagccaggtggacagcatcaccaacctgctgaagggccaggccgtggtgcgggcctttgaccagaccaagtacctgaccccaggccggggcctgcaggagttccagcaggagatggagcccaagctgagctgccccaagaggctgcggctgcacatcaagcaggacccctggaacctgcccagctctgtgaggaccctggcccagaacatcaggaagtttgtggaggaggtgaagtgccgcctgctgctggccctgctggagtacagcgacagcgagacccagctgcggcgggacatggtgttctgccagaccctggtggccaccgtgtgtgccttcagcgagcagctgatggccgccctgaaccagatgtttgacaacagcaaagaaaatgagatggagacctgggaggccagccgccgctggctggaccagatcgccaatgctggggtgctcttccacttccagagcctgctgagccccaacctgacagatgagcaggccatgctggaggacaccctggtggccctgtttgacctggagaaggtgtccttctacttcaagcccagcgaggaggagcccctggtggccaacgtgcccctgacctaccaggccgagggcagccggcaggccctgaaggtgtacttctacatcgacagctaccactttgagcagctgccccagaggctgaagaatggaggcggcttcaagatccaccctgtgctgtttgcccaggccctggagagcatggagggctactactacagagacaacgtgtctgtggaggagttccaggcccagatcaatgctgccagcctggagaaggtgaagcagtacaaccagaagctgcgggccttctacctggacaagagcaacagcccccccaacagcaccagcaaggccgcctacgtggacaagctgatgaggcccctgaatgccctggatgagctgtaccgcctggtggccagcttcatccgcagcaagaggacagctgcctgtgccaacacagcctgcagcgccagcggcgtgggcctgctgtctgtgtcctctgagctgtgcaaccggctgggcgcctgccacatcatcatgtgcagcagtggagtgcaccgctgcaccctgtctgtgaccctggagcaggccatcatcctggcccggagccacggcctgcccccacgctacatcatgcaggccacagatgtgatgaggaagcagggcgcccgggtgcagaacacagccaagaacctgggcgtgcgggacaggaccccccagagcgccccccggctgtacaagctgtgtgagcccccacctcctgctggggaggagtag

SEQ ID NO: 163841 - DNA, 3525 bp, synthetic construct
  misc_feature 1..3525: note = Description of Artificial Sequence: Synthetic coding sequence
  source 1..3525: mol_type = other DNA
atgtctgaggacagcagaggagacagcagagctgagagcgccaaggacctggagaagcagctgcggctgcgggtgtgtgtgctgtctgagctgcagaagacagagcgggactatgtgggcaccctggagttcctggtgtctgccttcctgcacaggatgaaccagtgtgccgccagcaaggtggacaagaatgtgacagaggagaccgtgaagatgctgttcagcaacatcgaggacatcctggccgtgcacaaggagttcctgaaggtggtggaggagtgcctgcaccctgagcccaatgcccagcaggaggtgggcacctgcttcctgcacttcaaggacaagttccgcatctatgatgagtactgcagcaaccacgagaaggcccagaagctgctgctggagctgaacaagatccgcaccatccgcaccttcctgctgaactgcatgctgctgggcggcaggaagaacacagatgtgcccctggagggctacctggtgacccccatccagaggatctgcaagtaccccctcatcctgaaggagctgctgaagaggacccccaggaagcacagcgactatgctgctgtgatggaggccctgcaggccatgaaggctgtgtgcagcaacatcaatgaggccaagaggcagatggagaagctggaggtgctggaggagtggcagagccacatcgagggctgggagggcagcaacatcacagacacctgcacagagatgctgatgtgtggggtgctgctgaagatcagcagcggcaacatccaggagagggtcttcttcctgtttgacaacctgctggtgtactgcaagaggaagcaccggcggctgaagaacagcaaggccagcacagatggccaccgctacctgttccggggccgcatcaacacagaggtgatggaggtggagaatgtggatgatggaacagctgacttccacagcagcggccacatcgtggtgaatggctggaagatccacaacacagccaagaacaagtggtttgtgtgcatggccaagaccccagaggagaagcatgagtggtttgaggccatcctgaaggagcgggagaggaggaagggcctgaagctgggcatggagcaggacacctgggtgatgatcagcgagcagggcgagaagctgtacaagatgatgtgccggcagggcaacctgatcaaggacaggaagaggaagctgaccaccttccccaagtgcttcctgggcagcgagtttgtgtcctggctgctggagatcggggagatccacaggcctgaggagggcgtgcacctgggccaggccctgctggagaatggcatcatccaccacgtgacagacaagcaccagttcaagccagagcagatgctgtaccgcttccgctatgatgatggcaccttctaccccagaaatgagatgcaggatgtgatcagcaaaggagtgcggctgtactgccgcctgcacagcctcttcacccctgtgatccgggacaaggactaccacctgcggacctacaagtctgtggtgatggccaacaagctgattgactggctgattgcccagggcgactgcaggacccgggaggaggccatgatctttggagtgggcctgtgtgacaatggcttcatgcaccacgtgctggagaagtctgagttcaaggatgagcccctgctcttccgcttcttcagtgatgaggagatggagggcagcaacatgaagcaccggctgatgaagcatgacctgaaggtggtggagaatgtcatcgccaagagcctgctgatcaagagcaatgaaggcagctatggcttcggcctggaggacaagaacaaggtgcccatcatcaagctggtggagaagggcagcaatgctgagatggccggcatggaggtgggcaagaagatctttgccatcaacggggacctggtgttcatgaggcccttcaatgaggtggactgcttcctgaagagctgcctgaacagcaggaagcccctgcgggtgctggtgtccaccaagccccgggagaccgtgaagatcccagattctgcagatggcctgggcttccagatccggggcttcggccccagcgtggtgcatgctgtgggccggggcaccgtggccgctgctgctggcctgcaccctggccagtgcatcatcaaggtgaatggcatcaacgtgtccaaggagacccacgccagcgtcatcgcccacgtgacagcctgcaggaagtaccgccggcccaccaagcaggacagcatccagtgggtgtacaacagcattgaaagtgcccaggaggacctgcagaagagccacagcaagcccccaggagatgaggccggagatgcctttgactgcaaggtggaggaggtgattgacaagttcaacaccatggccatcattgatggcaagaaggagcacgtgtccctgactgtggacaacgtgcacctggagtatggagtggtgtatgaatatgacagcacagctggcatcaagtgcaatgtggtggagaagatgattgagcccaagggcttcttcagcctgacagccaagatcctggaggccctggccaagagtgatgagcactttgtgcagaactgcaccagcctgaacagcctgaatgaggtgatccccacagacctgcagagcaagttcagcgccctgtgcagcgagagaattgagcacctgtgccagaggatcagcagctacaagaaggtgtctgtgctgctgatcctgtacaccatcatcgtggagatgtaccacttcacagagatgatcaccctgtacaacatcctggagctggtgcggccccccaacagcgagttcttcttctccttcctgcccaccaagaggatgaagaccctgaaccagaagaaggtgacccacatgaagaagaccaacatccagctgcagttcagccgggtgctgaagaacagagcctggcccaccttcaagcaggccaagagcaagatcagccccctgcacagcagtgacttctgccccaccaactgccacgtgaatgtgatggaggtgtcctaccccaagaccagcaccagcctgggcagcgccttcggcgtgcagtggaagctgagccccatggtgtacatccagcacaccatcaccaccatggccgcccccagcggcctgagcctgggccagcaggacggccacggcctgcgctacctgctggagaggaagaccagcgagggcatcatccccacagacagcgacaatgagaagggggagaggaacagcaagagggtgtgcttcaacgtggccggagatgagcaggaggacagcggccatgacaccatcagcaacagagacagctacagcttcagtgactgcaacagcaacagaaacagcatcgccagcttcaccagcatctgcagcagccagtgcagcagctacttccacagtgatgagatggattctggcagtgatgagctgcccctgtctgtgcgcatcagccatgacaagcaggacaagatccacagctgcctggagcacctgttcagccagtag

SEQ ID NO: 163842 - DNA, 1650 bp, synthetic construct
  misc_feature 1..1650: note = Description of Artificial Sequence: Synthetic coding sequence
  source 1..1650: mol_type = other DNA
atggccagcgccagcagcggccccagcagctctgtgggcttcagcagctttgatcctgctgtgcccagctgcaccctgagcagcgccagcggcatcaagaggcccatggccagcgaggtgccctatgccagcggcatgcccatcaagaagattggccacaggtctgtggacagcagtggagagaccacctacaagaagaccaccagcagcgccctgaagggggccatccagctgggcatcacccacacagtgggcagcctgagcaccaagccagagagagatgtgctgatgcaggacttctacgtggtggagagcatcttcttccccagcgagggcagcaacctgaccccagcccaccactacaatgacttccgcttcaagacctacgcccctgtggccttccgctacttccgggagctgtttggcatccggccagatgactacctgtacagcctgtgcagcgagcccctcatcgagctgtgcagcagcggggccagcggcagcctcttctacgtgtccagtgatgatgagttcatcatcaagacagtgcagcacaaggaggccgagttcctgcagaagctgctgcccggctactacatgaacctgaaccagaaccccaggaccctgctgcccaagttctacggcctgtactgtgtgcaggccggcggcaagaacatccgcatcgtggtgatgaacaacctgctgcccaggtctgtgaagatgcacatcaagtatgacctgaagggcagcacctacaagaggcgggccagccagaaggagcgggagaagcccctgcccaccttcaaggacctggacttcctgcaggacatcccagatggcctcttcctggatgctgacatgtacaatgccctgtgcaagaccctgcagagggactgcctggtgctgcagagcttcaagatcatggactacagcctgctgatgagcatccacaacatcgaccacgcccagcgggagcccctgagcagcgagacccagtacagcgtggacacccggcggcctgccccccagaaggccctgtacagcacagccatggagagcatccagggcgaggccaggagaggaggcaccatggagacagatgaccacatgggcggcatcccagccaggaacagcaaaggagagcggctgctgctgtacatcggcatcatcgacatcctgcagagctacagatttgtgaagaagctggagcacagctggaaggccctggtgcatgatggagacacagtgtctgtgcacaggcctggcttctatgcagagcgcttccagcgcttcatgtgcaacacagtgttcaagaagatccccctgaagcccagccccagcaagaagttccgcagcggcagcagcttcagccggcgggccggcagcagcggcaacagctgcatcacctaccagcccagcgtgtctggagagcacaaggcccaggtgaccaccaaggccgaggtggagcccggggtgcacctgggccgcccagatgtgctgccccagaccccacccctggaggagatcagcgagggcagccccatcccagaccccagcttcagccccctggtgggggagaccctgcagatgctgaccaccagcaccaccctggagaagctggaggtggccgagagcgagttcacccactag

SEQ ID NO: 163843 - DNA, 1689 bp, synthetic construct
  misc_feature 1..1689: note = Description of Artificial Sequence: Synthetic coding sequence
  source 1..1689: mol_type = other DNA
atggccagcgccagcagcggccccagcagctctgtgggcttcagcagctttgatcctgctgtgcccagctgcaccctgagcagcgctgccagcggcatcaagaggcccatggccagcgaggtgctggaggcccggcaggacagctacatcagcctggtgccctatgccagcggcatgcccatcaagaagattggccacaggtctgtggacagcagcggggagaccacctacaagaagaccaccagcagcgccctgaagggggccatccagctgggcatcacccacacagtgggcagcctgagcaccaagccagagagagatgtgctgatgcaggacttctacgtggtggagagcatcttcttccccagcgagggcagcaacctgaccccagcccaccactacaatgacttccgcttcaagacctacgcccctgtggccttccgctacttccgggagctgtttggcatccggccagatgactacctgtacagcctgtgcagcgagcccctgattgagctgtgcagcagcggggccagcggcagcctcttctacgtgtccagtgatgatgagttcatcatcaagacagtgcagcacaaggaggccgagttcctgcagaagctgctgcccggctactacatgaacctgaaccagaaccccaggaccctgctgcccaagttctacggcctgtactgtgtgcaggccggcggcaagaacatcagaattgtggtgatgaacaacctgctgcccaggtctgtgaagatgcacatcaagtatgacctgaagggcagcacctacaagagaagagccagccagaaggagcgggagaagcccctgcccaccttcaaggacctggacttcctgcaggacatcccagatggcctcttcctggatgctgacatgtacaatgccctgtgcaagaccctgcagagggactgcctggtgctgcagagcttcaagatcatggactacagcctgctgatgagcatccacaacatcgaccacgcccagcgggagcccctgagcagcgagacccagtacagcgtggacaccaggaggcctgccccccagaaggccctgtacagcacagccatggagagcatccagggcgaggcccggcggggcggcaccatggagacagatgaccacatgggcggcatcccagccaggaacagcaagggggagcggctgctgctgtacatcggcatcatcgacatcctgcagagctacagatttgtgaagaagctggagcacagctggaaggccctggtgcatgatggagacacagtgtctgtgcaccggcccggcttctacgccgagcgcttccagcgcttcatgtgcaacacagtgttcaagaagatccccctgaagcccagccccagcaagaagttccgcagcggcagcagcttcagcagaagagctggcagcagcggcaacagctgcatcacctaccagcccagcgtgtctggagagcacaaggcccaggtgaccaccaaggccgaggtggagcccggggtgcacctgggccgcccagatgtgctgccccagaccccacccctggaggagatcagcgagggcagccccatcccagaccccagcttcagccccctggtgggggagaccctgcagatgctgaccaccagcaccaccctggagaagctggaggtggccgagagcgagttcacccactag

SEQ ID NO: 163844 - DNA, 1503 bp, synthetic construct
  misc_feature 1..1503: note = Description of Artificial Sequence: Synthetic coding sequence
  source 1..1503: mol_type = other DNA
atggccagcgccagcagcggccccagcagctctgtgggcttcagcagctttgatcctgctgtgcccagctgcaccctgagcagcgccagcggcatcaagaggcccatggccagcgaggtgccctatgccagcggcatgcccatcaagaagattggccacaggtctgtggacagcagtggagagaccacctacaagaagaccaccagcagcgccctgaagggggccatccagctgggcatcacccacacagtgggcagcctgagcaccaagccagagagagatgtgctgatgcaggacttctacgtggtggagagcatcttcttccccagcgagggcagcaacctgaccccagcccaccactacaatgacttccgcttcaagacctacgcccctgtggccttccgctacttccgggagctgtttggcatccggccagatgactacctgtacagcctgtgcagcgagcccctcatcgagctgtgcagcagcggggccagcggcagcctcttctacgtgtccagtgatgatgagttcatcatcaagacagtgcagcacaaggaggccgagttcctgcagaagctgctgcccggctactacatgaacctgaaccagaaccccaggaccctgctgcccaagttctacggcctgtactgtgtgcaggccggcggcaagaacatccgcatcgtggtgatgaacaacctgctgcccaggtctgtgaagatgcacatcaagtatgacctgaagggcagcacctacaagaggcgggccagccagaaggagcgggagaagcccctgcccaccttcaaggacctggacttcctgcaggacatcccagatggcctcttcctggatgctgacatgtacaatgccctgtgcaagaccctgcagagggactgcctggtgctgcagagcttcaagatcatggactacagcctgctgatgagcatccacaacatcgaccacgcccagcgggagcccctgagcagcgagacccagtacagcgtggacacccggcggcctgccccccagaaggccctgtacagcacagccatggagagcatccagggcgaggccaggagaggaggcaccatggagacagatgaccacatgggcggcatcccagccaggaacagcaaaggagagcggctgctgctgtacatcggcatcatcgacatcctgcagagctacagatttgtgaagaagctggagcacagctggaaggccctggtgcatgatggagacacagtgtctgtgcacaggcctggcttctatgcagagcgcttccagcgcttcatgtgcaacacagtgttcaagaagatcccctgtgtgcacctgggccgcccagatgtgctgccccagaccccacccctggaggagatcagcgagggcagccccatcccagaccccagcttcagccccctggtgggggagaccctgcagatgctgaccaccagcaccaccctggagaagctggaggtggccgagagcgagttcacccactag

SEQ ID NO: 163845 - DNA, 1653 bp, synthetic construct
  misc_feature 1..1653: note = Description of Artificial Sequence: Synthetic coding sequence
  source 1..1653: mol_type = other DNA
atggccagcgccagcagcggccccagcagctctgtgggcttcagcagctttgatcctgctgtgcccagctgcaccctgagcagcgctgccagcggcatcaagaggcccatggccagcgaggtgccctatgccagcggcatgcccatcaagaagattggccacaggtctgtggacagcagcggggagaccacctacaagaagaccaccagcagcgccctgaagggggccatccagctgggcatcacccacacagtgggcagcctgagcaccaagccagagagagatgtgctgatgcaggacttctacgtggtggagagcatcttcttccccagcgagggcagcaacctgaccccagcccaccactacaatgacttccgcttcaagacctacgcccctgtggccttccgctacttccgggagctgtttggcatccggccagatgactacctgtacagcctgtgcagcgagcccctgattgagctgtgcagcagcggggccagcggcagcctcttctacgtgtccagtgatgatgagttcatcatcaagacagtgcagcacaaggaggccgagttcctgcagaagctgctgcccggctactacatgaacctgaaccagaaccccaggaccctgctgcccaagttctacggcctgtactgtgtgcaggccggcggcaagaacatcagaattgtggtgatgaacaacctgctgcccaggtctgtgaagatgcacatcaagtatgacctgaagggcagcacctacaagagaagagccagccagaaggagcgggagaagcccctgcccaccttcaaggacctggacttcctgcaggacatcccagatggcctcttcctggatgctgacatgtacaatgccctgtgcaagaccctgcagagggactgcctggtgctgcagagcttcaagatcatggactacagcctgctgatgagcatccacaacatcgaccacgcccagcgggagcccctgagcagcgagacccagtacagcgtggacaccaggaggcctgccccccagaaggccctgtacagcacagccatggagagcatccagggcgaggcccggcggggcggcaccatggagacagatgaccacatgggcggcatcccagccaggaacagcaagggggagcggctgctgctgtacatcggcatcatcgacatcctgcagagctacagatttgtgaagaagctggagcacagctggaaggccctggtgcatgatggagacacagtgtctgtgcaccggcccggcttctacgccgagcgcttccagcgcttcatgtgcaacacagtgttcaagaagatccccctgaagcccagccccagcaagaagttccgcagcggcagcagcttcagcagaagagctggcagcagcggcaacagctgcatcacctaccagcccagcgtgtctggagagcacaaggcccaggtgaccaccaaggccgaggtggagcccggggtgcacctgggccgcccagatgtgctgccccagaccccacccctggaggagatcagcgagggcagccccatcccagaccccagcttcagccccctggtgggggagaccctgcagatgctgaccaccagcaccaccctggagaagctggaggtggccgagagcgagttcacccactag

SEQ ID NO: 163846 - DNA, 597 bp, synthetic construct
  misc_feature 1..597: note = Description of Artificial Sequence: Synthetic coding sequence
  source 1..597: mol_type = other DNA
atgtacaatgccctgtgcaagaccctgcagagggactgcctggtgctgcagagcttcaagatcatggactacagcctgctgatgagcatccacaacatcgaccacgcccagcgggagcccctgagcagcgagacccagtacagcgtggacacccggcggcctgccccccagaaggccctgtacagcacagccatggagagcatccagggcgaggccaggagaggaggcaccatggagacagatgaccacatgggcggcatcccagccaggaacagcaaaggagagcggctgctgctgtacatcggcatcatcgacatcctgcagagctacagatttgtgaagaagctggagcacagctggaaggccctggtgcatgatggagacacagtgtctgtgcacaggcctggcttctatgcagagcgcttccagcgcttcatgtgcaacacagtgttcaagaagatccccctgcagccctggaagagcctgaagctgcagagccagagcagccccatcaagaggaaggccagcgaggacctggagcaggacagcgccatcagcgtcatcccccgctgccagcccctgccccagcagtgctag

SEQ ID NO: 163847 - DNA, 261 bp, synthetic construct
  misc_feature 1..261: note = Description of Artificial Sequence: Synthetic coding sequence
  source 1..261: mol_type = other DNA
atggccagcgaggtgctggaggcccggcaggacagctacatcagcctggtgccctatgccagcggcatgcccatcaagaagattggccacaggtctgtggacagcagcggggagaccacctacaagaagaccaccagcagcgccctgaagggggccatccagctgggcatcacccacacagtgggcagcctgagcaccaagccagagagagatgtgctgatgcaggacttctacgtggtggagagcatcttcttcccctag

SEQ ID NO: 163848 - DNA, 1569 bp, synthetic construct
  misc_feature 1..1569: note = Description of Artificial Sequence: Synthetic coding sequence
  source 1..1569: mol_type = other DNA
atggccagcgccagcagcggccccagcagctctgtgggcttcagcagctttgatcctgctgtgcccagctgcaccctgagcagcgctgccagcggcatcaagaggcccatggccagcgaggtgccctatgccagcggcatgcccatcaagaagattggccacaggtctgtggacagcagcggggagaccacctacaagaagaccaccagcagcgccctgaagggggccatccagctgggcatcacccacacagtgggcagcctgagcaccaagccagagagagatgtgctgatgcaggacttctacgtggtggagagcatcttcttccccagcgagggcagcaacctgaccccagcccaccactacaatgacttccgcttcaagacctacgcccctgtggccttccgctacttccgggagctgtttggcatccggccagatgactacctgtacagcctgtgcagcgagcccctgattgagctgtgcagcagcggggccagcggcagcctcttctacgtgtccagtgatgatgagttcatcatcaagacagtgcagcacaaggaggccgagttcctgcagaagctgctgcccggctactacatgaacctgaaccagaaccccaggaccctgctgcccaagttctacggcctgtactgtgtgcaggccggcggcaagaacatcagaattgtggtgatgaacaacctgctgcccaggtctgtgaagatgcacatcaagtatgacctgaagggcagcacctacaagagaagagccagccagaaggagcgggagaagcccctgcccaccttcaaggacctggacttcctgcaggacatcccagatggcctcttcctggatgctgacatgtacaatgccctgtgcaagaccctgcagagggactgcctggtgctgcagagcttcaagatcatggactacagcctgctgatgagcatccacaacatcgaccacgcccagcgggagcccctgagcagcgagacccagtacagcgtggacaccaggaggcctgccccccagaaggccctgtacagcacagccatggagagcatccagggcgaggcccggcggggcggcaccatggagacagatgaccagtttgtgaagaagctggagcacagctggaaggccctggtgcatgatggagacacagtgtctgtgcaccggcccggcttctacgccgagcgcttccagcgcttcatgtgcaacacagtgttcaagaagatccccctgaagcccagccccagcaagaagttccgcagcggcagcagcttcagcagaagagctggcagcagcggcaacagctgcatcacctaccagcccagcgtgtctggagagcacaaggcccaggtgaccaccaaggccgaggtggagcccggggtgcacctgggccgcccagatgtgctgccccagaccccacccctggaggagatcagcgagggcagccccatcccagaccccagcttcagccccctggtgggggagaccctgcagatgctgaccaccagcaccaccctggagaagctggaggtggccgagagcgagttcacccactag

SEQ ID NO: 163849 - DNA, 1623 bp, synthetic construct
  misc_feature 1..1623: note = Description of Artificial Sequence: Synthetic coding sequence
  source 1..1623: mol_type = other DNA
atgagcagcgctgctgaaaatggagaggccgcccctgggaagcagaatgaggagaagacctacaagaagacagccagcagcgccatcaagggggccatccagctgggcatcggctacacagtgggcaacctgaccagcaagccagagagagatgtgctgatgcaggacttctacgtggtggagagcgtcttcctgcccagcgagggcagcaacctgaccccagcccaccactacccagacttccgcttcaagacctacgcccccctggccttccgctacttccgggagctgtttggcatcaagccagatgactacctgtacagcatctgcagcgagcccctgattgagctgagcaaccctggggccagcggcagcctcttctttgtgaccagtgatgatgagttcatcatcaagacagtgcagcacaaggaggccgagttcctgcagaagctgctgcccggctactacatgaacctgaaccagaaccccaggaccctgctgcccaagttctacggcctgtactgcatgcagagcggcggcatcaacatcagaattgtggtgatgaacaacgtgctgcccaggtccatgaggatgcacttcacctatgacctgaagggcagcacctacaagagaagagccagcaggaaggagcgggagaagagcaaccccaccttcaaggacctggacttcctgcaggacatgcatgagggcctgtactttgacacagagacctacaatgccctgatgaagaccctgcagagggactgccgggtgctggagagcttcaagatcatggactacagcctgctgctgggcatccacttcctggaccacagcctgaaggagaaggaggaggagaccccccagaatgtgcctgatgccaagaggacaggcatgcagaaggtgctgtacagcacagccatggagagcatccagggccctgggaagtctggagatggcatcatcacagagaacccagacaccatgggcggcatcccagccaagagccacagaggagagaagctgctgctcttcatgggcatcatcgacatcctgcagagctaccgcctgatgaagaagctggagcacagctggaaggccctggtgtatgatggagacacagtgtctgtgcaccggcccagcttctacgccgaccgcttcctgaagttcatgaacagcagggtcttcaagaagatccaggccctgaaggccagccccagcaagaagcgctgcaacagcattgctgccctgaaggccaccagccaggagatcgtgagcagcatcagccaggagtggaaggatgagaagagggacctgctgacagagggccagagcttcagcagcctggatgaggaggccctgggcagccgccacaggccagacctggtgcccagcacccccagcctgtttgaggccgccagcctggccaccaccatcagcagcagcagcctgtatgtgaatgagcactacccccatgaccggcccaccctgtacagcaacagcaagggcctgcccagcagcagcaccttcaccctggaggagggcaccatctacctgacagctgagcccaacaccctggaggtgcaggatgacaatgcctctgtgctggatgtgtacctgtag

SEQ ID NO: 163850 - DNA, 312 bp, synthetic construct
  misc_feature 1..312: note = Description of Artificial Sequence: Synthetic coding sequence
  source 1..312: mol_type = other DNA
atgagcagcgctgctgaaaatggagaggccgcccctgggaagcagaatgaggagaagacctacaagaagacagccagcagcgccatcaagggggccatccagctgggcatcggctacacagtgggcaacctgaccagcaagccagagagagatgtgctgatgcaggacttctacgtggtggagagcgtcttcctgcccagcgagggcagcaacctgaccccagcccaccactacccagacttccgcttcaagacctacgcccccctggccttccgctacttccgggagctgtttggcatcaagccagactag

SEQ ID NO: 163851 - DNA, 1623 bp, synthetic construct; identical to SEQ ID NO: 163849
  misc_feature 1..1623: note = Description of Artificial Sequence: Synthetic coding sequence
  source 1..1623: mol_type = other DNA

SEQ ID NO: 163852 - DNA, 1350 bp, synthetic construct
  misc_feature 1..1350: note = Description of Artificial Sequence: Synthetic coding sequence
  source 1..1350: mol_type = other DNA
atgcaggacttctacgtggtggagagcgtcttcctgcccagcgagggcagcaacctgaccccagcccaccactacccagacttccgcttcaagacctacgcccccctggccttccgctacttccgggagctgtttggcatcaagccagatgactacctgtacagcatctgcagcgagcccctcatcgagctgagcaaccctggggccagcggcagcctcttctttgtgaccagtgatgatgagttcatcatcaagacagtgcagcacaaggaggccgagttcctgcagaagctgctgcccggctactacatgaacctgaaccagaaccccaggaccctgctgcccaagttctacggcctgtactgcatgcagagcggcggcatcaacatccgcatcgtggtgatgaacaacgtgctgcccaggtccatgaggatgcacttcacctatgacctgaagggcagcacctacaagaggcgggccagcaggaaggagcgggagaagagcaaccccaccttcaaggacctggacttcctgcaggacatgcatgagggcctgtactttgacacagagacctacaatgccctgatgaagaccctgcagagggactgccgggtgctggagagcttcaagatcatggactacagcctgctgctgggcatccacttcctggaccacagcctgaaggagaaggaggaggagaccccccagaatgtgcctgatgccaagaggacaggcatgcagaaggtgctgtacagcacagccatggagagcatccagggccctgggaagtctggagatggcatcatcacagaaaatccagacaccatgggcggcatcccagccaagagccacagaggagagaagctgctgctcttcatgggcatcatcgacatcctgcagagctaccgcctgatgaagaagctggagcacagctggaaggccctggtgtatgatggagacacagtgtctgtgcaccggcccagcttctatgctgaccgcttcctgaagttcatgaacagcagggtcttcaagaagatccaggccctgaaggccagccccagcaagaagcgctgcaacagcattgctgccctgaaggccaccagccaggagatcgtgagcagcatcagccaggagtggaaggatgagaagagggacctgctgacagagggccagagcttcagcagcctggatgaggaggccctgggcagccgccacaggccagacctggtgcccagcacccccagcctgtttgaagctgccagcctggccaccaccatcagcagcagcagcctgtatgtgaatgagcactacccccatgaccggcccaccctgtacagcaacagcaagtag

SEQ ID NO: 163853 - DNA, 489 bp, synthetic construct
  misc_feature 1..489: note = Description of Artificial Sequence: Synthetic coding sequence
  source 1..489: mol_type = other DNA
atgagcagcgctgctgaaaatggagaggccgcccctgggaagcagaatgaggagaagacctacaagaagacagccagcagcgccatcaagggggccatccagctgggcatcggctacacagtgggcaacctgaccagcaagccagagagagatgtgctgatgcaggacttctacgtggtggagagcgtcttcctgcccagcgagggcagcaacctgaccccagcccaccactacccagacttccgcttcaagacctacgcccccctggccttccgctacttccgggagctgtttggcatcaagccagatgactacctgtacagcatctgcagcgagcccctgattgagctgagcaaccctggggccagcggcagcctcttctttgtgaccagtgatgatgagttcatcatcaagacagtgcagcacaaggaggccgagttcctgcagaagctgctgcccggctactacatgaacctgaaccagaactag

SEQ ID NO: 163854 - DNA, 474 bp, synthetic construct
  misc_feature 1..474: note = Description of Artificial Sequence: Synthetic coding sequence
  source 1..474: mol_type = other DNA
atgagcagcgctgctgaaaatggagaggccgcccctgggaagcagaatgaggagaagacctacaagaagacagccagcagcgccatcaagggggccatccagctgggcatcggctacacagtgggcaacctgaccagcaagccagagagagatgtgctgatgcaggacttctacgtggtggagagcgtcttcctgcccagcgagggcagcaacctgaccccagcccaccactacccagacttccgcttcaagacctacgcccccctggccttccgctacttccgggagctgtttggcatcaagccagatgactacctgtacagcatctgcagcgagcccctgattgagctgagcaaccctggggccagcggcagcctcttctttgtgaccagtgatgatgagttcatcatcaagacagtgcagcacaaggaggccgagttcctgcagaagctgctgcccggctactacatgtag

SEQ ID NO: 163855 - DNA, 1509 bp, synthetic construct
  misc_feature 1..1509: note = Description of Artificial Sequence: Synthetic coding sequence
  source 1..1509: mol_type = other DNA
atgagcagcgctgctgaaaatggagaggccgcccctgggaagcagaatgaggagaagacctacaagaagacagccagcagcgccatcaagggggccatccagctgggcatcggctacacagtgggcaacctgaccagcaagccagagagagatgtgctgatgcaggacttctacgtggtggagagcgtcttcctgcccagcgagggcagcaacctgaccccagcccaccactacccagacttccgcttcaagacctacgcccccctggccttccgctacttccgggagctgtttggcatcaagccagatgactacctgtacagcatctgcagcgagcccctgattgagctgagcaaccctggggccagcggcagcctcttctttgtgaccagtgatgatgagttcatcatcaagacagtgcagcacaaggaggccgagttcctgcagaagctgctgcccggctactacatgaacctgaaccagaaccccaggaccctgctgcccaagttctacggcctgtactgcatgcagagcggcggcatcaacatcagaattgtggtgatgaacaacgtgctgcccaggtccatgaggatgcacttcacctatgacctgaagggcagcacctacaagagaagagccagcaggaaggagcgggagaagagcaaccccaccttcaaggacctggacttcctgcaggacatgcatgagggcctgtactttgacacagagacctacaatgccctgatgaagaccctgcagagggactgccgggtgctggagagcttcaagatcatggactacagcctgctgctgggcatccacttcctggaccacagcctgaaggagaaggaggaggagaccccccagaatgtgcctgatgccaagaggacaggcatgcagaaggtgctgtacagcacagccatggagagcatccagggccctgggaagtctggagatggcatcatcacagagaacccagacaccatgggcggcatcccagccaagagccacagaggagagaagctgctgctcttcatgggcatcatcgacatcctgcagagctaccgcctgatgaagaagctggagcacagctggaaggccctggtgtatgatggagacacagtgtctgtgcaccggcccagcttctacgccgaccgcttcctgaagttcatgaacagcagggtcttcaagaagatccaggccctgaaggccagccccagcaagaagcgctgcaacagcattgctgccctgaaggccaccagccaggagatcgtgagcagcatcagccaggagtggaaggatgagaagagggacctgctgacagagggccagagcttcagcagcctggatgaggaggccctgggcagccgccacaggccagacctggtgcccagcacccccagcctgtttgaggccgccagcctggccaccaccatcagcagcagcagcctgtatgtgaatgagcactacccccatgaccggcccaccctgtacagcaacagcaagtag

SEQ ID NO: 163856 - DNA, 2007 bp, synthetic construct
  misc_feature 1..2007: note = Description of Artificial Sequence: Synthetic coding sequence
  source 1..2007: mol_type = other DNA
atggagctggaggtgcctgatgaagctgagagcgctgaggccggggctgtgcccagcgaggccgcctgggccgctgagagcggggctgctgctggcctggcccagaagaaggccgcccccacagaggtgctgtccatgacagcccagcccggccctggccacggcaagaagctgggccaccggggcgtggatgccagcggggagaccacctacaagaagaccaccagcagcaccctgaagggggccatccagctgggcatcggctacacagtgggccacctgagcagcaagccagagagagatgtgctgatgcaggacttctacgtggtggagagcatcttcttccccagcgagggcagcaacctgaccccagcccaccacttccaggacttccgcttcaagacctacgcccctgtggccttccgctacttccgggagctgtttggcatccggccagatgactacctgtacagcctgtgcaatgagcccctgattgagctgagcaaccctggggccagcggcagcctcttctacgtgaccagtgatgatgagttcatcatcaagacagtgatgcacaaggaggccgagttcctgcagaagctgctgcccggctactacatgaacctgaaccagaaccccaggaccctgctgcccaagttctacggcctgtactgtgtgcagagcggcggcaagaacatccgggtggtggtgatgaacaacatcctgccccgggtggtgaagatgcacctgaagtttgacctgaagggcagcacctacaagagaagagccagcaagaaggagaaggagaagagcttccccacctacaaggacctggacttcatgcaggacatgcctgagggcctgctgctggatgctgacaccttcagcgccctggtgaagaccctgcagagggactgcctggtgctggagagcttcaagatcatggactacagcctgctgctgggcgtgcacaacatcgaccagcacgagcgggagcggcaggcccagggcgcccagagcaccagtgatgagaagaggcctgtgggccagaaggccctgtacagcacagccatggagagcatccagggcggggccgcccggggggaggccattgaaagtgatgacaccatgggcggcatcccagctgtgaatggccgcggggagcggctgctgctgcacatcggcatcatcgacatcctgcagagctaccgcttcatcaagaagctggagcacacctggaaggccctggtgcatgatggagacacagtgtctgtgcaccggcccagcttctacgccgagcgcttcttcaagttcatgagcaacacagtgttcaggaagaacagcagcctgaagagcagccccagcaagaagggccggggcggggccctgctggccgtgaagcccctgggccccacagctgccttcagcgccagccagatccccagcgagcgggaggaggcccagtatgacctgcggggggcccggagctaccccaccctggaggatgagggccgcccagacctgctgccctgcaccccacccagctttgaggaggccaccacagccagcatcgccaccaccctgagcagcaccagcctgagcatccctgagaggagccccagcgagaccagcgagcagccccgctacagaagaaggacccagagcagcggccaggacggccggccccaggaggagcccccagctgaggaggacctgcagcagatcaccgtgcaggtggagcccgcctgcagcgtggagatcgtggtgcccaaggaggaggatgctggggtggaggccagccctgctggggccagcgctgctgtggaggtggagacagccagccaggccagtgatgaggagggcgccccagccagccaggccagtgatgaagaagatgccccagccacagacatctacttccccacagatgagaggtcctgggtgtacagccccctgcactacagcgcccaggcccccccagccagtgatggagagagtgacacctag

SEQ ID NO: 163857 - DNA, 2103 bp, synthetic construct
  misc_feature 1..2103: note = Description of Artificial Sequence: Synthetic coding sequence
  source 1..2103: mol_type = other DNA
atggagctggaggtgcctgatgaagctgagagcgctgaggccggggctgtgcccagcgaggccgcctgggccgctgagagcggggctgctgctggcctggcccagaagaaggccgcccccacagaggtgctgtccatgacagcccagcccggccctggccacggcaagaagctgggccaccggggcgtggatgccagcggggagaccacctacaagaagaccaccagcagcaccctgaagggggccatccagctgggcatcggctacacagtgggccacctgagcagcaagccagagagagatgtgctgatgcaggacttctacgtggtggagagcatcttcttccccagcgagggcagcaacctgaccccagcccaccacttccaggacttccgcttcaagacctacgcccctgtggccttccgctacttccgggagctgtttggcatccggccagatgactacctgtacagcctgtgcaatgagcccctgattgagctgagcaaccctggggccagcggcagcctcttctacgtgaccagtgatgatgagttcatcatcaagacagtgatgcacaaggaggccgagttcctgcagaagctgctgcccggctactacatgaacctgaaccagaaccccaggaccctgctgcccaagttctacggcctgtactgtgtgcagagcggcggcaagaacatccgggtggtggtgatgaacaacatcctgccccgggtggtgaagatgcacctgaagtttgacctgaagggcagcacctacaagagaagagccagcaagaaggagaaggagaagagcttccccacctacaaggacctggacttcatgcaggacatgcctgagggcctgctgctggatgctgacaccttcagcgccctggtgaagaccctgcagagggactgcctggtgctggagagcttcaagatcatggactacagcctgctgctgggcgtgcacaacatcgaccagcacgagcgggagcggcaggcccagggcgcccagagcaccagtgatgagaagaggcctgtgggccagaaggccctgtacagcacagccatggagagcatccagggcggggccgcccggggggaggccattgaaagtgatgacaccatgggcggcatcccagctgtgaatggccgcggggagcggctgctgctgcacatcggcatcatcgacatcctgcagagctaccgcttcatcaagaagctggagcacacctggaaggccctggtgcatgatggagacacagtgtctgtgcaccggcccagcttctacgccgagcgcttcttcaagttcatgagcaacacagtgttcaggaagaacagcagcctgaagagcagccccagcaagaagggccggggcggggccctgctggccgtgaagcccctgggccccacagctgccttcagcgccagccagatccccagcgagcgggaggaggcccagtatgacctgcggggggcccggagctaccccaccctggaggatgagggccgcccagacctgctgccctgcaccccacccagctttgaggaggccaccacagccagcatcgccaccaccctgagcagcaccagcctgagcatccctgagaggagccccagcgagaccagcgagcagccccgctacagaagaaggacccagagcagcggccaggacggccggccccaggaggagcccccagctgaggaggacctgcagcagatcaccgtgcaggtggagcccgcctgcagcgtggagatcgtggtgcccaaggaggaggatgctggggtggaggccagccctgctggggccagcgctgctgtggaggtggagacagccagccaggccagtgatgaggagggcgccccagccagccaggccagtgatgaagaagatgccccagccacagacatctacttctggaggctgtggggcccccacgcccccacctggccctggaggcgggagggccgggccgcctgcctgtgcccctacccaccccacgtggtgacccccttccctggcaccggcctgtgtgcctcctggagcccagatggcactggaggcctgggcgccatgagctgctgcgtgtctgtgtcctag

SEQ ID NO: 163858 - DNA, 1923 bp, synthetic construct
  misc_feature 1..1923: note = Description of Artificial Sequence: Synthetic coding sequence
  source 1..1923: mol_type = other DNA
atggagctggaggtgcctgatgaagctgagagcgctgaggccggggctgtgcccagcgaggccgcctgggccgctgagagcggggctgctgctggcctggcccagaagaaggccgcccccacagaggtgctgtccatgacagcccagcccggccctggccacggcaagaagctgggccaccggggcgtggatgccagcggggagaccacctacaagaagaccaccagcagcaccctgaagggggccatccagctgggcatcggctacacagtgggccacctgagcagcaagccagagagagatgtgctgatgcaggacttctacgtggtggagagcatcttcttccccagcgagggcagcaacctgaccccagcccaccacttccaggacttccgcttcaagacctacgcccctgtggccttccgctacttccgggagctgtttggcatccggccagatgactacctgtacagcctgtgcaatgagcccctgattgagctgagcaaccctggggccagcggcagcctcttctacgtgaccagtgatgatgagttcatcatcaagacagtgatgcacaaggaggccgagttcctgcagaagctgctgcccggctactacatgaacctgaaccagaaccccaggaccctgctgcccaagttctacggcctgtactgtgtgcagagcggcggcaagaacatccgggtggtggtgatgaacaacatcctgccccgggtggtgaagatgcacctgaagtttgacctgaagggcagcacctacaagagaagagccagcaagaaggagaaggagaagagcttccccacctacaaggacctggacttcatgcaggacatgcctgagggcctgctgctggatgctgacaccttcagcgccctggtgaagaccctgcagagggactgcctggtgctggagagcttcaagatcatggactacagcctgctgctgggcgtgcacaacatcgaccagcacgagcgggagcggcaggcccagggcgcccagagcaccagtgatgagaagaggcctgtgggccagaaggccctgtacagcacagccatggagagcatccagggcggggccgcccggggggaggccattgaaagtgatgacaccatgggcggcatcccagctgtgaatggccgcggggagcggctgctgctgcacatcggcatcatcgacatcctgcagagctaccgcttcatcaagaagctggagcacacctggaaggccctggtgcatgatggagacacagtgtctgtgcaccggcccagcttctacgccgagcgcttcttcaagttcatgagcaacacagtgttcaggaagaacagcagcctgaagagcagccccagcaagaagggccggggcggggccctgctggccgtgaagcccctgggccccacagctgccttcagcgccagccagatccccagcgagcgggaggaggcccagtatgacctgcggggggcccggagctaccccaccctggaggatgagggccgcccagacctgctgccctgcaccccacccagctttgaggaggccaccacagccagcatcgccaccaccctgagcagcaccagcctgagcatccctgagaggagccccagcgagaccagcgagcagccccgctacagaagaaggacccagagcagcggccaggacggccggccccaggaggagcccccagctgaggaggacctgcagcagatcaccgtgcaggtggagcccgcctgcagcgtggagatcgtggtgcccaaggaggaggatgctggggtggaggccagccctgctggggccagcgctgctgtggaggtggagacagccagccaggccagtgatgaggagggcgccccagccagccaggccagtgatgaagaagatgccccagccacagacatctacttctag

SEQ ID NO: 163859 - DNA, 576 bp, synthetic construct
  misc_feature 1..576: note = Description of Artificial Sequence: Synthetic coding sequence
  source 1..576: mol_type = other DNA
atgcagagcgtcttctacccagctggccgcatcagcgagagatatgacatcaagggctgtgaggtgagccgctgggtggaccctgcccctgagggcagccccctggtgctggtgctgaaggacctgaacttccagggcaagaccatcaacctgggcccccagaggtcctggttcctgcggcagatggagctggacaccaccttcctgcgggagctgaatgtgctggactacagcctgctgattgccttccagaggctgcatgaagatgagcggggccctggcagcagcctcatcttcagaacagcccggtctgtgcagggcgcccagagccctgaggagagccgggcccagaacagaaggctgctgcctgatgccccaaatgccctgcacatcctggatggccctgagcagcgctacttcctgggcgtggtggacctggccaccgtgtatggcctgaggaagaggctggagcacctgtggaagaccctgcgctacccaggccgcaccttcagcacagtgtccccagcccgctatgcccggcggctgtgccagtgggtggaggcccacacagaatag

SEQ ID NO: 163860 - DNA, 1185 bp, synthetic construct
  misc_feature 1..1185: note = Description of Artificial Sequence: Synthetic coding sequence
  source 1..1185: mol_type = other DNA
atggccgcccccagccctggcccccgggaggtgctggcccccagccctgaggccggctgcagagctgtgaccagcagcagaagaggcctgctgtggaggctgcgggacaagcagagccggctgggcctgtttgagatcagccctggccacgagctgcacggcatgacctgcatgatgcaggccggcctgtgggccgccacccaggtgtccatggaccacccccccaccggcccccccagcagagatgacttcagcgaggtgctgacccaggtgcatgagggctttgagctgggcaccctggccggccctgcctttgcctggctgcggcgcagcctgggcctggccgaggaggactaccaggccgccctgggccctgggggcccctacctgcagttcctgagcaccagcaagagcaaggccagcttcttcctgagccatgaccagcgcttcttcctgaagacccagggcagaagagaggtgcaggccctgctggcccacctgccccgctacgtgcagcacctgcagaggcacccccacagcctgctggcccggctgctgggcgtgcacagcctgcgggtggaccggggcaagaagacctacttcatcgtgatgcagagcgtcttctacccagctggccgcatcagcgagagatatgacatcaagggctgtgaggtgagccgctgggtggaccctgcccctgagggcagccccctggtgctggtgctgaaggacctgaacttccagggcaagaccatcaacctgggcccccagaggtcctggttcctgcggcagatggagctggacaccaccttcctgcgggagctgaatgtgctggactacagcctgctgattgccttccagaggctgcatgaagatgagcggggccctggcagcagcctcatcttcagaacagcccggtctgtgcagggcgcccagagccctgaggagagccgggcccagaacagaaggctgctgcctgatgccccaaatgccctgcacatcctggatggccctgagcagcgctacttcctgggcgtggtggacctggccaccgtgtatggcctgaggaagaggctggagcacctgtggaagaccctgcgctacccaggccgcaccttcagcacagtgtccccagcccgctatgcccggcggctgtgccagtgggtggaggcccacacagaatag

SEQ ID NO: 163861 - DNA, 1128 bp, synthetic construct
  misc_feature 1..1128: note = Description of Artificial Sequence: Synthetic coding sequence
  source 1..1128: mol_type = other DNA
atgatgtgccagagcgaggcccggcagggccctgagctgcgggccgccaagtggctgcacttcccccagctggccctgcggcggcggctgggccagctgagctgcatgagcaggcctgccctgaagctgcgctcctggcccctgactgtgctgtactacctgctgccctttggagccctgcggcccctgagccgggtgggctggaggcctgtgtcccgggtggccctgtacaagtctgtgcccacccggctgctgagccgggcctggggccgcctgaaccaggtggagctgccccactggctgcggcggcctgtgtacagcctgtacatctggacctttggagtgaacatgaaggaggccgctgtggaggacctgcaccactacagaaacctgtctgagttcttccggaggaagctgaagccccaggcccggcctgtgtgtggcctgcacagcgtcatcagccccagtgatggccgcatcctgaactttggccaggtgaagaactgtgaggtggagcaggtgaagggcgtgacctacagcctggagagcttcctgggccccaggatgtgcacagaggacctgcccttccccccagctgccagctgtgacagcttcaagaaccagctggtgacccgggagggcaatgagctgtaccactgcgtcatctacctggcccctggggactaccactgcttccacagccccacagactggacagtgagccacagaagacacttccctggcagcctgatgtctgtgaaccctggcatggcccgctggatcaaggagctgttctgccacaatgaaagagtggtgctgaccggggactggaagcacggcttcttcagcctgacagctgtgggcgccaccaacgtgggcagcatccgcatctactttgaccgggacctgcacaccaacagccccaggcacagcaagggcagctacaatgacttctcctttgtgacccacaccaaccgggagggcgtgcccatgaggaaaggagagcacctgggggagttcaacctgggcagcaccatcgtgctgatctttgaggcccccaaggacttcaacttccagctgaagacaggccagaagatccgctttggagaggccctgggcagcctgtag

SEQ ID NO: 163862 - DNA, 1227 bp, synthetic construct
  misc_feature 1..1227: note = Description of Artificial Sequence: Synthetic coding sequence
  source 1..1227: mol_type = other DNA
atggccacctctgtgggccaccgctgcctgggcctgctgcacggcgtggccccctggaggagcagcctgcacccctgtgagatcacagccctgagccagagcctgcagcccctgaggaagctgcccttccgggccttcagaacagatgccaggaagatccacacagccccagcccggaccatgttcctgctgcggcccctgcccatcctgctggtgactggaggcggctacgccggctaccggcagtatgagaagtaccgggagcgggagctggagaagctgggcctggagatcccccccaagctggccggccactgggaggtggccctgtacaagtctgtgcccacccggctgctgagccgggcctggggccgcctgaaccaggtggagctgccccactggctgcggcggcctgtgtacagcctgtacatctggacctttggagtgaacatgaaggaggccgctgtggaggacctgcaccactacagaaacctgtctgagttcttccggaggaagctgaagccccaggcccggcctgtgtgtggcctgcacagcatcagccccagtgatggccgcatcctgaactttggccaggtgaagaactgtgaggtggagcaggtgaagggcgtgacctacagcctggagagcttcctgggccccaggatgtgcacagaggacctgcccttccccccagctgccagctgtgacagcttcaagaaccagctggtgacccgggagggcaatgagctgtaccactgtgtgatctacctggcccctggggactaccactgcttccacagccccacagactggacagtgagccaccggcggcacttccctggcagcctgatgtctgtgaaccctggcatggcccgctggatcaaggagctgttctgccacaatgaaagagtggtgctgactggagactggaagcacggcttcttcagcctgacagctgtgggcgccaccaacgtgggcagcatccgcatctactttgaccgggacctgcacaccaacagccccaggcacagcaagggcagctacaatgacttctcctttgtgacccacaccaaccgggagggcgtgcccatgaggaagggggagcacctgggggagttcaacctgggcagcaccatcgtgctgatctttgaggcccccaaggacttcaacttccagctgaagacaggccagaagatccgctttggagaggccctgggcagcctgtag

SEQ ID NO: 163863 - DNA, 1128 bp, synthetic construct; identical to SEQ ID NO: 163861
  misc_feature 1..1128: note = Description of Artificial Sequence: Synthetic coding sequence
  source 1..1128: mol_type = other DNA

SEQ ID NO: 163864 - DNA, 789 bp, synthetic construct
  misc_feature 1..789: note = Description of Artificial Sequence: Synthetic coding sequence
  source 1..789: mol_type = other DNA
atgatgtgccagagcgaggcccggcagggccctgagctgcgggccgccaagtggctgcacttcccccagctggccctgcggcggcggctgggccagctgagctgcatgagcaggcctgccctgaagctgcgctcctggcccctgactgtgctgtactacctgctgccctttggagccctgcggcccctgagccgggtgggctggaggcctgtgtcccgggtggccctgtacaagtctgtgcccacccggctgctgagccgggcctggggccgcctgaaccaggtggagctgccccactggctgcggcggcctgtgtacagcctgtacatctggacctttggagtgaacatgaaggaggccgctgtggaggacctgcaccactacagaaacctgtctgagttcttccggaggaagctgaagccccaggcccggcctgtgtgtggcctgcacagcgtcatcagccccagtgatggccgcatcctgaactttggccaggtgaagaactgtgaggtggagcaggtgaagggcgtgacctacagcctggagagcttcctgggccccaggatgtgcacagaggacctgcccttccccccagctgccagctgtgacagcttcaagaaccagctggtgacccgggagggcaatgagctgtaccactgcgtcatctacctggcccctggggactaccactgcttccacagccccacagactggacagtgagccacagaagacacttccctggccctgcccacaagcagcccaaggcccagcagggcctgctgcagtag

SEQ ID NO: 163865 - DNA, 687 bp, synthetic construct
  misc_feature 1..687: note = Description of Artificial Sequence: Synthetic coding sequence
  source 1..687: mol_type = other DNA
atgatgtgccagagcgaggcccggcagggccctgagctgcgggccgccaagtggctgcacttcccccagctggccctgcggcggcggctgggccagctgagctgcatgagcaggcctgccctgaagctgcgctcctggcccctgactgtgctgtactacctgctgccctttggagccctgcggcccctgagccgggtgggctggaggcctgtgtcccgggtggccctgtacaagtctgtgcccacccggctgctgagccgggcctggggccgcctgaaccaggtggagctgccccactggctgcggcggcctgtgtacagcctgtacatctggacctttggagtgaacatgaaggaggccgctgtggaggacctgcaccactacagaaacctgtctgagttcttccggaggaagctgaagccccaggcccggcctgtgtgtggcctgcacagcgtcatcagccccagtgatggccgcatcctgaactttggccaggtgaagaactgtgaggtggagcaggtgaagggcgtgacctacagcctggagagcttcctgggccccaggatgtgcacagaggacctgcccttccccccagctgccagctgtgacagcttcaagaaccagctggtgacccgggagggcaatgagctgtaccactgcgtcatctacctggcccctggggactag

SEQ ID NO: 163866 - DNA, 222 bp, synthetic construct
  misc_feature 1..222: note = Description of Artificial Sequence: Synthetic coding sequence
  source 1..222: mol_type = other DNA
atgatgtgccagagcgaggcccggcagggccctgagctgcgggccgccaagtggctgcacttcccccagctggccctgcggcggcggctgggccagctgagctgcatgagcaggcctgccctgaagctgcgctcctggcccctgactgtgctgtactacctgctgccctttggagccctgcggcccctgagccgggtgggctggaggcctgtgtccaggtag

SEQ ID NO: 163867 - DNA, 222 bp, synthetic construct; identical to SEQ ID NO: 163866
  misc_feature 1..222: note = Description of Artificial Sequence: Synthetic coding sequence
  source 1..222: mol_type = other DNA

SEQ ID NO: 163868 - DNA, 1230 bp, synthetic construct
  misc_feature 1..1230: note = Description of Artificial Sequence: Synthetic coding sequence
  source 1..1230: mol_type = other DNA
atggccacctctgtgggccaccgctgcctgggcctgctgcacggcgtggccccctggaggagcagcctgcacccctgtgagatcacagccctgagccagagcctgcagcccctgaggaagctgcccttccgggccttcagaacagatgccaggaagatccacacagccccagcccggaccatgttcctgctgcggcccctgcccatcctgctggtgactggaggcggctacgccggctaccggcagtatgagaagtaccgggagcgggagctggagaagctgggcctggagatcccccccaagctggccggccactgggaggtggccctgtacaagtctgtgcccacccggctgctgagccgggcctggggccgcctgaaccaggtggagctgccccactggctgcggcggcctgtgtacagcctgtacatctggacctttggagtgaacatgaaggaggccgctgtggaggacctgcaccactacagaaacctgtctgagttcttccggaggaagctgaagccccaggcccggcctgtgtgtggcctgcacagcgtcatcagccccagtgatggccgcatcctgaactttggccaggtgaagaactgtgaggtggagcaggtgaagggcgtgacctacagcctggagagcttcctgggccccaggatgtgcacagaggacctgcccttccccccagctgccagctgtgacagcttcaagaaccagctggtgacccgggagggcaatgagctgtaccactgcgtcatctacctggcccctggggactaccactgcttccacagccccacagactggacagtgagccacagaagacacttccctggcagcctgatgtctgtgaaccctggcatggcccgctggatcaaggagctgttctgccacaatgaaagagtggtgctgaccggggactggaagcacggcttcttcagcctgacagctgtgggcgccaccaacgtgggcagcatccgcatctactttgaccgggacctgcacaccaacagccccaggcacagcaagggcagctacaatgacttctcctttgtgacccacaccaaccgggagggcgtgcccatgaggaaaggagagcacctgggggagttcaacctgggcagcaccatcgtgctgatctttgaggcccccaaggacttcaacttccagctgaagacaggccagaagatccgctttggagaggccctgggcagcctgtag

SEQ ID NO: 163869 - DNA, 246 bp, synthetic construct
  misc_feature 1..246: note = Description of Artificial Sequence: Synthetic coding sequence
  source 1..246: mol_type = other DNA
atgatgtgccagagcgaggcccggcagggccctgagctgcgggccgccaagtggctgcacttcccccagctggccctgcggcggcggctgggccagctgagctgcatgagcaggcctgccctgaagctgcgctcctggcccctgactgtgctgtactacctgctgccctttggagccctgcggcccctgagccgggtgggctggaggcctgtgtcccgggtggccctgtacaagtctgtgccctag

SEQ ID NO: 163870 - DNA, 981 bp, synthetic construct
  misc_feature 1..981: note = Description of Artificial Sequence: Synthetic coding sequence
  source 1..981: mol_type = other DNA
atgatgtgccagagcgaggcccggcagggccctgagctgcgggccgccaagtggctgcacttcccccagctggccctgcggcggcggctgggccagctgagctgcatgagcaggcctgccctgaagctgcgctcctggcccctgactgtgctgtactacctgctgccctttggagccctgcggcccctgagccgggtgggctggaggcctgtgtcccgggtggccctgtacaagtctgtgcccacccggctgctgagccgggcctggggccgcctgaaccaggtggagctgccccactggctgcggcggcctgtgtacagcctgtacatctggacctttggagtgaacatgaaggaggccgctgtggaggacctgcaccactacagaaacctgtctgagttcttccggaggaagctgaagccccaggcccggcctgtgtgtggcctgcacagcgtcatcagccccagtgatggccgcatcctgaactttggccaggtgaagaactgtgaggtggagcaggtgaagggcgtgacctacagcctggagagcttcctgggccccaggatgtgcacagaggacctgcccttccccccagctgccagctgtgacagcttcaagaaccagctggtgacccgggagggcaatgagctgtaccactgcgtcatctacctggcccctggggactaccactgcttccacagccccacagactggacagtgagccacagaagacacttccctggcagcctgatgtctgtgaaccctggcatggcccgctggatcaaggagctgttctgccacaatgaaagagtggtgctgaccggggactggaagcacggcttcttcagcctgacagctgtgggcgccaccaacgtgggcagcatccgcatctactttgaccgggacctgcacaccaacagccccaggcacagcaagggcagctacaatgacttctctgtggtgggcagcctgaccaggtag

SEQ ID NO: 163871 - DNA, 984 bp, synthetic construct
  misc_feature 1..984: note = Description of Artificial Sequence: Synthetic coding sequence
  source 1..984: mol_type = other DNA
atggagtatgctgtgaactgccacgtgatcacctgggagcgcatcatcagccactttgacatctttgccttcggccacttctggggctgggccatgaaggccctgctgatccgctcctatggcctgtgctggaccatcagcatcacctgggagctgacagagctgttcttcatgcacctgctgcccaactttgctgagtgctggtgggaccaggtgatcctggacatcctgctgtgcaatggaggcggcatctggctgggcatggtggtgtgccgcttcctggagatgaggacctaccactgggccagcttcaaggacatccacaccaccaccgggaagatcaagagagctgtgctgcagttcaccccagcctcctggacctacgtgcgctggtttgaccccaagagcagcttccagagggtggccggcgtgtacctgttcatgatcatctggcagctgacagagctgaacaccttcttcctgaagcacatctttgtgttccaggccagccaccccctgtcctggggccgcatcctcttcatcggcggcatcacagcccccaccgtgcggcagtactatgcctacctgacagacacccagtgcaagagggtgggcacccagtgctgggtgtttggagtcatcggcttcctggaggccatcgtgtgcatcaagtttggccaggacctcttcagcaagacccagatcctgtatgtggtgctgtggctgctgtgtgtggccttcaccaccttcctgtgcctgtatggcatgatctggtacgccgagcactacggccaccgggagaagacctacagtgaatgtgaagatggcacctacagccctgagatctcctggcaccacaggaagggcaccaagggcagcgaggacagcccccccaagcatgctggcaacaatgaaagccacagcagcagaagaagaaacagacacagcaagagcaaggtgaccaacggggtgggcaagaagtag

SEQ ID NO: 163872 - DNA, 1422 bp, synthetic construct
  misc_feature 1..1422: note = Description of Artificial Sequence: Synthetic coding sequence
  source 1..1422: mol_type = other DNA
atggccagctgtgtgggcagcaggaccctgagcaaggatgatgtgaactacaagatgcacttcaggatgatcaatgagcagcaggtggaggacatcaccatcgacttcttctaccggccccacaccatcaccctgctgtccttcaccatcgtgtccctgatgtactttgccttcaccagagatgattctgtgcctgaggacaacatctggaggggcatcctgagcgtcatcttcttcttcctgatcatctctgtgctggccttccccaacggccccttcacccggccccacccagccctgtggaggatggtgtttggcctgtctgtgctgtacttcctgttcctggtgttcctgctcttcctgaactttgagcaggtgaagagcctgatgtactggctggaccccaacctgcgctatgccacccgggaggctgatgtgatggagtatgctgtgaactgccacgtgatcacctgggagcgcatcatcagccactttgacatctttgccttcggccacttctggggctgggccatgaaggccctgctgatccgctcctatggcctgtgctggaccatcagcatcacctgggagctgacagagctgttcttcatgcacctgctgcccaactttgctgagtgctggtgggaccaggtgatcctggacatcctgctgtgcaatggaggcggcatctggctgggcatggtggtgtgccgcttcctggagatgaggacctaccactgggccagcttcaaggacatccacaccaccaccgggaagatcaagagagctgtgctgcagttcaccccagcctcctggacctacgtgcgctggtttgaccccaagagcagcttccagagggtggccggcgtgtacctgttcatgatcatctggcagctgacagagctgaacaccttcttcctgaagcacatctttgtgttccaggccagccaccccctgtcctggggccgcatcctcttcatcggcggcatcacagcccccaccgtgcggcagtactatgcctacctgacagacacccagtgcaagagggtgggcacccagtgctgggtgtttggagtcatcggcttcctggaggccatcgtgtgcatcaagtttggccaggacctcttcagcaagacccagatcctgtatgtggtgctgtggctgctgtgtgtggccttcaccaccttcctgtgcctgtatggcatgatctggtacgccgagcactacggccaccgggagaagacctacagtgaatgtgaagatggcacctacagccctgagatctcctggcaccacaggaagggcaccaagggcagcgaggacagcccccccaagcatgctggcaacaatgaaagccacagcagcagaagaagaaacagacacagcaagagcaaggtgaccaacggggtgggcaagaagtag

SEQ ID NO: 163873 - DNA, 1464 bp, synthetic construct
  misc_feature 1..1464: note = Description of Artificial Sequence: Synthetic coding sequence
  source 1..1464: mol_type = other DNA
atgagaagaggagagaggagagatgctgggggccccaggcctgagagccctgtgcctgctggccgggccagcctggaggagcccccagatggccccagcgctggccaggccaccggccctggagagggccgccgcagcacagaaagtgaggtgtatgatgatggcaccaacaccttcttctggagggcccacaccctgactgtgctcttcatcctgacctgcaccctgggctacgtgaccctgctggaggagaccccccaggacacagcctacaacaccaagaggggcatcgtggccagcatcctggtgttcctgtgctttggagtgacccaggccaaggatggccccttcagccggccccacccagcctactggaggttctggctgtgtgtgtctgtggtgtatgagctgttcctgatcttcatcctcttccagacagtgcaggacggccggcagttcctgaagtatgtggaccccaagctgggcgtgcccctgcctgagcgggactatggaggcaactgcctgatctatgaccctgacaatgaaacagaccccttccacaacatctgggacaagctggatggctttgtgcctgcccacttcctgggctggtacctgaagaccctgatgatccgggactggtggatgtgcatgatcatctctgtgatgtttgagttcctggagtacagcctggagcaccagctgcccaacttcagcgagtgctggtgggaccactggatcatggatgtgctggtgtgcaatggcctgggcatctactgcggcatgaagaccctggagtggctgagcctgaagacctacaagtggcagggcctgtggaacatccccacctacaagggcaagatgaagagaattgccttccagttcaccccctacagctgggtgcgctttgagtggaagccagccagcagcctgcggcgctggctggccgtgtgtggcatcatcctggtgttcctgctggccgagctgaacaccttctacctgaagtttgtgctgtggatgcctcctgagcactacctggtgctgctgcggctggtgttctttgtgaatgtgggcggcgtggccatgagggagatctatgacttcatggatgaccccaagccccacaagaagctgggcccccaggcctggctggtggccgccatcacagccacagagctgctgattgtggtgaagtatgacccccacaccctgaccctgagcctgcccttctacatcagccagtgctggaccctgggctctgtgctggccctgacctggacagtgtggaggttcttcctgcgggacatcaccctgcgctacaaggagacccgctggcagaagtggcagaacaaggatgaccagggcagcacagtgggcaatggagaccagcaccccctgggcctggatgaggacctgctgggccctggggtggccgagggggagggcgcccccacccccaactag

SEQ ID NO: 163874 - DNA, 2802 bp, synthetic construct
  misc_feature 1..2802: note = Description of Artificial Sequence: Synthetic coding sequence
  source 1..2802: mol_type = other DNA
atggccgccagccggctggactttggagaggtggagaccttcctggacagacaccctgagctgtttgaggactacctgatgaggaagggcaagcaggagatggtggagaagtggctgcagaggcacagccagggccagggcgccctgggcccccggcccagcctggccggcaccagcagcctggcccacagcacctgccggggcggcagctctgtgggcggcggcaccggccccaatggaagtgcccacagccagcccctgcccggcggcggggactgtggcggcgtgcccctgagccccagctgggccggcggcagcagaggagatggcaacctgcagaggcgggccagccagaaggagctgaggaagagctttgcccggagcaaggccatccacgtgaacagaacctatgatgagcaggtgaccagccgggcccaggagcccctgagctctgtgagaagaagagccctgctgaggaaggccagcagcctgccccccaccacagcccacatcctgagcgccctgctggagagccgggtgaacctgccccgctacccacccacagccatcgactacaagtgccacctgaagaagcacaatgaaaggcagttcttcctggagctggtgaaggacatcagcaatgacctggacctgaccagcctgagctacaagatcctgatctttgtgtgcctgatggtggatgctgaccgctgcagcctcttcctggtggagggcgctgctgctgggaagaagaccctggtgtccaagttctttgatgtgcacgccggcacccccctgctgccctgcagcagcacagagaacagcaatgaggtgcaggtgccctggggcaagggcatcatcggctacgtgggggagcacggggagaccgtgaacatcccagatgcctaccaggaccggcgcttcaatgatgaaattgacaagctgaccggctacaagaccaagagcctgctgtgcatgcccatccgcagcagtgatggagagatcatcggcgtggcccaggccatcaacaagatccctgagggcgcccccttcacagaagatgatgagaaggtgatgcagatgtacctgcccttctgtggcatcgccatcagcaatgcccagctgtttgctgccagcaggaaggagtatgaaagaagccgggccctgctggaggtggtgaatgacctgtttgaggagcagacagacctggagaagatcgtgaagaagatcatgcaccgggcccagaccctgctgaagtgtgagcgctgcagcgtgctgctgctggaggacatcgagagccctgtggtgaagttcaccaagagctttgagctgatgagccccaagtgcagcgcagatgctgagaacagcttcaaggagagcatggagaagagcagctacagcgactggctgatcaacaacagcattgctgagctggtggccagcacaggcctgcctgtgaacatcagtgatgcctaccaggaccccaggtttgatgctgaggccgaccagatcagcggcttccacatccgctctgtgctgtgtgtgcccatctggaacagcaaccaccagatcattggagtggcccaggtgctgaaccggctggatggcaagccctttgatgatgctgaccagaggctgtttgaggccttcgtcatcttctgtggcctgggcatcaacaacaccatcatgtatgaccaggtgaagaagtcctgggccaagcagagcgtggccctggatgtgctgagctaccacgccacctgcagcaaggccgaggtggacaagttcaaggccgccaacatccccctggtgtctgagctggccattgatgacatccactttgatgacttcagcctggatgtggatgccatgatcacagctgccctgaggatgttcatggagctgggcatggtgcagaagttcaagattgattatgagaccctgtgccgctggctgctgactgtgaggaagaactacaggatggtgctgtaccacaactggaggcatgccttcaacgtgtgccagctgatgtttgccatgctgaccacagctggcttccaggacatcctgacagaggtggagatcctggccgtcatcgtgggctgcctgtgccacgacctggaccaccggggcaccaacaatgccttccaggccaagagcggcagcgccctggcccagctgtatggcaccagcgccaccctggagcaccaccacttcaaccacgctgtgatgatcctgcagagcgagggccacaacatctttgccaacctgagcagcaaggagtacagcgacctgatgcagctgctgaagcagagcatcctggccacagacctgaccctgtactttgaaagaagaacagagttctttgagctggtgtccaaaggagaatatgactggaacatcaagaaccaccgggacatcttccgctccatgctgatgacagcctgtgacctgggcgctgtgaccaagccctgggagatcagccggcaggtggccgagctggtgaccagcgagttctttgagcagggcgaccgggagcggctggagctgaagctgacccccagcgccatctttgacaggaacaggaaggatgagctgccccggctgcagctggagtggattgacagcatctgcatgcccctgtaccaggccctggtgaaggtgaatgtgaagctgaagcccatgctggacagcgtggccaccaacagaagcaagtgggaggagctgcaccagaagaggctgctggccagcacagccagcagcagccctgcctctgtgatggtggccaaggaggacaggaactag

SEQ ID NO: 163875 - DNA, 2052 bp, synthetic construct
  misc_feature 1..2052: note = Description of Artificial Sequence: Synthetic coding sequence
  source 1..2052: mol_type = other DNA
atgctgaagcaggcccggcggcccctcttcagaaatgtgctgagcgccacccagtggaagaaggtgaagatcacccggctggtgcagatcagcggggccagcctggccgagaagcaggagaagcaccaggacttcctgatccagaggcagaccaagaccaaggaccggcgcttcaatgatgaaattgacaagctgaccggctacaagaccaagagcctgctgtgcatgcccatccgcagcagtgatggagagatcatcggcgtggcccaggccatcaacaagatccctgagggcgcccccttcacagaagatgatgagaaggtgatgcagatgtacctgcccttctgtggcatcgccatcagcaatgcccagctgtttgctgccagcaggaaggagtatgaaagaagccgggccctgctggaggtggtgaatgacctgtttgaggagcagacagacctggagaagatcgtgaagaagatcatgcaccgggcccagaccctgctgaagtgtgagcgctgcagcgtgctgctgctggaggacatcgagagccctgtggtgaagttcaccaagagctttgagctgatgagccccaagtgcagcgcagatgctgagaacagcttcaaggagagcatggagaagagcagctacagcgactggctgatcaacaacagcattgctgagctggtggccagcacaggcctgcctgtgaacatcagtgatgcctaccaggaccccaggtttgatgctgaggccgaccagatcagcggcttccacatccgctctgtgctgtgtgtgcccatctggaacagcaaccaccagatcattggagtggcccaggtgctgaaccggctggatggcaagccctttgatgatgctgaccagaggctgtttgaggccttcgtcatcttctgtggcctgggcatcaacaacaccatcatgtatgaccaggtgaagaagtcctgggccaagcagagcgtggccctggatgtgctgagctaccacgccacctgcagcaaggccgaggtggacaagttcaaggccgccaacatccccctggtgtctgagctggccattgatgacatccactttgatgacttcagcctggatgtggatgccatgatcacagctgccctgaggatgttcatggagctgggcatggtgcagaagttcaagattgattatgagaccctgtgccgctggctgctgactgtgaggaagaactacaggatggtgctgtaccacaactggaggcatgccttcaacgtgtgccagctgatgtttgccatgctgaccacagctggcttccaggacatcctgacagaggtggagatcctggccgtcatcgtgggctgcctgtgccacgacctggaccaccggggcaccaacaatgccttccaggccaagagcggcagcgccctggcccagctgtatggcaccagcgccaccctggagcaccaccacttcaaccacgctgtgatgatcctgcagagcgagggccacaacatctttgccaacctgagcagcaaggagtacagcgacctgatgcagctgctgaagcagagcatcctggccacagacctgaccctgtactttgaaagaagaacagagttctttgagctggtgtccaaaggagaatatgactggaacatcaagaaccaccgggacatcttccgctccatgctgatgacagcctgtgacctgggcgctgtgaccaagccctgggagatcagccggcaggtggccgagctggtgaccagcgagttctttgagcagggcgaccgggagcggctggagctgaagctgacccccagcgccatctttgacaggaacaggaaggatgagctgccccggctgcagctggagtggattgacagcatctgcatgcccctgtaccaggccctggtgaaggtgaatgtgaagctgaagcccatgctggacagcgtggccaccaacagaagcaagtgggaggagctgcaccagaagaggctgctggccagcacagccagcagcagccctgcctctgtgatggtggccaaggaggacaggaactag

SEQ ID NO: 163876 - DNA, 1470 bp, synthetic construct
  misc_feature 1..1470: note = Description of Artificial Sequence: Synthetic coding sequence
  source 1..1470: mol_type = other DNA
atgagccccaagtgcagcgcagatgctgagaacagcttcaaggagagcatggagaagagcagctacagcgactggctgatcaacaacagcattgctgagctggtggccagcacaggcctgcctgtgaacatcagtgatgcctaccaggaccccaggtttgatgctgaggccgaccagatcagcggcttccacatccgctctgtgctgtgtgtgcccatctggaacagcaaccaccagatcattggagtggcccaggtgctgaaccggctggatggcaagccctttgatgatgctgaccagaggctgtttgaggccttcgtcatcttctgtggcctgggcatcaacaacaccatcatgtatgaccaggtgaagaagtcctgggccaagcagagcgtggccctggatgtgctgagctaccacgccacctgcagcaaggccgaggtggacaagttcaaggccgccaacatccccctggtgtctgagctggccattgatgacatccactttgatgacttcagcctggatgtggatgccatgatcacagctgccctgaggatgttcatggagctgggcatggtgcagaagttcaagattgattatgagaccctgtgccgctggctgctgactgtgaggaagaactacaggatggtgctgtaccacaactggaggcatgccttcaacgtgtgccagctgatgtttgccatgctgaccacagctggcttccaggacatcctgacagaggtggagatcctggccgtcatcgtgggctgcctgtgccacgacctggaccaccggggcaccaacaatgccttccaggccaagagcggcagcgccctggcccagctgtatggcaccagcgccaccctggagcaccaccacttcaaccacgctgtgatgatcctgcagagcgagggccacaacatctttgccaacctgagcagcaaggagtacagcgacctgatgcagctgctgaagcagagcatcctggccacagacctgaccctgtactttgaaagaagaacagagttctttgagctggtgtccaaaggagaatatgactggaacatcaagaaccaccgggacatcttccgctccatgctgatgacagcctgtgacctgggcgctgtgaccaagccctgggagatcagccggcaggtggccgagctggtgaccagcgagttctttgagcagggcgaccgggagcggctggagctgaagctgacccccagcgccatctttgacaggaacaggaaggatgagctgccccggctgcagctggagtggattgacagcatctgcatgcccctgtaccaggccctggtgaaggtgaatgtgaagctgaagcccatgctggacagcgtggccaccaacagaagcaagtgggaggagctgcaccagaagaggctgctggccagcacagccagcagcagccctgcctctgtgatggtggccaaggaggacaggaactag

SEQ ID NO: 163877 - DNA, 1728 bp, synthetic construct
  misc_feature 1..1728: note = Description of Artificial Sequence: Synthetic coding sequence
  source 1..1728: mol_type = other DNA
atgcagatgtacctgcccttctgtggcatcgccatcagcaatgcccagctgtttgctgccagcaggaaggagtatgaaagaagccgggccctgctggaggtggtgaatgacctgtttgaggagcagacagacctggagaagatcgtgaagaagatcatgcaccgggcccagaccctgctgaagtgtgagcgctgcagcgtgctgctgctggaggacatcgagagccctgtggtgaagttcaccaagagctttgagctgatgagccccaagtgcagcgcagatgctgagaacagcttcaaggagagcatggagaagagcagctacagcgactggctgatcaacaacagcattgctgagctggtggccagcacaggcctgcctgtgaacatcagtgatgcctaccaggaccccaggtttgatgctgaggccgaccagatcagcggcttccacatccgctctgtgctgtgtgtgcccatctggaacagcaaccaccagatcattggagtggcccaggtgctgaaccggctggatggcaagccctttgatgatgctgaccagaggctgtttgaggccttcgtcatcttctgtggcctgggcatcaacaacaccatcatgtatgaccaggtgaagaagtcctgggccaagcagagcgtggccctggatgtgctgagctaccacgccacctgcagcaaggccgaggtggacaagttcaaggccgccaacatccccctggtgtctgagctggccattgatgacatccactttgatgacttcagcctggatgtggatgccatgatcacagctgccctgaggatgttcatggagctgggcatggtgcagaagttcaagattgattatgagaccctgtgccgctggctgctgactgtgaggaagaactacaggatggtgctgtaccacaactggaggcatgccttcaacgtgtgccagctgatgtttgccatgctgaccacagctggcttccaggacatcctgacagaggtggagatcctggccgtcatcgtgggctgcctgtgccacgacctggaccaccggggcaccaacaatgccttccaggccaagagcggcagcgccctggcccagctgtatggcaccagcgccaccctggagcaccaccacttcaaccacgctgtgatgatcctgcagagcgagggccacaacatctttgccaacctgagcagcaaggagtacagcgacctgatgcagctgctgaagcagagcatcctggccacagacctgaccctgtactttgaaagaagaacagagttctttgagctggtgtccaaaggagaatatgactggaacatcaagaaccaccgggacatcttccgctccatgctgatgacagcctgtgacctgggcgctgtgaccaagccctgggagatcagccggcaggtggccgagctggtgaccagcgagttctttgagcagggcgaccgggagcggctggagctgaagctgacccccagcgccatctttgacaggaacaggaaggatgagctgccccggctgcagctggagtggattgacagcatctgcatgcccctgtaccaggccctggtgaaggtgaatgtgaagctgaagcccatgctggacagcgtggccaccaacagaagcaagtgggaggagctgcaccagaagaggctgctggccagcacagccagcagcagccctgcctctgtgatggtggccaaggaggacaggaactag

SEQ ID NO: 163878 - DNA, 393 bp, synthetic construct
  misc_feature 1..393: note = Description of Artificial Sequence: Synthetic coding sequence
  source 1..393: mol_type = other DNA
atgcccatccgcagcagtgatggagagatcattggagtggcccaggccatcaacaagatccctgagggcgcccccttcacagaagatgatgagaaggtgatgcagatgtacctgcccttctgtggcatcgccatcagcaatgcccagctgtttgctgccagcaggaaggagtatgaaagaagccgggccctgctggaggtggtgaatgacctgtttgaggagcagacagacctggagaagatcgtgaagaagatcatgcaccgggcccagaccctgctgaagtgtgagcgctgcagcgtgctgctgctggaggacatcgagagccctgtggtgaagttcaccaagagctttgagctgatgagccccaagtgcagcgcagatgctgaaaattag

SEQ ID NO: 163879 - DNA, 1728 bp, synthetic construct; identical to SEQ ID NO: 163877
  misc_feature 1..1728: note = Description of Artificial Sequence: Synthetic coding sequence
  source 1..1728: mol_type = other DNA

SEQ ID NO: 163880 - DNA, 375 bp, synthetic construct
  misc_feature 1..375: note = Description of Artificial Sequence: Synthetic coding sequence
  source 1..375: mol_type = other DNA
atgctgatgacagcctgtgacctgggcgctgtgaccaagccctgggagatcagccggcaggtggccgagctggtgaccagcgagttctttgagcagggcgaccgggagcggctggagctgaagctgaccccatctgccatctttgacaggaacaggaaggatgagctgccccggctgcagctggagtggattgacagcatctgcatgcccctgtaccaggccctggtgaaggtgaatgtgaagctgaagcccatgctggacagcgtggccaccaacagaagcaagtgggaggagctgcaccagaagaggctgctggccagcacagccagcagcagccctgcctctgtgatggtggccaaggaggacagaaattag

SEQ ID NO: 163881 - DNA, 1638 bp, synthetic construct
  misc_feature 1..1638: note = Description of Artificial Sequence: Synthetic coding sequence
  source 1..1638: mol_type = other DNA
atgggcagcagcgccacagaaattgaggagctggagaacaccaccttcaagtacctgaccggggagcagacagagaagatgtggcagaggctgaagggcatcctgcgctgcctggtgaagcagctggagagaggagatgtgaatgtggtggacctgaagaagaacatcgagtatgctgcctctgtgctggaggccgtgtacattgatgagacccggcggctgctggacacagaagatgagctgagtgacatccagacagacagcgtgcccagcgaggtgcgggactggctggccagcaccttcaccaggaagatgggcatgaccaagaagaagccagaggagaagcccaagttccgcagcatcgtgcatgctgtgcaggccggcatctttgtggagaggatgtacaggaagacctaccacatggtgggcctggcctacccagctgctgtgattgtgaccctgaaggatgtggacaagtggagctttgatgtgtttgccctgaatgaggccagcggggagcacagcctgaagttcatgatctatgagctgttcaccaggtatgacctgatcaaccgcttcaagatccctgtgtcctgcctgatcacctttgctgaggccctggaggtgggctacagcaagtacaagaacccctaccacaacctgattcatgctgctgatgtgacccagacagtgcactacatcatgctgcacacaggcatcatgcactggctgacagagctggagatcctggccatggtgtttgctgctgccatccatgactatgagcacacaggcaccaccaacaacttccacatccagaccaggagtgatgtggccatcctgtacaatgacagatctgtgctggagaaccaccacgtgtctgctgcctaccgcctgatgcaggaggaggagatgaacatcctgatcaacctgagcaaggatgactggagggacctgaggaacctggtgattgagatggtgctgagcacagacatgagcggccacttccagcagatcaagaacatccggaacagcctgcagcagcctgagggcatcgaccgggccaagaccatgagcctcatcctgcacgccgctgacatcagccacccagccaagtcctggaagctgcactaccgctggaccatggccctgatggaggagttcttcctgcagggcgacaaggaggccgagctgggcctgcccttcagccccctgtgtgacaggaagagcaccatggtggcccagagccagatcggcttcatcgacttcatcgtggagcccaccttcagcctgctgacagacagcacagagaagatcgtcatccccctcatcgaggaggccagcaaggccgagaccagcagctatgtggccagcagcagcaccaccatcgtgggcctgcacatcgcagatgccctgcggcgcagcaacaccaagggctccatgtctgatggcagctacagcccagactacagcctggccgctgtggacctgaagagcttcaagaacaacctggtggacatcatccagcagaacaaggagcgctggaaggagctggccgcccagggcgagagtgacctgcacaagaacagcgaggacctggtgaatgctgaggagaagcatgatgagacccacagctag

SEQ ID NO: 163882 - DNA, 1536 bp, synthetic construct
  misc_feature 1..1536: note = Description of Artificial Sequence: Synthetic coding sequence
  source 1..1536: mol_type = other DNA
atgggcaagaagatcaacaagctgttctgcttcaacttcctggtgcagtgcttccggggcaagagcaagcccagcaagtgccagatcaggaagaaggtgaagaaccacatcgagcggctgctggacacagaagatgagctgagtgacatccagacagacagcgtgcccagcgaggtgcgggactggctggccagcaccttcaccaggaagatgggcatgaccaagaagaagccagaggagaagcccaagttccgcagcatcgtgcatgctgtgcaggccggcatctttgtggagaggatgtacaggaagacctaccacatggtgggcctggcctacccagctgctgtgattgtgaccctgaaggatgtggacaagtggagctttgatgtgtttgccctgaatgaggccagcggggagcacagcctgaagttcatgatctatgagctgttcaccaggtatgacctgatcaaccgcttcaagatccctgtgtcctgcctgatcacctttgctgaggccctggaggtgggctacagcaagtacaagaacccctaccacaacctgattcatgctgctgatgtgacccagacagtgcactacatcatgctgcacacaggcatcatgcactggctgacagagctggagatcctggccatggtgtttgctgctgccatccatgactatgagcacacaggcaccaccaacaacttccacatccagaccaggagtgatgtggccatcctgtacaatgacagatctgtgctggagaaccaccacgtgtctgctgcctaccgcctgatgcaggaggaggagatgaacatcctgatcaacctgagcaaggatgactggagggacctgaggaacctggtgattgagatggtgctgagcacagacatgagcggccacttccagcagatcaagaacatccggaacagcctgcagcagcctgagggcatcgaccgggccaagaccatgagcctcatcctgcacgccgctgacatcagccacccagccaagtcctggaagctgcactaccgctggaccatggccctgatggaggagttcttcctgcagggcgacaaggaggccgagctgggcctgcccttcagccccctgtgtgacaggaagagcaccatggtggcccagagccagatcggcttcatcgacttcatcgtggagcccaccttcagcctgctgacagacagcacagagaagatcgtcatccccctcatcgaggaggccagcaaggccgagaccagcagctatgtggccagcagcagcaccaccatcgtgggcctgcacatcgcagatgccctgcggcgcagcaacaccaagggctccatgtctgatggcagctacagcccagactacagcctggccgctgtggacctgaagagcttcaagaacaacctggtggacatcatccagcagaacaaggagcgctggaaggagctggccgcccagggcgagagtgacctgcacaagaacagcgaggacctggtgaatgctgaggagaagcatgatgagacccacagctag

SEQ ID NO: 163883 - DNA, 1560 bp, synthetic construct
  misc_feature 1..1560: note = Description of Artificial Sequence: Synthetic coding sequence
  source 1..1560: mol_type = other DNA
atggatgaccacgtgaccatcaggaagaagcacctgcagaggcccatcttccggctgcgctgcctggtgaagcagctggagagaggagatgtgaatgtggtggacctgaagaagaacatcgagtatgctgcctctgtgctggaggccgtgtacattgatgagacccggcggctgctggacacagaagatgagctgagtgacatccagacagacagcgtgcccagcgaggtgcgggactggctggccagcaccttcaccaggaagatgggcatgaccaagaagaagccagaggagaagcccaagttccgcagcatcgtgcatgctgtgcaggccggcatctttgtggagaggatgtacaggaagacctaccacatggtgggcctggcctacccagctgctgtgattgtgaccctgaaggatgtggacaagtggagctttgatgtgtttgccctgaatgaggccagcggggagcacagcctgaagttcatgatctatgagctgttcaccaggtatgacctgatcaaccgcttcaagatccctgtgtcctgcctgatcacctttgctgaggccctggaggtgggctacagcaagtacaagaacccctaccacaacctgattcatgctgctgatgtgacccagacagtgcactacatcatgctgcacacaggcatcatgcactggctgacagagctggagatcctggccatggtgtttgctgctgccatccatgactatgagcacacaggcaccaccaacaacttccacatccagaccaggagtgatgtggccatcctgtacaatgacagatctgtgctggagaaccaccacgtgtctgctgcctaccgcctgatgcaggaggaggagatgaacatcctgatcaacctgagcaaggatgactggagggacctgaggaacctggtgattgagatggtgctgagcacagacatgagcggccacttccagcagatcaagaacatccggaacagcctgcagcagcctgagggcatcgaccgggccaagaccatgagcctcatcctgcacgccgctgacatcagccacccagccaagtcctggaagctgcactaccgctggaccatggccctgatggaggagttcttcctgcagggcgacaaggaggccgagctgggcctgcccttcagccccctgtgtgacaggaagagcaccatggtggcccagagccagatcggcttcatcgacttcatcgtggagcccaccttcagcctgctgacagacagcacagagaagatcgtcatccccctcatcgaggaggccagcaaggccgagaccagcagctatgtggccagcagcagcaccaccatcgtgggcctgcacatcgcagatgccctgcggcgcagcaacaccaagggctccatgtctgatggcagctacagcccagactacagcctggccgctgtggacctgaagagcttcaagaacaacctggtggacatcatccagcagaacaaggagcgctggaaggagctggccgcccaggaggcccggaccagcagccagaagtgtgagttcatccaccagtag

SEQ ID NO: 163884 - DNA, 1608 bp, synthetic construct
  misc_feature 1..1608: note = Description of Artificial Sequence: Synthetic coding sequence
  source 1..1608: mol_type = other DNA
atgggcagcagcgccacagaaattgaggagctggagaacaccaccttcaagtacctgaccggggagcagacagagaagatgtggcagaggctgaagggcatcctgcgctgcctggtgaagcagctggagagaggagatgtgaatgtggtggacctgaagaagaacatcgagtatgctgcctctgtgctggaggccgtgtacattgatgagacccggcggctgctggacacagaagatgagctgagtgacatccagacagacagcgtgcccagcgaggtgcgggactggctggccagcaccttcaccaggaagatgggcatgaccaagaagaagccagaggagaagcccaagttccgcagcatcgtgcatgctgtgcaggccggcatctttgtggagaggatgtacaggaagacctaccacatggtgggcctggcctacccagctgctgtgattgtgaccctgaaggatgtggacaagtggagctttgatgtgtttgccctgaatgaggccagcggggagcacagcctgaagttcatgatctatgagctgttcaccaggtatgacctgatcaaccgcttcaagatccctgtgtcctgcctgatcacctttgctgaggccctggaggtgggctacagcaagtacaagaacccctaccacaacctgattcatgctgctgatgtgacccagacagtgcactacatcatgctgcacacaggcatcatgcactggctgacagagctggagatcctggccatggtgtttgctgctgccatccatgactatgagcacacaggcaccaccaacaacttccacatccagaccaggagtgatgtggccatcctgtacaatgacagatctgtgctggagaaccaccacgtgtctgctgcctaccgcctgatgcaggaggaggagatgaacatcctgatcaacctgagcaaggatgactggagggacctgaggaacctggtgattgagatggtgctgagcacagacatgagcggccacttccagcagatcaagaacatccggaacagcctgcagcagcctgagggcatcgaccgggccaagaccatgagcctcatcctgcacgccgctgacatcagccacccagccaagtcctggaagctgcactaccgctggaccatggccctgatggaggagttcttcctgcagggcgacaaggaggccgagctgggcctgcccttcagccccctgtgtgacaggaagagcaccatggtggcccagagccagatcggcttcatcgacttcatcgtggagcccaccttcagcctgctgacagacagcacagagaagatcgtcatccccctcatcgaggaggccagcaaggccgagaccagcagctatgtggccagcagcagcaccaccatcgtgggcctgcacatcgcagatgccctgcggcgcagcaacaccaagggctccatgtctgatggcagctacagcccagactacagcctggccgctgtggacctgaagagcttcaagaacaacctggtggacatcatccagcagaacaaggagcgctggaaggagctggccgcccaggaggcccggaccagcagccagaagtgtgagttcatccaccagtag

SEQ ID NO: 163885 - DNA, 1590 bp, synthetic construct
  misc_feature 1..1590: note = Description of Artificial Sequence: Synthetic coding sequence
  source 1..1590: mol_type = other DNA
atggatgaccacgtgaccatcaggaagaagcacctgcagaggcccatcttccggctgcgctgcctggtgaagcagctggagagaggagatgtgaatgtggtggacctgaagaagaacatcgagtatgctgcctctgtgctggaggccgtgtacattgatgagacccggcggctgctggacacagaagatgagctgagtgacatccagacagacagcgtgcccagcgaggtgcgggactggctggccagcaccttcaccaggaagatgggcatgaccaagaagaagccagaggagaagcccaagttccgcagcatcgtgcatgctgtgcaggccggcatctttgtggagaggatgtacaggaagacctaccacatggtgggcctggcctacccagctgctgtgattgtgaccctgaaggatgtggacaagtggagctttgatgtgtttgccctgaatgaggccagcggggagcacagcctgaagttcatgatctatgagctgttcaccaggtatgacctgatcaaccgcttcaagatccctgtgtcctgcctgatcacctttgctgaggccctggaggtgggctacagcaagtacaagaacccctaccacaacctgattcatgctgctgatgtgacccagacagtgcactacatcatgctgcacacaggcatcatgcactggctgacagagctggagatcctggccatggtgtttgctgctgccatccatgactatgagcacacaggcaccaccaacaacttccacatccagaccaggagtgatgtggccatcctgtacaatgacagatctgtgctggagaaccaccacgtgtctgctgcctaccgcctgatgcaggaggaggagatgaacatcctgatcaacctgagcaaggatgactggagggacctgaggaacctggtgattgagatggtgctgagcacagacatgagcggccacttccagcagatcaagaacatccggaacagcctgcagcagcctgagggcatcgaccgggccaagaccatgagcctcatcctgcacgccgctgacatcagccacccagccaagtcctggaagctgcactaccgctggaccatggccctgatggaggagttcttcctgcagggcgacaaggaggccgagctgggcctgcccttcagccccctgtgtgacaggaagagcaccatggtggcccagagccagatcggcttcatcgacttcatcgtggagcccaccttcagcctgctgacagacagcacagagaagatcgtcatccccctcatcgaggaggccagcaaggccgagaccagcagctatgtggccagcagcagcaccaccatcgtgggcctgcacatcgcagatgccctgcggcgcagcaacaccaagggctccatgtctgatggcagctacagcccagactacagcctggccgctgtggacctgaagagcttcaagaacaacctggtggacatcatccagcagaacaaggagcgctggaaggagctggccgcccagggcgagagtgacctgcacaagaacagcgaggacctggtgaatgctgaggagaagcatgatgagacccacagctag

SEQ ID NO: 163886 - DNA, 1608 bp, synthetic construct; identical to SEQ ID NO: 163884
  misc_feature 1..1608: note = Description of Artificial Sequence: Synthetic coding sequence
  source 1..1608: mol_type = other DNA

SEQ ID NO: 163887 - DNA, 1638 bp, synthetic construct; identical to SEQ ID NO: 163881
  misc_feature 1..1638: note = Description of Artificial Sequence: Synthetic coding sequence
  source 1..1638: mol_type = other DNA

SEQ ID NO: 163888 - DNA, 1659 bp, synthetic construct
  misc_feature 1..1659: note = Description of Artificial Sequence: Synthetic coding sequence
  source 1..1659: mol_type = other DNA
atgggcagcagcgccacagaaattgaggagctggagaacaccaccttcaagtacctgaccggggagcagacagagaagatgtggcagaggctgaagggcatcctgcgctgcctggtgaagcagctggagagaggagatgtgaatgtggtggacctgaagaagaacatcgagtatgctgcctctgtgctggaggccgtgtacattgatgagacccggcggctgctggacacagaagatgagctgagtgacatccagacagacagcgtgcccagcgaggtgcgggactggctggccagcaccttcaccaggaagatgggcatgaccaagaagaagccagaggagaagcccaagttccgcagcatcgtgcatgctgtgcaggccggcatctttgtggagaggatgtacaggaagacctaccacatggtgggcctggcctacccagctgctgtgattgtgaccctgaaggatgtggacaagtggagctttgatgtgtttgccctgaatgaggccagcggggagcacagcctgaagttcatgatctatgagctgttcaccaggtatgacctgatcaaccgcttcaagatccctgtgtcctgcctgatcacctttgctgaggccctggaggtgggctacagcaagtacaagaacccctaccacaacctgattcatgctgctgatgtgacccagacagtgcactacatcatgctgcacacaggcatcatgcactggctgacagagctggagatcctggccatggtgtttgctgctgccatccatgactatgagcacacaggcaccaccaacaacttccacatccagaccaggagtgatgtggccatcctgtacaatgacagatctgtgctggagaaccaccacgtgtctgctgcctaccgcctgatgcaggaggaggagatgaacatcctgatcaacctgagcaaggatgactggagggacctgaggaacctggtgattgagatggtgctgagcacagacatgagcggccacttccagcagatcaagaacatccggaacagcctgcagcagcctgagggcatcgaccgggccaagaccatgagcctcatcctgcacgccgctgacatcagccacccagccaagtcctggaagctgcactaccgctggaccatggccctgatggaggagttcttcctgcagggcgacaaggaggccgagctgggcctgcccttcagccccctgtgtgacaggaagagcaccatggtggcccagagccagatcggcttcatcgacttcatcgtggagcccaccttcagcctgctgacagacagcacagagaagatcgtcatccccctcatcgaggaggccagcaaggccgagaccagcagctatgtggccagcagcagcaccaccatcgtgggcctgcacatcgcagatgccctgcggcgcagcaacaccaagggctccatgtctgatggcagctacagcccagactacagcctggccgctgtggacctgaagagcttcaagaacaacctggtggacatcatccagcagaacaaggagcgctggaaggagctggccgcccagggctctgtggtgtatgaggccctgctgcccagcctgagcgtcttcaccagccccctgcgggtgtggatcaccagcagccgcttcctgctgctgtag

SEQ ID NO: 163889 - DNA, 1326 bp, synthetic construct
  misc_feature 1..1326: note = Description of Artificial Sequence: Synthetic coding sequence
  source 1..1326: mol_type = other DNA
atgggcatgaccaagaagaagccagaggagaagcccaagttccgcagcatcgtgcatgctgtgcaggccggcatctttgtggagaggatgtacaggaagacctaccacatggtgggcctggcctacccagctgctgtgattgtgaccctgaaggatgtggacaagtggagctttgatgtgtttgccctgaatgaggccagcggggagcacagcctgaagttcatgatctatgagctgttcaccaggtatgacctgatcaaccgcttcaagatccctgtgtcctgcctgatcacctttgctgaggccctggaggtgggctacagcaagtacaagaacccctaccacaacctgattcatgctgctgatgtgacccagacagtgcactacatcatgctgcacacaggcatcatgcactggctgacagagctggagatcctggccatggtgtttgctgctgccatccatgactatgagcacacaggcaccaccaacaacttccacatccagaccaggagtgatgtggccatcctgtacaatgacagatctgtgctggagaaccaccacgtgtctgctgcctaccgcctgatgcaggaggaggagatgaacatcctgatcaacctgagcaaggatgactggagggacctgaggaacctggtgattgagatggtgctgagcacagacatgagcggccacttccagcagatcaagaacatccggaacagcctgcagcagcctgagggcatcgaccgggccaagaccatgagcctcatcctgcacgccgctgacatcagccacccagccaagtcctggaagctgcactaccgctggaccatggccctgatggaggagttcttcctgcagggcgacaaggaggccgagctgggcctgcccttcagccccctgtgtgacaggaagagcaccatggtggcccagagccagatcggcttcatcgacttcatcgtggagcccaccttcagcctgctgacagacagcacagagaagatcgtcatccccctcatcgaggaggccagcaaggccgagaccagcagctatgtggccagcagcagcaccaccatcgtgggcctgcacatcgcagatgccctgcggcgcagcaacaccaagggctccatgtctgatggcagctacagcccagactacagcctggccgctgtggacctgaagagcttcaagaacaacctggtggacatcatccagcagaacaaggagcgctggaaggagctggccgcccagggcgagagtgacctgcacaagaacagcgaggacctggtgaatgctgaggagaagcatgatgagacccacagctag

SEQ ID NO: 163890 - DNA, 1611 bp, synthetic construct
  misc_feature 1..1611: note = Description of Artificial Sequence: Synthetic coding sequence
  source 1..1611: mol_type = other DNA
atggagctgagccccaggagccccccagagatgctggaggagagtgactgccccagccccctggagctgaagagcgcccccagcaagaagatgtggatcaagctgcggagcctgctgcgctacatggtgaagcagctggagaatggagagatcaacatcgaggagctgaagaagaacctggagtacacagccagcctgctggaggccgtgtacattgatgagacccggcagatcctggacacagaagatgagctgcaggagctgcggagtgatgctgtgcccagcgaggtgcgggactggctggccagcaccttcacccagcaggcccgggccaagggccggcgggcagaggagaagcccaagttccgcagcatcgtgcatgctgtgcaggccggcatctttgtggagaggatgttccggaggacctacacctctgtgggccccacctacagcacagctgtgctgaactgcctgaagaacctggacctgtggtgctttgatgtgttcagcctgaaccaggccgcagatgaccacgccctgcggaccatcgtgtttgagctgctgaccaggcacaacctgatcagccgcttcaagatccccaccgtcttcctgatgtccttcctggatgccctggagaccggctacggcaagtacaagaacccctaccacaaccagatccacgccgcagatgtgacccagacagtgcactgcttcctgctgaggacaggcatggtgcactgcctgtctgaaattgagctgctggccatcatctttgctgctgccatccatgactatgagcacacaggcaccaccaacagcttccacatccagaccaagtcagaatgtgccatcgtgtacaatgacagatctgtgctggagaaccaccacatcagctctgtgttccggctgatgcaggatgatgagatgaacatcttcatcaacctgaccaaggatgaatttgtggagctgcgggccctggtgattgagatggtgctggccacagacatgagctgccacttccagcaggtgaagaccatgaagacagccctgcagcagctggagagaattgacaagcccaaggccctgagcctgctgctgcacgccgctgacatcagccaccccaccaagcagtggctggtgcacagccgctggaccaaggccctgatggaggagttcttccggcagggcgacaaggaggccgagctgggcctgcccttcagccccctgtgtgacaggaccagcaccctggtggcccagagccagatcggcttcatcgacttcatcgtggagcccaccttctctgtgctgacagatgtggccgagaagtctgtgcagcccctggctgatgaggacagcaagagcaagaaccagcccagcttccagtggaggcagcccagcctggatgtggaggtgggggaccccaacccagatgtggtgtccttccgcagcacctgggtgaagaggatccaggagaacaagcagaagtggaaggagcgggccgccagcggcatcaccaaccagatgagcattgatgagctgagcccctgtgaggaggaggccccacccagccctgcagaagatgagcacaaccagaatggaaacctggactag

SEQ ID NO: 163891 - DNA, 1488 bp, synthetic construct
  misc_feature 1..1488: note = Description of Artificial Sequence: Synthetic coding sequence
  source 1..1488: mol_type = other DNA
atggtgaagcagctggagaatggagagatcaacatcgaggagctgaagaagaacctggagtacacagccagcctgctggaggccgtgtacattgatgagacccggcagatcctggacacagaagatgagctgcaggagctgcggagtgatgctgtgcccagcgaggtgcgggactggctggccagcaccttcacccagcaggcccgggccaagggcagaagagctgaggagaagcccaagttccgcagcatcgtgcatgctgtgcaggccggcatctttgtggagaggatgttccggaggacctacacctctgtgggccccacctacagcacagctgtgctgaactgcctgaagaacctggacctgtggtgctttgatgtgttcagcctgaaccaggccgcagatgaccacgccctgcggaccatcgtgtttgagctgctgaccaggcacaacctgatcagccgcttcaagatccccaccgtcttcctgatgtccttcctggatgccctggagaccggctacggcaagtacaagaacccctaccacaaccagatccatgctgctgatgtgacccagacagtgcactgcttcctgctgaggacaggcatggtgcactgcctgtctgaaattgagctgctggccatcatctttgctgctgccatccatgactatgagcacacaggcaccaccaacagcttccacatccagaccaagtcagaatgtgccatcgtgtacaatgacagatctgtgctggagaaccaccacatcagcagcgtcttccggctgatgcaggatgatgagatgaacatcttcatcaacctgaccaaggatgaatttgtggagctgcgggccctggtgattgagatggtgctggccacagacatgagctgccacttccagcaggtgaagaccatgaagacagccctgcagcagctggagagaattgacaagcccaaggccctgagcctgctgctgcatgctgctgacatcagccaccccaccaagcagtggctggtgcacagccgctggaccaaggccctgatggaggagttcttccggcagggcgacaaggaggccgagctgggcctgcccttcagccccctgtgtgacaggaccagcaccctggtggcccagagccagatcggcttcatcgacttcatcgtggagcccaccttctctgtgctgacagatgtggccgagaagtctgtgcagcccctggctgatgaggacagcaagagcaagaaccagcccagcttccagtggaggcagcccagcctggatgtggaggtgggggaccccaacccagatgtggtgtccttccgcagcacctgggtgaagaggatccaggagaacaagcagaagtggaaggagagagctgccagcggcatcaccaaccagatgagcattgatgagctgagcccctgtgaggaggaggccccacccagccctgcagaagatgagcacaaccagaatggaaacctggactag

SEQ ID NO: 163892 - DNA, 1551 bp, synthetic construct
  misc_feature 1..1551: note = Description of Artificial Sequence: Synthetic coding sequence
  source 1..1551: mol_type = other DNA
atggccaaccctgtgcctgtgcagaggagccacctgcagggccccatcctgcggctgcgctacatggtgaagcagctggagaatggagagatcaacatcgaggagctgaagaagaacctggagtacacagccagcctgctggaggccgtgtacattgatgagacccggcagatcctggacacagaagatgagctgcaggagctgcggagtgatgctgtgcccagcgaggtgcgggactggctggccagcaccttcacccagcaggcccgggccaagggccggcgggcagaggagaagcccaagttccgcagcatcgtgcatgctgtgcaggccggcatctttgtggagaggatgttccggaggacctacacctctgtgggccccacctacagcacagctgtgctgaactgcctgaagaacctggacctgtggtgctttgatgtgttcagcctgaaccaggccgcagatgaccacgccctgcggaccatcgtgtttgagctgctgaccaggcacaacctgatcagccgcttcaagatccccaccgtcttcctgatgtccttcctggatgccctggagaccggctacggcaagtacaagaacccctaccacaaccagatccacgccgcagatgtgacccagacagtgcactgcttcctgctgaggacaggcatggtgcactgcctgtctgaaattgagctgctggccatcatctttgctgctgccatccatgactatgagcacacaggcaccaccaacagcttccacatccagaccaagtcagaatgtgccatcgtgtacaatgacagatctgtgctggagaaccaccacatcagctctgtgttccggctgatgcaggatgatgagatgaacatcttcatcaacctgaccaaggatgaatttgtggagctgcgggccctggtgattgagatggtgctggccacagacatgagctgccacttccagcaggtgaagaccatgaagacagccctgcagcagctggagagaattgacaagcccaaggccctgagcctgctgctgcacgccgctgacatcagccaccccaccaagcagtggctggtgcacagccgctggaccaaggccctgatggaggagttcttccggcagggcgacaaggaggccgagctgggcctgcccttcagccccctgtgtgacaggaccagcaccctggtggcccagagccagatcggcttcatcgacttcatcgtggagcccaccttctctgtgctgacagatgtggccgagaagtctgtgcagcccctggctgatgaggacagcaagagcaagaaccagcccagcttccagtggaggcagcccagcctggatgtggaggtgggggaccccaacccagatgtggtgtccttccgcagcacctgggtgaagaggatccaggagaacaagcagaagtggaaggagcgggccgccagcggcatcaccaaccagatgagcattgatgagctgagcccctgtgaggaggaggccccacccagccctgcagaagatgagcacaaccagaatggaaacctggactag

SEQ ID NO: 163893 - DNA, 2310 bp, synthetic construct
  misc_feature 1..2310: note = Description of Artificial Sequence: Synthetic coding sequence
  source 1..2310: mol_type = other DNA
atgacagatgctggcaacaggaaggagggcttcaagaagtgccgcagcgccaccttcagcattgatggctacagcttcaccatcgtggccaatgaagctggggacaagaatgcccggcccctggcccgcttcagccgcagcaagagccagaactgcctgtggaacagcctgattgatggcctgactggaaatgtgaaggagaagccccggcccaccatcgtgcatgaccccaggcctcctgaggagatcctggctgatgagctgccccagctggacagcagcgaggtgctggtgaagaccagcttccggctgcggagcctggtgaagcagctggagcggggggaggcctctgtggtggacctgaagaagaacctggagtatgctgccaccgtgctggagagcgtgtacattgatgagacccggcggctgctggacacagaagatgagctgagtgacatccagagtgatgctgtgcccagcgaggtgcgggactggctggccagcaccttcacccggcagatgggcatgatgctgcggcggagtgatgagaagccccgcttcaagagcatcgtgcatgctgtgcaggccggcatctttgtggagaggatgtacagaaggaccagcaacatggtgggcctgagctaccccccagctgtgattgaggccctgaaggatgtggacaagtggagctttgatgtgttcagcctgaatgaggccagcggggaccacgccctgaagttcatcttctatgagctgctgaccaggtatgacctgatcagccgcttcaagatccccatcagcgccctggtgtcctttgtggaggccctggaggtgggctacagcaagcacaagaacccctaccacaacctgatgcatgctgctgatgtgacccagacagtgcactacctgctgtacaagacaggagtggccaactggctgacagagctggagatctttgccatcatcttctctgctgccatccatgactatgagcacacaggcaccaccaacaacttccacatccagaccaggagtgaccctgccatcctgtacaatgacagatctgtgctggagaaccaccacctgtctgctgcctaccgcctgctgcaggatgatgaggagatgaacatcctgatcaacctgagcaaggatgactggagggagttccgcaccctggtgattgagatggtgatggccacagacatgagctgccacttccagcagatcaaggccatgaagacagccctgcagcagcctgaggccatcgagaagcccaaggccctgagcctgatgctgcacacagctgacatcagccacccagccaaggcctgggacctgcaccaccgctggaccatgagcctgctggaggagttcttccggcagggcgaccgggaggccgagctgggcctgcccttcagccccctgtgtgacaggaagagcaccatggtggcccagagccaggtgggcttcatcgacttcatcgtggagcccaccttcaccgtgctgacagacatgacagagaagatcgtgagccccctgattgatgagaccagccagacaggaggcaccggccagaggaggagcagcctgaacagcatcagcagcagtgatgccaagaggtctggagtgaagaccagcggcagcgagggcagcgcccccatcaacaacagcgtcatctctgtggactacaagagcttcaaggccacctggacagaggtggtgcacatcaaccgggagcgctggagggccaaggtgcccaaggaggagaaggccaagaaggaggccgaggagaaggcccggctggccgctgaggagcagcagaaggagatggaggccaagagccaggccgaggagggcgccagcggcaaggccgagaagaagaccagcggggagaccaagaaccaggtgaatggcacccgggccaacaagagtgacaacccccggggcaagaacagcaaggccgagaagagcagcggggagcagcagcagaatggagacttcaaggatggcaagaacaagacagacaagaaggaccacagcaacattggaaatgacagcaagaagacagatggcaccaagcagaggagccacggcagccctgcccccagcaccagcagcacctgccgcctgaccctgcctgtgatcaagccacccctgcggcacttcaagaggcctgcctatgccagcagcagctatgcccccagcgtgtccaagaagacagatgagcacccagcccgctacaagatgctggaccagaggatcaagatgaagaagatccagaacatcagccacaactggaacaggaagtag

SEQ ID NO: 163894 - DNA, 2130 bp, synthetic construct
  misc_feature 1..2130: note = Description of Artificial Sequence: Synthetic coding sequence
  source 1..2130: mol_type = other DNA
atggagagccccaccaaggagattgaggagtttgagagcaacagcctgaagtacctgcagcctgagcagatcgagaagatctggctgcggctgcggggcctgaggaagtacaagaagaccagccagaggctgcggagcctggtgaagcagctggagcggggggaggcctctgtggtggacctgaagaagaacctggagtatgctgccaccgtgctggagagcgtgtacattgatgagacccggcggctgctggacacagaagatgagctgagtgacatccagagtgatgctgtgcccagcgaggtgcgggactggctggccagcaccttcacccggcagatgggcatgatgctgcggcggagtgatgagaagccccgcttcaagagcatcgtgcatgctgtgcaggccggcatctttgtggagaggatgtacagaaggaccagcaacatggtgggcctgagctaccccccagctgtgattgaggccctgaaggatgtggacaagtggagctttgatgtgttcagcctgaatgaggccagcggggaccacgccctgaagttcatcttctatgagctgctgaccaggtatgacctgatcagccgcttcaagatccccatcagcgccctggtgtcctttgtggaggccctggaggtgggctacagcaagcacaagaacccctaccacaacctgatgcatgctgctgatgtgacccagacagtgcactacctgctgtacaagacaggagtggccaactggctgacagagctggagatctttgccatcatcttctctgctgccatccatgactatgagcacacaggcaccaccaacaacttccacatccagaccaggagtgaccctgccatcctgtacaatgacagatctgtgctggagaaccaccacctgtctgctgcctaccgcctgctgcaggatgatgaggagatgaacatcctgatcaacctgagcaaggatgactggagggagttccgcaccctggtgattgagatggtgatggccacagacatgagctgccacttccagcagatcaaggccatgaagacagccctgcagcagcctgaggccatcgagaagcccaaggccctgagcctgatgctgcacacagctgacatcagccacccagccaaggcctgggacctgcaccaccgctggaccatgagcctgctggaggagttcttccggcagggcgaccgggaggccgagctgggcctgcccttcagccccctgtgtgacaggaagagcaccatggtggcccagagccaggtgggcttcatcgacttcatcgtggagcccaccttcaccgtgctgacagacatgacagagaagatcgtgagccccctgattgatgagaccagccagacaggaggcaccggccagaggaggagcagcctgaacagcatcagcagcagtgatgccaagaggtctggagtgaagaccagcggcagcgagggcagcgcccccatcaacaacagcgtcatctctgtggactacaagagcttcaaggccacctggacagaggtggtgcacatcaaccgggagcgctggagggccaaggtgcccaaggaggagaaggccaagaaggaggccgaggagaaggcccggctggccgctgaggagcagcagaaggagatggaggccaagagccaggccgaggagggcgccagcggcaaggccgagaagaagaccagcggggagaccaagaaccaggtgaatggcacccgggccaacaagagtgacaacccccggggcaagaacagcaaggccgagaagagcagcggggagcagcagcagaatggagacttcaaggatggcaagaacaagacagacaagaaggaccacagcaacattggaaatgacagcaagaagacagatggcaccaagcagaggagccacggcagccctgcccccagcaccagcagcacctgccgcctgaccctgcctgtgatcaagccacccctgcggcacttcaagaggcctgcctatgccagcagcagctatgcccccagcgtgtccaagaagacagatgagcacccagcccgctacaagatgctggaccagaggatcaagatgaagaagatccagaacatcagccacaactggaacaggaagtag

SEQ ID NO: 163895 - DNA, 1905 bp, synthetic construct
  misc_feature 1..1905: note = Description of Artificial Sequence: Synthetic coding sequence
  source 1..1905: mol_type = other DNA
atggagagccccaccaaggagattgaggagtttgagagcaacagcctgaagtacctgcagcctgagcagatcgagaagatctggctgcggctgcggggcctgaggaagtacaagaagaccagccagaggctgcggagcctggtgaagcagctggagcggggggaggcctctgtggtggacctgaagaagaacctggagtatgctgccaccgtgctggagagcgtgtacattgatgagacccggcggctgctggacacagaagatgagctgagtgacatccagagtgatgctgtgcccagcgaggtgcgggactggctggccagcaccttcacccggcagatgggcatgatgctgcggcggagtgatgagaagccccgcttcaagagcatcgtgcatgctgtgcaggccggcatctttgtggagaggatgtacagaaggaccagcaacatggtgggcctgagctaccccccagctgtgattgaggccctgaaggatgtggacaagtggagctttgatgtgttcagcctgaatgaggccagcggggaccacgccctgaagttcatcttctatgagctgctgaccaggtatgacctgatcagccgcttcaagatccccatcagcgccctggtgtcctttgtggaggccctggaggtgggctacagcaagcacaagaacccctaccacaacctgatgcatgctgctgatgtgacccagacagtgcactacctgctgtacaagacaggagtggccaactggctgacagagctggagatctttgccatcatcttctctgctgccatccatgactatgagcacacaggcaccaccaacaacttccacatccagaccaggagtgaccctgccatcctgtacaatgacagatctgtgctggagaaccaccacctgtctgctgcctaccgcctgctgcaggatgatgaggagatgaacatcctgatcaacctgagcaaggatgactggagggagttccgcaccctggtgattgagatggtgatggccacagacatgagctgccacttccagcagatcaaggccatgaagacagccctgcagcagcctgaggccatcgagaagcccaaggccctgagcctgatgctgcacacagctgacatcagccacccagccaaggcctgggacctgcaccaccgctggaccatgagcctgctggaggagttcttccggcagggcgaccgggaggccgagctgggcctgcccttcagccccctgtgtgacaggaagagcaccatggtggcccagagccaggtgggcttcatcgacttcatcgtggagcccaccttcaccgtgctgacagacatgacagagaagatcgtgagccccctgattgatgagaccagccagacaggaggcaccggccagaggaggagcagcctgaacagcatcagcagcagtgatgccaagaggtctggagtgaagaccagcggcagcgagggcagcgcccccatcaacaacagcgtcatctctgtggactacaagagcttcaaggccacctggacagaggtggtgcacatcaaccgggagcgctggagggccaaggtgcccaaggaggagaaggccaagaaggaggccgaggagaaggcccggctggccgctgaggagcagcagaaggagatggaggccaagagccaggccgaggagggcgccagcggcaaggccgagaagaagaccagcggggagaccaagaaccaggtgaatggcacccgggccaacaagagtgacaacccccggggcaagaacagcaaggccgagaagagcagcggggagcagcagcagaatggagacttcaaggatggcaagaacaagacagacaagaaggaccacagcaacattggaaatgacagcaagaagacagatgacagccaggagtag

SEQ ID NO: 163896 - DNA, 1905 bp, synthetic construct; identical to SEQ ID NO: 163895
  misc_feature 1..1905: note = Description of Artificial Sequence: Synthetic coding sequence
  source 1..1905: mol_type = other DNA

SEQ ID NO: 163897 - DNA, 141 bp, synthetic construct
  misc_feature 1..141: note = Description of Artificial Sequence: Synthetic coding sequence
  source 1..141: mol_type = other DNA
atggagagccccaccaaggagattgaggagtttgagagcaacagcctgaagtacctgcagcctgagcagatcgagaagatctggctgcggctgcggggcctgaggaagtacaagaagaccagccagaggctgcggagctag

SEQ ID NO: 163898 - DNA, 2130 bp, synthetic construct; identical to SEQ ID NO: 163894
  misc_feature 1..2130: note = Description of Artificial Sequence: Synthetic coding sequence
  source 1..2130: mol_type = other DNA

SEQ ID NO: 163899 - DNA, 3339 bp, synthetic construct
  misc_feature 1..3339: note = Description of Artificial Sequence: Synthetic coding sequence
  source 1..3339: mol_type = other DNA
atgagaagagatgaaagagatgccaaggccatgaggagcctgcagcccccagatggagctggcagccccccagagagcctgagaaatggctacgtgaagagctgtgtgagccccctgcggcaggaccccccccggggcttcttcttccacctgtgccgcttctgcaatgtggagctgcggcccccaccagccagcccccagcagccccggcgctgcagccccttctgccgggcccggctgagcctgggcgccctggccgcctttgtgctggccctgctgctgggcgctgagcctgagagctgggccgccggggccgcctggctgcggaccctgctgtctgtgtgcagccacagcctgagccccctcttcagcatcgcctgtgccttcttcttcctgacctgcttcctgaccaggaccaagaggggccctggccctggccgcagctgtggctcctggtggctgctggccctgcctgcctgctgctacctgggggacttcctggtgtggcagtggtggagctggccctggggagatggagatgctggcagcgctgccccccacaccccacctgaggccgccgccggccgcctgctgctggtgctgagctgtgtgggcctgctgctgaccctggcccaccccctgcggctgcggcactgtgtgctggtgctgctgctggccagctttgtgtggtgggtgtccttcaccagcctgggcagcctgcccagcgccctgcggcccctgctgagcggcctggtgggcggggccggctgcctgctggccctgggcctggaccacttcttccagatccgggaggcccccctgcacccccggctgagcagcgctgctgaggagaaggtgcctgtgatccggcccaggagaagaagcagctgtgtgtccctgggggagacagctgccagctactacggcagctgcaagatcttcagaagacccagcctgccctgcatcagccgggagcagatgatcctgtgggactgggacctgaagcagtggtacaagccccactaccagaacagcggcggcggcaatggagtggacctgtctgtgctgaatgaggccaggaacatggtgtctgacctgctgacagaccccagcctgcccccccaggtgatcagcagcctgcggagcatcagcagcctgatgggcgccttcagcggcagctgccggcccaagatcaaccccctgacccccttccctggcttctacccctgcagcgagattgaggaccctgctgagaagggggacaggaagctgaacaagggcctgaacagaaacagcctgcccaccccccagctgcggcgcagcagcggcaccagcggcctgctgcctgtggagcagagcagccgctgggacaggaacaacgggaagaggccccaccaggagtttggcatcagcagccagggctgctacctgaatggccccttcaacagcaacctgctgaccatccccaagcagaggagcagctctgtgtccctgacccaccacgtgggcctgcggcgggccggcgtgctgagcagcctgagccctgtgaacagcagcaaccacggccctgtgtccacaggcagcctgaccaacagaagccccatcgagttcccagacacagctgacttcctgaacaagcccagcgtcatcctgcagaggagcctgggcaatgcccccaacaccccagacttctaccagcagctgaggaacagcgacagcaacctgtgcaacagctgtggccaccagatgctgaagtatgtgtccaccagcgagagtgatggaacagactgctgcagcggcaagagcggggaggaggagaacatcttcagcaaggagagcttcaagctgatggagacccagcaggaggaggagacagagaagaaggacagcaggaagctgttccaggagggggacaagtggctgacagaggaggcccagagcgagcagcagaccaacatcgagcaggaggtgtccctggacctgatcctggtggaggagtatgacagcctgattgagaagatgagcaactggaacttccccatctttgagctggtggagaagatgggagagaagagcggccgcatcctgagccaggtgatgtacaccctcttccaggacaccggcctgctggagatcttcaagatccccacccagcagttcatgaactacttccgggccctggagaatggctacagagacatcccctaccacaaccgcatccacgccacagatgtgctgcatgctgtgtggtacctgaccaccaggcctgtgcccggcctgcagcagatccacaacggctgcggcactggaaatgaaacagacagtgatggccgcatcaaccacggccgcatcgcctacatcagcagcaagagctgcagcaacccagatgagagctatggctgcctgagcagcaacatcccagccctggagctgatggccctgtatgtggccgccgccatgcatgactatgaccaccctggccgcaccaatgccttcctggtggccaccaatgccccccaggccgtgctgtacaatgacagatctgtgctggagaaccaccacgccgccagcgcctggaacctgtacctgagcaggcctgagtacaacttcctgctgcacctggaccacgtggagttcaagcgcttccgcttcctggtgattgaggccatcctggccacagacctgaagaagcactttgacttcctggccgagttcaatgccaaggccaatgatgtgaacagcaatggaattgagtggagcaatgaaaatgaccggctgctggtgtgccaggtgtgcatcaagctggccgacatcaatggacctgccaaggtgcgggacctgcacctgaagtggacagagggcatcgtgaatgagttctatgagcagggagatgaggaggccaacctgggcctgcccatcagccccttcatggacaggagcagcccccagctggccaagctgcaggagagcttcatcacccacatcgtgggccccctgtgcaacagctatgatgctgctggcctgctgcccggccagtggctggaggccgaggaggacaatgacacagagagcggagatgatgaagatggagaggagctggacacagaagatgaggagatggagaacaacctgaaccccaagccacccaggaggaagagcagaagacgcatcttctgccagctgatgcaccacctgacagagaaccacaagatctggaaggagatcgtggaggaggaggagaagtgcaaggcagatggcaacaagctgcaggtggagaacagcagcctgccccaggctgatgagatccaggtgattgaggaggctgatgaggaggagtag

SEQ ID NO: 163900 - DNA, 3186 bp, synthetic construct
  misc_feature 1..3186: note = Description of Artificial Sequence: Synthetic coding sequence
  source 1..3186: mol_type = other DNA
atgagaagagatgaaagagatgccaaggccatgaggagcctgcagcccccagatggagctggcagccccccagagagcctgagaaatggctacgtgaagagctgtgtgagccccctgcggcaggaccccccccggggcttcttcttccacctgtgccgcttctgcaatgtggagctgcggcccccaccagccagcccccagcagccccggcgctgcagccccttctgccgggcccggctgagcctgggcgccctggccgcctttgtgctggccctgctgctgggcgctgagcctgagagctgggccgccggggccgcctggctgcggaccctgctgtctgtgtgcagccacagcctgagccccctcttcagcatcgcctgtgccttcttcttcctgacctgcttcctgaccaggaccaagaggggccctggccctggccgcagctgtggctcctggtggctgctggccctgcctgcctgctgctacctgggggacttcctggtgtggcagtggtggagctggccctggggagatggagatgctggcagcgctgccccccacaccccacctgaggccgccgccggccgcctgctgctggtgctgagctgtgtgggcctgctgctgaccctggcccaccccctgcggctgcggcactgtgtgctggtgctgctgctggccagctttgtgtggtgggtgtccttcaccagcctgggcagcctgcccagcgccctgcggcccctgctgagcggcctggtgggcggggccggctgcctgctggccctgggcctggaccacttcttccagatccgggaggcccccctgcacccccggctgagcagcgctgctgaggagaaggtgcctgtgatccggcccaggagaagaagcagctgtgtgtccctgggggagacagctgccagctactacggcagctgcaagatcttcagaagacccagcctgccctgcatcagccgggagcagatgatcctgtgggactgggacctgaagcagtggtacaagccccactaccagaacagcggcggcggcaatggagtggacctgtctgtgctgaatgaggccaggaacatggtgtctgacctgctgacagaccccagcctgcccccccagggcctgaacagaaacagcctgcccaccccccagctgcggcgcagcagcggcaccagcggcctgctgcctgtggagcagagcagccgctgggacagaaataatggcaagaggccccaccaggagtttggcatcagcagccagggctgctacctgaatggccccttcaacagcaacctgctgaccatccccaagcagaggagcagctctgtgtccctgacccaccacgtgggcctgcggcgggccggcgtgctgagcagcctgagccctgtgaacagcagcaaccacggccctgtgtccacaggcagcctgaccaacagaagccccatcgagttcccagacacagctgacttcctgaacaagcccagcgtcatcctgcagaggagcctgggcaatgcccccaacaccccagacttctaccagcagctgaggaacagcgacagcaacctgtgcaacagctgtggccaccagatgctgaagtatgtgtccaccagcgagagtgatggaacagactgctgcagcggcaagtctggagaggaggagaacatcttcagcaaggagagcttcaagctgatggagacccagcaggaggaggagacagagaagaaggacagcaggaagctgttccaggagggggacaagtggctgacagaggaggcccagagcgagcagcagaccaacatcgagcaggaggtgtccctggacctgatcctggtggaggagtatgacagcctcatcgagaagatgagcaactggaacttccccatctttgagctggtggagaagatgggagagaagagcggccgcatcctgagccaggtgatgtacaccctcttccaggacaccggcctgctggagatcttcaagatccccacccagcagttcatgaactacttccgggccctggagaatggctacagagacatcccctaccacaaccgcatccacgccacagatgtgctgcatgctgtgtggtacctgaccaccaggcctgtgcccggcctgcagcagatccacaacggctgcggcactggaaatgaaacagacagtgatggccgcatcaaccacggcagaattgcctacatcagcagcaagagctgcagcaacccagatgagagctatggctgcctgagcagcaacatcccagccctggagctgatggccctgtatgtggccgccgccatgcatgactatgaccaccctggccgcaccaatgccttcctggtggccaccaatgccccccaggccgtgctgtacaatgacagatctgtgctggagaaccaccacgccgccagcgcctggaacctgtacctgagcaggcctgagtacaacttcctgctgcacctggaccacgtggagttcaagcgcttccgcttcctggtgattgaggccatcctggccacagacctgaagaagcactttgacttcctggccgagttcaatgccaaggccaatgatgtgaacagcaatggcatcgagtggagcaatgaaaatgaccggctgctggtgtgccaggtgtgcatcaagctggccgacatcaatggacctgccaaggtgcgggacctgcacctgaagtggacagagggcatcgtgaatgagttctatgagcagggagatgaggaggccaacctgggcctgcccatcagccccttcatggacaggagcagcccccagctggccaagctgcaggagagcttcatcacccacatcgtgggccccctgtgcaacagctatgatgctgctggcctgctgcccggccagtggctggaggccgaggaggacaatgacacagaaagtggagatgatgaagatggagaggagctggacacagaagatgaggagatggagaacaacctgaaccccaagccacccaggaggaagagcagaagacgcatcttctgccagctgatgcaccacctgacagagaaccacaagatctggaaggagatcgtggaggaggaggagaagtgcaaggcagatggcaacaagctgcaggtggagaacagcagcctgccccaggctgatgagatccaggtgattgaggaggctgatgaggaggagtag

SEQ ID NO: 163901 - DNA, 2583 bp, synthetic construct
  misc_feature 1..2583: note = Description of Artificial Sequence: Synthetic coding sequence
  source 1..2583: mol_type = other DNA
atggcccggccccggggcctgggccgcatccctgagctgcagctggtggccttccctgtggccgtggccgcagaagatgaggccttcctgcctgagcccctggccccccgggccccccggcggcccaggagcccccccagcagccctgtgttctttgccagccccagccccaccttcagaagaaggctgcggctgctgcggagctgccaggacctgggccggcaggcctgggccggggccggctttgaagcagaaaatggccccacccccagccctggccgcagccccctggacagccaggccagccctggcctggtgctgcatgctggagctgccaccagccagaggcgggagagcttcctgtacagaagtgacagcgactatgacatgagccccaagaccatgagcaggaacagctctgtgaccagcgaggcccatgctgaggacctgattgtgaccccatttgcccaggtgctggccagcctgcggtctgtgcgcagcaacttcagcctgctgaccaacgtgcctgtgcccagcaacaagaggagccccctgggcggccccacccctgtgtgcaaggccaccctgtctgaggagacctgccagcagctggcccgggagaccctggaggagctggactggtgcctggagcagctggagaccatgcagacctacagatctgtgtctgagatggccagccacaagttcaagaggatgctgaaccgggagctgacccacctgtctgagatgagccgcagcggcaaccaggtgtctgagtacatcagcaccaccttcctggacaagcagaatgaggtggagatccccagccccaccatgaaggagcgggagaagcagcaggccccccggccccggcccagccagcccccacctcctcctgtgccccacctgcagcccatgagccagatcaccggcctgaagaagctgatgcacagcaacagcctgaacaacagcaacatccccaggtttggagtgaagacagaccaggaggagctgctggcccaggagctggagaacctgaacaagtggggcctgaacatcttctgtgtgtctgactatgctgggggccgcagcctgacctgcatcatgtacatgatcttccaggagcgggacctgctgaagaagttccgcatccctgtggacaccatggtgacctacatgctgaccctggaggaccactaccacgcagatgtggcctaccacaacagcctgcacgccgcagatgtgctgcagagcacccacgtgctgctggccaccccagccctggatgctgtgttcacagacctggagatcctggccgccctgtttgctgctgccatccatgatgtggaccaccctggggtgagcaaccagttcctgatcaacaccaacagcgagctggccctgatgtacaatgatgagagcgtgctggagaaccaccacctggccgtgggcttcaagctgctgcaggaggacaactgtgacatcttccagaacctgagcaagaggcagaggcagagcctgaggaagatggtgattgacatggtgctggccacagacatgagcaagcacatgaccctgctggccgacctgaagaccatggtggagaccaagaaggtgaccagcagcggcgtgctgctgctggacaactacagcgaccgcatccaggtgctgaggaacatggtgcactgtgccgacctgagcaaccccaccaagcccctggagctgtaccggcagtggacagaccgcatcatggccgagttcttccagcagggcgaccgggagcgggagcggggcatggagatcagccccatgtgtgacaagcacacagcctctgtggagaagagccaggtgggcttcatcgactacatcgtgcaccccctgtgggagacctgggccgacctggtgcacccagatgcccaggagatcctggacaccctggaggacaacagagactggtactacagcgccatccggcagagccccagccccccacctgaggaggagagccggggccctggccacccccccctgcctgacaagttccagtttgagctgaccctggaggaggaggaggaggaggagatctccatggcccagatcccctgcacagcccaggaggccctgacagcccagggcctgagcggcgtggaggaggccctggatgccaccatcgcctgggaggccagccctgcccaggagagcctggaggtgatggcccaggaggccagcctggaggccgagctggaggccgtgtacctgacccagcaggcccagagcacaggcagcgcccctgtggccccagatgagttcagcagccgggaggagtttgtggtggccgtgagccacagcagccccagcgccctggccctgcagagccccctgctgcctgcctggaggaccctgtctgtgtctgagcacgcccctggcctgcccggcctgcccagcacagctgctgaggtggaggcccagcgggagcaccaggccgccaagagggcctgcagcgcctgtgccggcaccttcggggaggacaccagcgccctgcctgcccctgggggcggcggcagcggcggggaccccacctag

SEQ ID NO: 163902 - DNA, 1944 bp, synthetic construct
  misc_feature 1..1944: note = Description of Artificial Sequence: Synthetic coding sequence
  source 1..1944: mol_type = other DNA
atgcccctggtggacttcttctgtgagacctgcagcaagccctggctggtgggctggtgggaccagttcaagaggatgctgaaccgggagctgacccacctgtctgagatgagccgcagcggcaaccaggtgtctgagtacatcagcaccaccttcctggacaagcagaatgaggtggagatccccagccccaccatgaaggagcgggagaagcagcaggccccccggccccggcccagccagcccccacctcctcctgtgccccacctgcagcccatgagccagatcaccggcctgaagaagctgatgcacagcaacagcctgaacaacagcaacatcccccgcttcggcgtgaagacagaccaggaggagctgctggcccaggagctggagaacctgaacaagtggggcctgaacatcttctgtgtgtctgactatgccggcggccgcagcctgacctgcatcatgtacatgatcttccaggagcgggacctgctgaagaagttccgcatccctgtggacaccatggtgacctacatgctgaccctggaggaccactaccacgcagatgtggcctaccacaacagcctgcatgctgctgatgtgctgcagagcacccacgtgctgctggccaccccagccctggatgctgtgttcacagacctggagatcctggccgccctgtttgctgctgccatccatgatgtggaccaccctggggtgagcaaccagttcctgatcaacaccaacagcgagctggccctgatgtacaatgatgaatctgtgctggagaaccaccacctggccgtgggcttcaagctgctgcaggaggacaactgtgacatcttccagaacctgagcaagaggcagaggcagagcctgaggaagatggtgattgacatggtgctggccacagacatgagcaagcacatgaccctgctggccgacctgaagaccatggtggagaccaagaaggtgaccagcagtggagtgctgctgctggacaactacagcgaccgcatccaggtgctgaggaacatggtgcactgtgccgacctgagcaaccccaccaagcccctggagctgtaccggcagtggacagaccgcatcatggccgagttcttccagcagggcgaccgggagcgggagcggggcatggagatcagccccatgtgtgacaagcacacagcctctgtggagaagagccaggtgggcttcatcgactacatcgtgcaccccctgtgggagacctgggccgacctggtgcacccagatgcccaggagatcctggacaccctggaggacaacagagactggtactacagcgccatccggcagagccccagccccccacctgaggaggagagccggggccctggccacccccccctgcctgacaagttccagtttgagctgaccctggaggaggaggaggaggaggagatctccatggcccagatcccctgcacagcccaggaggccctgacagcccagggcctgtctggagtggaggaggccctggatgccaccatcgcctgggaggccagccctgcccaggagagcctggaggtgatggcccaggaggccagcctggaggccgagctggaggccgtgtacctgacccagcaggcccagagcactggaagtgcccctgtggccccagatgagttcagcagccgggaggagtttgtggtggccgtgagccacagcagccccagcgccctggccctgcagagccccctgctgcctgcctggaggaccctgtctgtgtctgaacatgcccctggcctgcccggcctgcccagcacagctgctgaggtggaggcccagcgggagcaccaggccgccaagagggcctgcagcgcctgtgccggcacctttggagaggacaccagcgccctgcctgcccctgggggcggcggcagcggcggggaccccacctag

SEQ ID NO: 163903 - DNA, 2661 bp, synthetic construct
  misc_feature 1..2661: note = Description of Artificial Sequence: Synthetic coding sequence
  source 1..2661: mol_type = other DNA
atggagcccccaacagtgcccagcgagaggagcctgagcctgagcctgcccggcccccgggagggccaggccaccctgaagcccccaccccagcacctgtggaggcagcccaggacccccatccgcatccagcagaggggctacagcgacagcgctgagagagctgagcgggagcggcagccccaccggcccatcgagcgggcagatgccatggacaccagtgacaggcctggcctgcggaccaccaggatgtcctggcccagcagcttccatggaactggaactggaagtggaggagctgggggcggcagcagccgccgctttgaagcagaaaatggccccacccccagccctggccgcagccccctggacagccaggccagccctggcctggtgctgcatgctggagctgccaccagccagaggcgggagagcttcctgtacagaagtgacagcgactatgacatgagccccaagaccatgagcaggaacagctctgtgaccagcgaggcccatgctgaggacctgattgtgaccccatttgcccaggtgctggccagcctgcggtctgtgcgcagcaacttcagcctgctgaccaacgtgcctgtgcccagcaacaagaggagccccctgggcggccccacccctgtgtgcaaggccaccctgtctgaggagacctgccagcagctggcccgggagaccctggaggagctggactggtgcctggagcagctggagaccatgcagacctacagatctgtgtctgagatggccagccacaagttcaagaggatgctgaaccgggagctgacccacctgtctgagatgagccgcagcggcaaccaggtgtctgagtacatcagcaccaccttcctggacaagcagaatgaggtggagatccccagccccaccatgaaggagcgggagaagcagcaggccccccggccccggcccagccagcccccacctcctcctgtgccccacctgcagcccatgagccagatcaccggcctgaagaagctgatgcacagcaacagcctgaacaacagcaacatccccaggtttggagtgaagacagaccaggaggagctgctggcccaggagctggagaacctgaacaagtggggcctgaacatcttctgtgtgtctgactatgctgggggccgcagcctgacctgcatcatgtacatgatcttccaggagcgggacctgctgaagaagttccgcatccctgtggacaccatggtgacctacatgctgaccctggaggaccactaccacgcagatgtggcctaccacaacagcctgcacgccgcagatgtgctgcagagcacccacgtgctgctggccaccccagccctggatgctgtgttcacagacctggagatcctggccgccctgtttgctgctgccatccatgatgtggaccaccctggggtgagcaaccagttcctgatcaacaccaacagcgagctggccctgatgtacaatgatgagagcgtgctggagaaccaccacctggccgtgggcttcaagctgctgcaggaggacaactgtgacatcttccagaacctgagcaagaggcagaggcagagcctgaggaagatggtgattgacatggtgctggccacagacatgagcaagcacatgaccctgctggccgacctgaagaccatggtggagaccaagaaggtgaccagcagcggcgtgctgctgctggacaactacagcgaccgcatccaggtgctgaggaacatggtgcactgtgccgacctgagcaaccccaccaagcccctggagctgtaccggcagtggacagaccgcatcatggccgagttcttccagcagggcgaccgggagcgggagcggggcatggagatcagccccatgtgtgacaagcacacagcctctgtggagaagagccaggtgggcttcatcgactacatcgtgcaccccctgtgggagacctgggccgacctggtgcacccagatgcccaggagatcctggacaccctggaggacaacagagactggtactacagcgccatccggcagagccccagccccccacctgaggaggagagccggggccctggccacccccccctgcctgacaagttccagtttgagctgaccctggaggaggaggaggaggaggagatctccatggcccagatcccctgcacagcccaggaggccctgacagcccagggcctgagcggcgtggaggaggccctggatgccaccatcgcctgggaggccagccctgcccaggagagcctggaggtgatggcccaggaggccagcctggaggccgagctggaggccgtgtacctgacccagcaggcccagagcacaggcagcgcccctgtggccccagatgagttcagcagccgggaggagtttgtggtggccgtgagccacagcagccccagcgccctggccctgcagagccccctgctgcctgcctggaggaccctgtctgtgtctgagcacgcccctggcctgcccggcctgcccagcacagctgctgaggtggaggcccagcgggagcaccaggccgccaagagggcctgcagcgcctgtgccggcaccttcggggaggacaccagcgccctgcctgcccctgggggcggcggcagcggcggggaccccacctag

SEQ ID NO: 163904 - DNA, 972 bp, synthetic construct
  misc_feature 1..972: note = Description of Artificial Sequence: Synthetic coding sequence
  source 1..972: mol_type = other DNA
atggtgctgcccagcgaccagggcttcaagctgctgggcaatgtgctgcagggccctgagccctaccgcctgctgaccagcggcctgcggctgcaccaggagctggagaacctgaacaagtggggcctgaacatcttctgtgtgtctgactatgctgggggccgcagcctgacctgcatcatgtacatgatcttccaggagcgggacctgctgaagaagttccgcatccctgtggacaccatggtgacctacatgctgaccctggaggaccactaccacgcagatgtggcctaccacaacagcctgcacgccgcagatgtgctgcagagcacccacgtgctgctggccaccccagccctggatgctgtgttcacagacctggagatcctggccgccctgtttgctgctgccatccatgatgtggaccaccctggggtgagcaaccagttcctgatcaacaccaacagcgagctggccctgatgtacaatgatgagagcgtgctggagaaccaccacctggccgtgggcttcaagctgctgcaggaggacaactgtgacatcttccagaacctgagcaagaggcagaggcagagcctgaggaagatggtgattgacatggtgctggccacagacatgagcaagcacatgaccctgctggccgacctgaagaccatggtggagaccaagaaggtgaccagcagcggcgtgctgctgctggacaactacagcgaccgcatccaggtgctgaggaacatggtgcactgtgccgacctgagcaaccccaccaagcccctggagctgtaccggcagtggacagaccgcatcatggccgagttcttccagcagggcgaccgggagcgggagcggggcatggagatcagccccatgtgtgacaagcacacagcctctgtggagaagagccaggtgcaggcccggggcattgatggccgggcccagggcgagttctactag

SEQ ID NO: 163905 - DNA, 2595 bp, synthetic construct
  misc_feature 1..2595: note = Description of Artificial Sequence: Synthetic coding sequence
  source 1..2595: mol_type = other DNA
atgaagaggagccgcagcgccctgtctgtggccggcactggagatgagaggagccgggagaccccagagagtgaccgggccaacatgctgggcgctgacctgcggcggccccggcggcggctgagcagcggccctggcctgggctgggcccagcctgagcccagcgaccccggggtgcccctgcccccccggcccaccaccctgcccctgctgatccccccacgcatcagcatcaccagggcagaaaatgacagctttgaagcagaaaatggccccacccccagccctggccgcagccccctggacagccaggccagccctggcctggtgctgcatgctggagctgccaccagccagaggcgggagagcttcctgtacagaagtgacagcgactatgacatgagccccaagaccatgagcaggaacagctctgtgaccagcgaggcccatgctgaggacctgattgtgaccccatttgcccaggtgctggccagcctgcggtctgtgcgcagcaacttcagcctgctgaccaacgtgcctgtgcccagcaacaagaggagccccctgggcggccccacccctgtgtgcaaggccaccctgtctgaggagacctgccagcagctggcccgggagaccctggaggagctggactggtgcctggagcagctggagaccatgcagacctacagatctgtgtctgagatggccagccacaagttcaagaggatgctgaaccgggagctgacccacctgtctgagatgagccgcagcggcaaccaggtgtctgagtacatcagcaccaccttcctggacaagcagaatgaggtggagatccccagccccaccatgaaggagcgggagaagcagcaggccccccggccccggcccagccagcccccacctcctcctgtgccccacctgcagcccatgagccagatcaccggcctgaagaagctgatgcacagcaacagcctgaacaacagcaacatccccaggtttggagtgaagacagaccaggaggagctgctggcccaggagctggagaacctgaacaagtggggcctgaacatcttctgtgtgtctgactatgctgggggccgcagcctgacctgcatcatgtacatgatcttccaggagcgggacctgctgaagaagttccgcatccctgtggacaccatggtgacctacatgctgaccctggaggaccactaccacgcagatgtggcctaccacaacagcctgcacgccgcagatgtgctgcagagcacccacgtgctgctggccaccccagccctggatgctgtgttcacagacctggagatcctggccgccctgtttgctgctgccatccatgatgtggaccaccctggggtgagcaaccagttcctgatcaacaccaacagcgagctggccctgatgtacaatgatgagagcgtgctggagaaccaccacctggccgtgggcttcaagctgctgcaggaggacaactgtgacatcttccagaacctgagcaagaggcagaggcagagcctgaggaagatggtgattgacatggtgctggccacagacatgagcaagcacatgaccctgctggccgacctgaagaccatggtggagaccaagaaggtgaccagcagcggcgtgctgctgctggacaactacagcgaccgcatccaggtgctgaggaacatggtgcactgtgccgacctgagcaaccccaccaagcccctggagctgtaccggcagtggacagaccgcatcatggccgagttcttccagcagggcgaccgggagcgggagcggggcatggagatcagccccatgtgtgacaagcacacagcctctgtggagaagagccaggtgggcttcatcgactacatcgtgcaccccctgtgggagacctgggccgacctggtgcacccagatgcccaggagatcctggacaccctggaggacaacagagactggtactacagcgccatccggcagagccccagccccccacctgaggaggagagccggggccctggccacccccccctgcctgacaagttccagtttgagctgaccctggaggaggaggaggaggaggagatctccatggcccagatcccctgcacagcccaggaggccctgacagcccagggcctgagcggcgtggaggaggccctggatgccaccatcgcctgggaggccagccctgcccaggagagcctggaggtgatggcccaggaggccagcctggaggccgagctggaggccgtgtacctgacccagcaggcccagagcacaggcagcgcccctgtggccccagatgagttcagcagccgggaggagtttgtggtggccgtgagccacagcagccccagcgccctggccctgcagagccccctgctgcctgcctggaggaccctgtctgtgtctgagcacgcccctggcctgcccggcctgcccagcacagctgctgaggtggaggcccagcgggagcaccaggccgccaagagggcctgcagcgcctgtgccggcaccttcggggaggacaccagcgccctgcctgcccctgggggcggcggcagcggcggggaccccacctag

SEQ ID NO: 163906 - DNA, 309 bp, synthetic construct
  misc_feature 1..309: note = Description of Artificial Sequence: Synthetic coding sequence
  source 1..309: mol_type = other DNA
atggtggagaccaagaaggtgaccagcagcggcgtgctgctgctggacaactacagcgaccgcatccaggtgctgaggaacatggtgcactgtgccgacctgagcaaccccaccaagcccctggagctgtaccggcagtggacagaccgcatcatggccgagttcttccagcagggcgaccgggagcgggagcggggcatggagatcagccccatgtgtgacaagcacacagcctctgtggagaagagccaggtgggcttcatcgactacatcgtgcaccccctgtgggagacctgggccgacctgtag

SEQ ID NO: 163907 - DNA, 2478 bp, synthetic construct
  misc_feature 1..2478: note = Description of Artificial Sequence: Synthetic coding sequence
  source 1..2478: mol_type = other DNA
atgaggtctggagctgccccccgggcccggccccggcccccagccctggccctgcccccaactggacctgagagcctgacccacttccccttcagtgatgaggacaccaggaggcaccccccaggccgctctgtgtcctttgaagcagaaaatggccccacccccagccctggccgcagccccctggacagccaggccagccctggcctggtgctgcacgccggggccgccaccagccagaggcgggagagcttcctgtacagaagtgacagcgactatgacatgagccccaagaccatgagcaggaacagctctgtgaccagcgaggcccacgcagaagatctcatcgtgaccccatttgcccaggtgctggccagcctgcggtctgtgcgcagcaacttcagcctgctgaccaacgtgcctgtgcccagcaacaagaggagccccctgggcggccccacccctgtgtgcaaggccaccctgtctgaggagacctgccagcagctggcccgggagaccctggaggagctggactggtgcctggagcagctggagaccatgcagacctacagatctgtgtctgagatggccagccacaagttcaagaggatgctgaaccgggagctgacccacctgtctgagatgagccgcagcggcaaccaggtgtctgagtacatcagcaccaccttcctggacaagcagaatgaggtggagatccccagccccaccatgaaggagcgggagaagcagcaggccccccggccccggcccagccagcccccacctcctcctgtgccccacctgcagcccatgagccagatcaccggcctgaagaagctgatgcacagcaacagcctgaacaacagcaacatcccccgcttcggcgtgaagacagaccaggaggagctgctggcccaggagctggagaacctgaacaagtggggcctgaacatcttctgtgtgtctgactatgccggcggccgcagcctgacctgcatcatgtacatgatcttccaggagcgggacctgctgaagaagttccgcatccctgtggacaccatggtgacctacatgctgaccctggaggaccactaccacgcagatgtggcctaccacaacagcctgcatgctgctgatgtgctgcagagcacccacgtgctgctggccaccccagccctggatgctgtgttcacagacctggagatcctggccgccctgtttgctgctgccatccatgatgtggaccaccctggggtgagcaaccagttcctgatcaacaccaacagcgagctggccctgatgtacaatgatgaatctgtgctggagaaccaccacctggccgtgggcttcaagctgctgcaggaggacaactgtgacatcttccagaacctgagcaagaggcagaggcagagcctgaggaagatggtgattgacatggtgctggccacagacatgagcaagcacatgaccctgctggccgacctgaagaccatggtggagaccaagaaggtgaccagcagtggagtgctgctgctggacaactacagcgaccgcatccaggtgctgaggaacatggtgcactgtgccgacctgagcaaccccaccaagcccctggagctgtaccggcagtggacagaccgcatcatggccgagttcttccagcagggcgaccgggagcgggagcggggcatggagatcagccccatgtgtgacaagcacacagcctctgtggagaagagccaggtgggcttcatcgactacatcgtgcaccccctgtgggagacctgggccgacctggtgcacccagatgcccaggagatcctggacaccctggaggacaacagagactggtactacagcgccatccggcagagccccagccccccacctgaggaggagagccggggccctggccacccccccctgcctgacaagttccagtttgagctgaccctggaggaggaggaggaggaggagatctccatggcccagatcccctgcacagcccaggaggccctgacagcccagggcctgtctggagtggaggaggccctggatgccaccatcgcctgggaggccagccctgcccaggagagcctggaggtgatggcccaggaggccagcctggaggccgagctggaggccgtgtacctgacccagcaggcccagagcactggaagtgcccctgtggccccagatgagttcagcagccgggaggagtttgtggtggccgtgagccacagcagccccagcgccctggccctgcagagccccctgctgcctgcctggaggaccctgtctgtgtctgaacatgcccctggcctgcccggcctgcccagcacagctgctgaggtggaggcccagcgggagcaccaggccgccaagagggcctgcagcgcctgtgccggcacctttggagaggacaccagcgccctgcctgcccctgggggcggcggcagcggcggggaccccacctag

SEQ ID NO: 163908 - DNA, 2211 bp, synthetic construct
  misc_feature 1..2211: note = Description of Artificial Sequence: Synthetic coding sequence
  source 1..2211: mol_type = other DNA
atgaagaagagccgctctgtgatgacagtgatggctgatgacaacgtgaaggactactttgaatgttccctgagcaagagctacagcagcagcagcaacaccctgggcatcgacctgtggagaggaagacgctgctgcagcggcaacctgcagctgccccccctgagccagaggcagagcgagcgggcccggaccccagaaggagatggcatcagccggcccaccaccctgcccctgaccaccctgcccagcatcgccatcaccaccgtgtcccaggagtgctttgatgtggagaatggccccagccctggccgcagccccctggacccccaggccagcagcagcgctggcctggtgctgcacgccaccttccctggccacagccagaggcgggagagcttcctgtacagaagtgacagcgactatgacctgagccccaaggccatgagcaggaacagcagcctgcccagcgagcagcacggagatgacctgattgtgaccccatttgcccaggtgctggccagcctgcggtctgtgaggaacaacttcaccatcctgaccaacctgcacggcaccagcaacaagaggagccctgctgccagccagccccctgtgtcccgggtgaacccccaggaggagagctaccagaagctggccatggagaccctggaggagctggactggtgcctggaccagctggagaccatccagacctacagatctgtgtctgagatggccagcaacaagttcaagaggatgctgaaccgggagctgacccacctgtctgagatgagccgcagcggcaaccaggtgtctgagtacatcagcaacaccttcctggacaagcagaatgatgtggagatccccagccccacccagaaggaccgggagaagaagaagaagcagcagctgatgacccagatctctggagtgaagaagctgatgcacagcagcagcctgaacaacaccagcatcagccgcttcggcgtgaacacagaaaatgaagaccacctggccaaggagctggaggacctgaacaagtggggcctgaacatcttcaacgtggccggctacagccacaaccggcccctgacctgcatcatgtatgccatcttccaggagcgggacctgctgaagaccttccgcatcagcagtgacaccttcatcacctacatgatgaccctggaggaccactaccacagtgatgtggcctaccacaacagcctgcatgctgctgatgtggcccagagcacccacgtgctgctgagcaccccagccctggatgctgtgttcacagacctggagatcctggccgccatctttgctgctgccatccatgatgtggaccaccctggggtgagcaaccagttcctgatcaacaccaacagcgagctggccctgatgtacaatgatgaatctgtgctggagaaccaccacctggccgtgggcttcaagctgctgcaggaggagcactgtgacatcttcatgaacctgaccaagaagcagaggcagaccctgaggaagatggtgattgacatggtgctggccacagacatgagcaagcacatgagcctgctggccgacctgaagaccatggtggagaccaagaaggtgaccagcagtggagtgctgctgctggacaactacacagaccgcatccaggtgctgaggaacatggtgcactgtgccgacctgagcaaccccaccaagagcctggagctgtaccggcagtggacagaccgcatcatggaggagttcttccagcagggcgacaaggagcgggagcggggcatggagatcagccccatgtgtgacaagcacacagcctctgtggagaagagccaggtgggcttcatcgactacatcgtgcaccccctgtgggagacctgggccgacctggtgcagccagatgcccaggacatcctggacaccctggaggacaacagaaactggtaccagagcatgatcccccagagccccagcccccccctggatgagcagaacagagactgccagggcctgatggagaagttccagtttgagctgaccctggatgaagaagattctgagggccctgagaaggagggggagggccacagctacttcagcagcaccaagaccctgtgtgtgattgatcctgagaacagagacagcctgggggagacagacatcgacatcgccacagaggacaagagccctgtggacacctag

SEQ ID NO: 163909 - DNA, 2211 bp, synthetic construct; identical to SEQ ID NO: 163908
  misc_feature 1..2211: note = Description of Artificial Sequence: Synthetic coding sequence
  source 1..2211: mol_type = other DNA

SEQ ID NO: 163910 - DNA, 1695 bp, synthetic construct
  misc_feature 1..1695: note = Description of Artificial Sequence: Synthetic coding sequence
  source 1..1695: mol_type = other DNA
atgaaggagcacggcggcaccttcagcagcacaggcatcagcggcggcagcggggacagcgccatggacagcctgcagcccctgcagcccaactacatgcctgtgtgcctgtttgctgaggagagctaccagaagctggccatggagaccctggaggagctggactggtgcctggaccagctggagaccatccagacctacagatctgtgtctgagatggccagcaacaagttcaagaggatgctgaaccgggagctgacccacctgtctgagatgagccgcagcggcaaccaggtgtctgagtacatcagcaacaccttcctggacaagcagaatgatgtggagatccccagccccacccagaaggaccgggagaagaagaagaagcagcagctgatgacccagatctctggagtgaagaagctgatgcacagcagcagcctgaacaacaccagcatcagccgcttcggcgtgaacacagaaaatgaagaccacctggccaaggagctggaggacctgaacaagtggggcctgaacatcttcaacgtggccggctacagccacaaccggcccctgacctgcatcatgtatgccatcttccaggagcgggacctgctgaagaccttccgcatcagcagtgacaccttcatcacctacatgatgaccctggaggaccactaccacagtgatgtggcctaccacaacagcctgcatgctgctgatgtggcccagagcacccacgtgctgctgagcaccccagccctggatgctgtgttcacagacctggagatcctggccgccatctttgctgctgccatccatgatgtggaccaccctggggtgagcaaccagttcctgatcaacaccaacagcgagctggccctgatgtacaatgatgaatctgtgctggagaaccaccacctggccgtgggcttcaagctgctgcaggaggagcactgtgacatcttcatgaacctgaccaagaagcagaggcagaccctgaggaagatggtgattgacatggtgctggccacagacatgagcaagcacatgagcctgctggccgacctgaagaccatggtggagaccaagaaggtgaccagcagtggagtgctgctgctggacaactacacagaccgcatccaggtgctgaggaacatggtgcactgtgccgacctgagcaaccccaccaagagcctggagctgtaccggcagtggacagaccgcatcatggaggagttcttccagcagggcgacaaggagcgggagcggggcatggagatcagccccatgtgtgacaagcacacagcctctgtggagaagagccaggtgggcttcatcgactacatcgtgcaccccctgtgggagacctgggccgacctggtgcagccagatgcccaggacatcctggacaccctggaggacaacagaaactggtaccagagcatgatcccccagagccccagcccccccctggatgagcagaacagagactgccagggcctgatggagaagttccagtttgagctgaccctggatgaagaagattctgagggccctgagaaggagggggagggccacagctacttcagcagcaccaagaccctgtgtgtgattgatcctgagaacagagacagcctgggggagacagacatcgacatcgccacagaggacaagagccctgtggacacctag

SEQ ID NO: 163911 - DNA, 2211 bp, synthetic construct; identical to SEQ ID NO: 163908
  misc_feature 1..2211: note = Description of Artificial Sequence: Synthetic coding sequence
  source 1..2211: mol_type = other DNA

SEQ ID NO: 163912 - DNA, 2166 bp, synthetic construct
  misc_feature 1..2166: note = Description of Artificial Sequence: Synthetic coding sequence
  source 1..2166: mol_type = other DNA
atgacagccaaggacagcagcaaggagctgacagccagcgagcctgaggtgtgcatcaagaccttcaaggagcagatgcacctggagctggagctgccccggctgcccggcaaccggcccaccagccccaagatcagccccaggagcagccccaggaacagcccctgcttcttcaggaagctgctggtgaacaagagcatccggcagaggcggcgcttcaccgtggcccacacctgctttgatgtggagaatggccccagccctggccgcagccccctggacccccaggccagcagcagcgctggcctggtgctgcacgccaccttccctggccacagccagaggcgggagagcttcctgtacagaagtgacagcgactatgacctgagccccaaggccatgagcaggaacagcagcctgcccagcgagcagcacggagatgacctgattgtgaccccatttgcccaggtgctggccagcctgcggtctgtgaggaacaacttcaccatcctgaccaacctgcacggcaccagcaacaagaggagccctgctgccagccagccccctgtgtcccgggtgaacccccaggaggagagctaccagaagctggccatggagaccctggaggagctggactggtgcctggaccagctggagaccatccagacctacagatctgtgtctgagatggccagcaacaagttcaagaggatgctgaaccgggagctgacccacctgtctgagatgagccgcagcggcaaccaggtgtctgagtacatcagcaacaccttcctggacaagcagaatgatgtggagatccccagccccacccagaaggaccgggagaagaagaagaagcagcagctgatgacccagatcagcggcgtgaagaagctgatgcacagcagcagcctgaacaacaccagcatcagcagatttggagtgaacacagaaaatgaagaccacctggccaaggagctggaggacctgaacaagtggggcctgaacatcttcaacgtggccggctacagccacaaccggcccctgacctgcatcatgtatgccatcttccaggagcgggacctgctgaagaccttccgcatcagcagtgacaccttcatcacctacatgatgaccctggaggaccactaccacagtgatgtggcctaccacaacagcctgcacgccgcagatgtggcccagagcacccacgtgctgctgagcaccccagccctggatgctgtgttcacagacctggagatcctggccgccatctttgctgctgccatccatgatgtggaccaccctggggtgagcaaccagttcctgatcaacaccaacagcgagctggccctgatgtacaatgatgagagcgtgctggagaaccaccacctggccgtgggcttcaagctgctgcaggaggagcactgtgacatcttcatgaacctgaccaagaagcagaggcagaccctgaggaagatggtgattgacatggtgctggccacagacatgagcaagcacatgagcctgctggccgacctgaagaccatggtggagaccaagaaggtgaccagcagcggcgtgctgctgctggacaactacacagaccgcatccaggtgctgaggaacatggtgcactgtgccgacctgagcaaccccaccaagagcctggagctgtaccggcagtggacagaccgcatcatggaggagttcttccagcagggcgacaaggagcgggagcggggcatggagatcagccccatgtgtgacaagcacacagcctctgtggagaagagccaggtgggcttcatcgactacatcgtgcaccccctgtgggagacctgggccgacctggtgcagccagatgcccaggacatcctggacaccctggaggacaacagaaactggtaccagagcatgatcccccagagccccagcccccccctggatgagcagaacagagactgccagggcctgatggagaagttccagtttgagctgaccctggatgaggaggacagcgagggccctgagaaggagggggagggccacagctacttcagcagcaccaagaccctgtgtgtgattgatcctgaaaatagagacagcctgggggagacagacattgatattgccacagaggacaagagccctgtggacacctag

SEQ ID NO: 163913 - DNA, 2043 bp, synthetic construct
  misc_feature 1..2043: note = Description of Artificial Sequence: Synthetic coding sequence
  source 1..2043: mol_type = other DNA
atgcagggccccccagccccagcccctgtgcccggccctggcagcccccggggcagcccccggggcagccctggcctcttcaggaagctgctggtgaaccagagcatccggctgcagaggcgcttcaccgtggcccaccccctgtgctttgacctggagaatggcctgagctgtggccggcgggccctggacccccagagcagccctggcctgggccgcatcatgcaggcccctgtgccccacagccagaggcgggagagcttcctgtacagaagtgacagcgactatgagctgagccccaaggccatgagcaggaacagctctgtggccagtgacctgcacggggaggacatgattgtgaccccatttgcccaggtgctggccagcctgaggacagtgcgcagcaatgtggccgccctggcccggcagcagtgcctgggcgccgccaagcagggccctgtgggcaaccccagcagcagcaaccagctgcccccagctgaggacaccggccagaagctggccctggagaccctggatgagctggactggtgcctggaccagctggagaccctgcagaccaggcacagcgtgggggagatggccagcaacaagttcaagaggatcctgaaccgggagctgacccacctgtctgagaccagccgcagcggcaaccaggtgtctgagtacatcagcaggaccttcctggaccagcagacagaggtggagctgcccaaggtgacagctgaggaggccccccagcccatgagccgcatcagcggcctgcacggcctgtgccacagcgccagcctgagcagcgccaccgtgccccgcttcggcgtgcagacagaccaggaggagcagctggccaaggagctggaggacaccaacaagtggggcctggatgtgttcaaggtggccgagctgagcggcaaccggcccctgacagccatcatcttcagcatcttccaggagcgggacctgctgaagaccttccagatcccagctgacaccctggccacctacctgctgatgctggagggccactaccacgccaacgtggcctaccacaacagcctgcatgctgctgatgtggcccagagcacccacgtgctgctggccaccccagccctggaggccgtgttcacagacctggagatcctggccgccctgtttgccagcgccatccatgatgtggaccaccctggggtgagcaaccagttcctgatcaacaccaacagcgagctggccctgatgtacaatgatgcctctgtgctggagaaccaccacctggccgtgggcttcaagctgctgcaggccgagaactgtgacatcttccagaacctgagcgccaagcagaggctgagcctgcggaggatggtgattgacatggtgctggccacagacatgagcaagcacatgaacctgctggccgacctgaagaccatggtggagaccaagaaggtgaccagcctgggcgtgctgctgctggacaactacagcgaccgcatccaggtgctgcagaacctggtgcactgtgccgacctgagcaaccccaccaagcccctgcccctgtaccggcagtggacagaccgcatcatggccgagttcttccagcagggcgaccgggagcgggagagcggcctggacatcagccccatgtgtgacaagcacacagcctctgtggagaagagccaggtgggcttcatcgactacatcgcccaccccctgtgggagacctgggccgacctggtgcacccagatgcccaggacctgctggacaccctggaggacaaccgggagtggtaccagagcaagatccccaggagccccagcgacctgaccaaccctgagagagatggccctgaccgcttccagtttgagctgaccctggaggaggccgaggaggaggatgaggaggaggaggaggagggggaggagacagccctggccaaggaggccctggagctgcctgacacagagctgctgagccctgaggccggccctgaccccggggacctgcccctggacaaccagaggacatag

SEQ ID NO: 163914 - DNA, 1281 bp, synthetic construct
  misc_feature 1..1281: note = Description of Artificial Sequence: Synthetic coding sequence
  source 1..1281: mol_type = other DNA
atggccagcaacaagttcaagaggatcctgaaccgggagctgacccacctgtctgagaccagccgcagcggcaaccaggtgtctgagtacatcagcaggaccttcctggaccagcagacagaggtggagctgcccaaggtgacagctgaggaggccccccagcccatgagccgcatcagcggcctgcacggcctgtgccacagcgccagcctgagcagcgccaccgtgcccaggtttggagtgcagacagaccaggaggagcagctggccaaggagctggaggacaccaacaagtggggcctggatgtgttcaaggtggccgagctgagcggcaaccggcccctgacagccatcatcttcagcatcttccaggccgtgttcacagacctggagatcctggccgccctgtttgccagcgccatccatgatgtggaccaccctggggtgagcaaccagttcctgatcaacaccaacagcgagctggccctgatgtacaatgatgcctctgtgctggagaaccaccacctggccgtgggcttcaagctgctgcaggccgagaactgtgacatcttccagaacctgagcgccaagcagaggctgagcctgcggaggatggtgattgacatggtgctggccacagacatgagcaagcacatgaacctgctggccgacctgaagaccatggtggagaccaagaaggtgaccagcctgggcgtgctgctgctggacaactacagcgaccgcatccaggtgctgcagaacctggtgcactgtgccgacctgagcaaccccaccaagcccctgcccctgtaccggcagtggacagaccgcatcatggccgagttcttccagcagggcgaccgggagcgggagagcggcctggacatcagccccatgtgtgacaagcacacagcctctgtggagaagagccaggtgggcttcatcgactacatcgcccaccccctgtgggagacctgggccgacctggtgcacccagatgcccaggacctgctggacaccctggaggacaaccgggagtggtaccagagcaagatccccaggagccccagcgacctgaccaaccctgagagagatggccctgaccgcttccagtttgagctgaccctggaggaggccgaggaggaggatgaggaggaggaggaggagggggaggagacagccctggccaaggaggccctggagctgcctgacacagagctgctgagccctgaggccggccctgaccccggggacctgcccctggacaaccagaggacatag

SEQ ID NO: 163915 - DNA, 2139 bp, synthetic construct
  misc_feature 1..2139: note = Description of Artificial Sequence: Synthetic coding sequence
  source 1..2139: mol_type = other DNA
atggagaacctgggcgtgggggagggcgctgaggcctgcagccggctgagccgcagccggggccgccacagcatgacccgggcccccaagcacctgtggaggcagccccggcggcccatccgcatccagcagcgcttctacagcgaccctgacaagtctgctggctgccgggagcgggacctgagccccaggcctgagctgaggaagagccggctgtcctggcctgtgagcagctgccgccgctttgacctggagaatggcctgagctgtggccggcgggccctggacccccagagcagccctggcctgggccgcatcatgcaggcccctgtgccccacagccagaggcgggagagcttcctgtacagaagtgacagcgactatgagctgagccccaaggccatgagcaggaacagctctgtggccagtgacctgcacggggaggacatgattgtgaccccatttgcccaggtgctggccagcctgaggacagtgcgcagcaatgtggccgccctggcccggcagcagtgcctgggcgccgccaagcagggccctgtgggcaaccccagcagcagcaaccagctgcccccagctgaggacaccggccagaagctggccctggagaccctggatgagctggactggtgcctggaccagctggagaccctgcagaccaggcacagcgtgggggagatggccagcaacaagttcaagaggatcctgaaccgggagctgacccacctgtctgagaccagccgcagcggcaaccaggtgtctgagtacatcagcaggaccttcctggaccagcagacagaggtggagctgcccaaggtgacagctgaggaggccccccagcccatgagccgcatcagcggcctgcacggcctgtgccacagcgccagcctgagcagcgccaccgtgccccgcttcggcgtgcagacagaccaggaggagcagctggccaaggagctggaggacaccaacaagtggggcctggatgtgttcaaggtggccgagctgagcggcaaccggcccctgacagccatcatcttcagcatcttccaggagcgggacctgctgaagaccttccagatcccagctgacaccctggccacctacctgctgatgctggagggccactaccacgccaacgtggcctaccacaacagcctgcatgctgctgatgtggcccagagcacccacgtgctgctggccaccccagccctggaggccgtgttcacagacctggagatcctggccgccctgtttgccagcgccatccatgatgtggaccaccctggggtgagcaaccagttcctgatcaacaccaacagcgagctggccctgatgtacaatgatgcctctgtgctggagaaccaccacctggccgtgggcttcaagctgctgcaggccgagaactgtgacatcttccagaacctgagcgccaagcagaggctgagcctgcggaggatggtgattgacatggtgctggccacagacatgagcaagcacatgaacctgctggccgacctgaagaccatggtggagaccaagaaggtgaccagcctgggcgtgctgctgctggacaactacagcgaccgcatccaggtgctgcagaacctggtgcactgtgccgacctgagcaaccccaccaagcccctgcccctgtaccggcagtggacagaccgcatcatggccgagttcttccagcagggcgaccgggagcgggagagcggcctggacatcagccccatgtgtgacaagcacacagcctctgtggagaagagccaggtgggcttcatcgactacatcgcccaccccctgtgggagacctgggccgacctggtgcacccagatgcccaggacctgctggacaccctggaggacaaccgggagtggtaccagagcaagatccccaggagccccagcgacctgaccaaccctgagagagatggccctgaccgcttccagtttgagctgaccctggaggaggccgaggaggaggatgaggaggaggaggaggagggggaggagacagccctggccaaggaggccctggagctgcctgacacagagctgctgagccctgaggccggccctgaccccggggacctgcccctggacaaccagaggacatag

SEQ ID NO: 163916 - DNA, 1821 bp, synthetic construct
  misc_feature 1..1821: note = Description of Artificial Sequence: Synthetic coding sequence
  source 1..1821: mol_type = other DNA
atgcaggcccctgtgccccacagccagaggcgggagagcttcctgtacagaagtgacagcgactatgagctgagccccaaggccatgagcaggaacagctctgtggccagtgacctgcacggggaggacatgattgtgaccccatttgcccaggtgctggccagcctgaggacagtgcgcagcaatgtggccgccctggcccggcagcagtgcctgggcgccgccaagcagggccctgtgggcaaccccagcagcagcaaccagctgcccccagctgaggacaccggccagaagctggccctggagaccctggatgagctggactggtgcctggaccagctggagaccctgcagaccaggcacagcgtgggggagatggccagcaacaagttcaagaggatcctgaaccgggagctgacccacctgtctgagaccagccgcagcggcaaccaggtgtctgagtacatcagcaggaccttcctggaccagcagacagaggtggagctgcccaaggtgacagctgaggaggccccccagcccatgagccgcatcagcggcctgcacggcctgtgccacagcgccagcctgagcagcgccaccgtgccccgcttcggcgtgcagacagaccaggaggagcagctggccaaggagctggaggacaccaacaagtggggcctggatgtgttcaaggtggccgagctgagcggcaaccggcccctgacagccatcatcttcagcatcttccaggagcgggacctgctgaagaccttccagatcccagctgacaccctggccacctacctgctgatgctggagggccactaccacgccaacgtggcctaccacaacagcctgcatgctgctgatgtggcccagagcacccacgtgctgctggccaccccagccctggaggccgtgttcacagacctggagatcctggccgccctgtttgccagcgccatccatgatgtggaccaccctggggtgagcaaccagttcctgatcaacaccaacagcgagctggccctgatgtacaatgatgcctctgtgctggagaaccaccacctggccgtgggcttcaagctgctgcaggccgagaactgtgacatcttccagaacctgagcgccaagcagaggctgagcctgcggaggatggtgattgacatggtgctggccacagacatgagcaagcacatgaacctgctggccgacctgaagaccatggtggagaccaagaaggtgaccagcctgggcgtgctgctgctggacaactacagcgaccgcatccaggtgctgcagaacctggtgcactgtgccgacctgagcaaccccaccaagcccctgcccctgtaccggcagtggacagaccgcatcatggccgagttcttccagcagggcgaccgggagcgggagagcggcctggacatcagccccatgtgtgacaagcacacagcctctgtggagaagagccaggtgggcttcatcgactacatcgcccaccccctgtgggagacctgggccgacctggtgcacccagatgcccaggacctgctggacaccctggaggacaaccgggagtggtaccagagcaagatccccaggagccccagcgacctgaccaaccctgagagagatggccctgaccgcttccagtttgagctgaccctggaggaggccgaggaggaggatgaggaggaggaggaggagggggaggagacagccctggccaaggaggccctggagctgcctgacacagagctgctgagccctgaggccggccctgaccccggggacctgcccctggacaaccagaggacatag

SEQ ID NO: 163917 - DNA, 2376 bp, synthetic construct
  misc_feature 1..2376: note = Description of Artificial Sequence: Synthetic coding sequence
  source 1..2376: mol_type = other DNA
ggcacccaggccggcctgcggagcggggcccccagcggccaccggcagctgctgggcgtgggccccaccctgagccccagcagcaccttctaccgcttcagcaccagcggggctgacagcagcagcctgagcccccccctgcctgccctgggccgcacccgggagcagaccctgctgggcgcccggagccggggccgggtgctgctgcctgccatcccagaccccttcctgtggaggatggagaacctgggcgtgggggagggcgctgaggcctgcagccggctgagccgcagccggggccgccacagcatgacccgggcccccaagcacctgtggaggcagccccggcggcccatccgcatccagcagcgcttctacagcgaccctgacaagtctgctggctgccgggagcgggacctgagccccaggcctgagctgaggaagagccggctgtcctggcctgtgagcagctgcagaagatttgacctggagaatggcctgagctgtggcagaagagccctggacccccagagcagccctggcctgggccgcatcatgcaggcccctgtgccccacagccagaggcgggagagcttcctgtacagaagtgacagcgactatgagctgagccccaaggccatgagcaggaacagctctgtggccagtgacctgcatggagaggacatgattgtgaccccatttgcccaggtgctggccagcctgaggacagtgcgcagcaatgtggccgccctggcccggcagcagtgcctgggcgccgccaagcagggccctgtgggcaaccccagcagcagcaaccagctgcccccagctgaggacaccggccagaagctggccctggagaccctggatgagctggactggtgcctggaccagctggagaccctgcagaccaggcacagcgtgggggagatggccagcaacaagttcaagaggatcctgaaccgggagctgacccacctgtctgagaccagccgcagcggcaaccaggtgtctgagtacatcagcaggaccttcctggaccagcagacagaggtggagctgcccaaggtgacagctgaggaggccccccagcccatgagccgcatcagcggcctgcacggcctgtgccacagcgccagcctgagcagcgccaccgtgcccaggtttggagtgcagacagaccaggaggagcagctggccaaggagctggaggacaccaacaagtggggcctggatgtgttcaaggtggccgagctgagcggcaaccggcccctgacagccatcatcttcagcatcttccaggagcgggacctgctgaagaccttccagatcccagctgacaccctggccacctacctgctgatgctggagggccactaccacgccaacgtggcctaccacaacagcctgcacgccgcagatgtggcccagagcacccacgtgctgctggccaccccagccctggaggccgtgttcacagacctggagatcctggccgccctgtttgccagcgccatccatgatgtggaccaccctggggtgagcaaccagttcctgatcaacaccaacagcgagctggccctgatgtacaatgatgcctctgtgctggagaaccaccacctggccgtgggcttcaagctgctgcaggccgagaactgtgacatcttccagaacctgagcgccaagcagaggctgagcctgcggaggatggtgattgacatggtgctggccacagacatgagcaagcacatgaacctgctggccgacctgaagaccatggtggagaccaagaaggtgaccagcctgggcgtgctgctgctggacaactacagcgaccgcatccaggtgctgcagaacctggtgcactgtgccgacctgagcaaccccaccaagcccctgcccctgtaccggcagtggacagaccgcatcatggccgagttcttccagcagggcgaccgggagcgggagagcggcctggacatcagccccatgtgtgacaagcacacagcctctgtggagaagagccaggtgggcttcatcgactacatcgcccaccccctgtgggagacctgggccgacctggtgcacccagatgcccaggacctgctggacaccctggaggacaaccgggagtggtaccagagcaagatccccaggagccccagcgacctgaccaaccctgagagagatggccctgaccgcttccagtttgagctgaccctggaggaggccgaggaggaggatgaggaggaggaggaggagggggaggagacagccctggccaaggaggccctggagctgcctgacacagagctgctgagccctgaggccggccctgaccccggggacctgcccctggacaaccagaggacatag

SEQ ID NO: 163918 - DNA, 2103 bp, synthetic construct
  misc_feature 1..2103: note = Description of Artificial Sequence: Synthetic coding sequence
  source 1..2103: mol_type = other DNA
gctgtgcagaagaggagcagagctgctggggcccggagcagcctgcatgctgtgctggccatgcagggccccccagccccagcccctgtgcccggccctggcagcccccggggcagcccccggggcagccctggcctcttcaggaagctgctggtgaaccagagcatccggctgcagaggcgcttcaccgtggcccaccccctgtgctttgacctggagaatggcctgagctgtggccggcgggccctggacccccagagcagccctggcctgggccgcatcatgcaggcccctgtgccccacagccagaggcgggagagcttcctgtacagaagtgacagcgactatgagctgagccccaaggccatgagcaggaacagctctgtggccagtgacctgcacggggaggacatgattgtgaccccatttgcccaggtgctggccagcctgaggacagtgcgcagcaatgtggccgccctggcccggcagcagtgcctgggcgccgccaagcagggccctgtgggcaaccccagcagcagcaaccagctgcccccagctgaggacaccggccagaagctggccctggagaccctggatgagctggactggtgcctggaccagctggagaccctgcagaccaggcacagcgtgggggagatggccagcaacaagttcaagaggatcctgaaccgggagctgacccacctgtctgagaccagccgcagcggcaaccaggtgtctgagtacatcagcaggaccttcctggaccagcagacagaggtggagctgcccaaggtgacagctgaggaggccccccagcccatgagccgcatcagcggcctgcacggcctgtgccacagcgccagcctgagcagcgccaccgtgccccgcttcggcgtgcagacagaccaggaggagcagctggccaaggagctggaggacaccaacaagtggggcctggatgtgttcaaggtggccgagctgagcggcaaccggcccctgacagccatcatcttcagcatcttccaggagcgggacctgctgaagaccttccagatcccagctgacaccctggccacctacctgctgatgctggagggccactaccacgccaacgtggcctaccacaacagcctgcatgctgctgatgtggcccagagcacccacgtgctgctggccaccccagccctggaggccgtgttcacagacctggagatcctggccgccctgtttgccagcgccatccatgatgtggaccaccctggggtgagcaaccagttcctgatcaacaccaacagcgagctggccctgatgtacaatgatgcctctgtgctggagaaccaccacctggccgtgggcttcaagctgctgcaggccgagaactgtgacatcttccagaacctgagcgccaagcagaggctgagcctgcggaggatggtgattgacatggtgctggccacagacatgagcaagcacatgaacctgctggccgacctgaagaccatggtggagaccaagaaggtgaccagcctgggcgtgctgctgctggacaactacagcgaccgcatccaggtgctgcagaacctggtgcactgtgccgacctgagcaaccccaccaagcccctgcccctgtaccggcagtggacagaccgcatcatggccgagttcttccagcagggcgaccgggagcgggagagcggcctggacatcagccccatgtgtgacaagcacacagcctctgtggagaagagccaggtgggcttcatcgactacatcgcccaccccctgtgggagacctgggccgacctggtgcacccagatgcccaggacctgctggacaccctggaggacaaccgggagtggtaccagagcaagatccccaggagccccagcgacctgaccaaccctgagagagatggccctgaccgcttccagtttgagctgaccctggaggaggccgaggaggaggatgaggaggaggaggaggagggggaggagacagccctggccaaggaggccctggagctgcctgacacagagctgctgagccctgaggccggccctgaccccggggacctgcccctggacaaccagaggacatag

SEQ ID NO: 163919 - DNA, 1446 bp, synthetic construct
  misc_feature 1..1446: note = Description of Artificial Sequence: Synthetic coding sequence
  source 1..1446: mol_type = other DNA
atggccagcaacaagttcaagaggatcctgaaccgggagctgacccacctgtctgagaccagccgcagcggcaaccaggtgtctgagtacatcagcaggaccttcctggaccagcagacagaggtggagctgcccaaggtgacagctgaggaggccccccagcccatgagccgcatcagcggcctgcacggcctgtgccacagcgccagcctgagcagcgccaccgtgcccaggtttggagtgcagacagaccaggaggagcagctggccaaggagctggaggacaccaacaagtggggcctggatgtgttcaaggtggccgagctgagcggcaaccggcccctgacagccatcatcttcagcatcttccaggagcgggacctgctgaagaccttccagatcccagctgacaccctggccacctacctgctgatgctggagggccactaccacgccaacgtggcctaccacaacagcctgcacgccgcagatgtggcccagagcacccacgtgctgctggccaccccagccctggaggccgtgttcacagacctggagatcctggccgccctgtttgccagcgccatccatgatgtggaccaccctggggtgagcaaccagttcctgatcaacaccaacagcgagctggccctgatgtacaatgatgcctctgtgctggagaaccaccacctggccgtgggcttcaagctgctgcaggccgagaactgtgacatcttccagaacctgagcgccaagcagaggctgagcctgcggaggatggtgattgacatggtgctggccacagacatgagcaagcacatgaacctgctggccgacctgaagaccatggtggagaccaagaaggtgaccagcctgggcgtgctgctgctggacaactacagcgaccgcatccaggtgctgcagaacctggtgcactgtgccgacctgagcaaccccaccaagcccctgcccctgtaccggcagtggacagaccgcatcatggccgagttcttccagcagggcgaccgggagcgggagagcggcctggacatcagccccatgtgtgacaagcacacagcctctgtggagaagagccaggtgggcttcatcgactacatcgcccaccccctgtgggagacctgggccgacctggtgcacccagatgcccaggacctgctggacaccctggaggacaaccgggagtggtaccagagcaagatccccaggagccccagcgacctgaccaaccctgagagagatggccctgaccgcttccagtttgagctgaccctggaggaggccgaggaggaggatgaggaggaggaggaggagggggaggagacagccctggccaaggaggccctggagctgcctgacacagagctgctgagccctgaggccggccctgaccccggggacctgcccctggacaaccagaggacatag

SEQ ID NO: 163920 - DNA, 2466 bp, synthetic construct
  misc_feature 1..2466: note = Description of Artificial Sequence: Synthetic coding sequence
  source 1..2466: mol_type = other DNA
atgcagcgctaccggggccggcagacagtgtttggagctggggtgctgggcggcgtgtcctctgcccccagcttcaacacccccagccccaggagcagccccctcttctaccccagcgcccccagcggccaccggcagctgctgggcgtgggccccaccctgagccccagcagcaccttctaccgcttcagcaccagcggggctgacagcagcagcctgagcccccccctgcctgccctgggccgcacccgggagcagaccctgctgggcgcccggagccggggccgggtgctgctgcctgccatcccagaccccttcctgtggaggatggagaacctgggcgtgggggagggcgctgaggcctgcagccggctgagccgcagccggggccgccacagcatgacccgggcccccaagcacctgtggaggcagccccggcggcccatccgcatccagcagcgcttctacagcgaccctgacaagtctgctggctgccgggagcgggacctgagccccaggcctgagctgaggaagagccggctgtcctggcctgtgagcagctgcagaagatttgacctggagaatggcctgagctgtggcagaagagccctggacccccagagcagccctggcctgggccgcatcatgcaggcccctgtgccccacagccagaggcgggagagcttcctgtacagaagtgacagcgactatgagctgagccccaaggccatgagcaggaacagctctgtggccagtgacctgcatggagaggacatgattgtgaccccatttgcccaggtgctggccagcctgaggacagtgcgcagcaatgtggccgccctggcccggcagcagtgcctgggcgccgccaagcagggccctgtgggcaaccccagcagcagcaaccagctgcccccagctgaggacaccggccagaagctggccctggagaccctggatgagctggactggtgcctggaccagctggagaccctgcagaccaggcacagcgtgggggagatggccagcaacaagttcaagaggatcctgaaccgggagctgacccacctgtctgagaccagccgcagcggcaaccaggtgtctgagtacatcagcaggaccttcctggaccagcagacagaggtggagctgcccaaggtgacagctgaggaggccccccagcccatgagccgcatcagcggcctgcacggcctgtgccacagcgccagcctgagcagcgccaccgtgcccaggtttggagtgcagacagaccaggaggagcagctggccaaggagctggaggacaccaacaagtggggcctggatgtgttcaaggtggccgagctgagcggcaaccggcccctgacagccatcatcttcagcatcttccaggagcgggacctgctgaagaccttccagatcccagctgacaccctggccacctacctgctgatgctggagggccactaccacgccaacgtggcctaccacaacagcctgcacgccgcagatgtggcccagagcacccacgtgctgctggccaccccagccctggaggccgtgttcacagacctggagatcctggccgccctgtttgccagcgccatccatgatgtggaccaccctggggtgagcaaccagttcctgatcaacaccaacagcgagctggccctgatgtacaatgatgcctctgtgctggagaaccaccacctggccgtgggcttcaagctgctgcaggccgagaactgtgacatcttccagaacctgagcgccaagcagaggctgagcctgcggaggatggtgattgacatggtgctggccacagacatgagcaagcacatgaacctgctggccgacctgaagaccatggtggagaccaagaaggtgaccagcctgggcgtgctgctgctggacaactacagcgaccgcatccaggtgctgcagaacctggtgcactgtgccgacctgagcaaccccaccaagcccctgcccctgtaccggcagtggacagaccgcatcatggccgagttcttccagcagggcgaccgggagcgggagagcggcctggacatcagccccatgtgtgacaagcacacagcctctgtggagaagagccaggtgggcttcatcgactacatcgcccaccccctgtgggagacctgggccgacctggtgcacccagatgcccaggacctgctggacaccctggaggacaaccgggagtggtaccagagcaagatccccaggagccccagcgacctgaccaaccctgagagagatggccctgaccgcttccagtttgagctgaccctggaggaggccgaggaggaggatgaggaggaggaggaggagggggaggagacagccctggccaaggaggccctggagctgcctgacacagagctgctgagccctgaggccggccctgaccccggggacctgcccctggacaaccagaggacatag

SEQ ID NO: 163921 - DNA, 1557 bp, synthetic construct
  misc_feature 1..1557: note = Description of Artificial Sequence: Synthetic coding sequence
  source 1..1557: mol_type = other DNA
cccctgcgcatccggcccctgctgcccacagcctaccacctgctgcccactggacctggccagagcgctgacagaagtgagcagaggggcggcccctgccccccagccatgcccaggagcagccagttcaagaggatcctgaaccgggagctgacccacctgtctgagaccagccgcagcggcaaccaggtgtctgagtacatcagcaggaccttcctggaccagcagacagaggtggagctgcccaaggtgacagctgaggaggccccccagcccatgagccgcatcagcggcctgcacggcctgtgccacagcgccagcctgagcagcgccaccgtgccccgcttcggcgtgcagacagaccaggaggagcagctggccaaggagctggaggacaccaacaagtggggcctggatgtgttcaaggtggccgagctgagcggcaaccggcccctgacagccatcatcttcagcatcttccaggagcgggacctgctgaagaccttccagatcccagctgacaccctggccacctacctgctgatgctggagggccactaccacgccaacgtggcctaccacaacagcctgcatgctgctgatgtggcccagagcacccacgtgctgctggccaccccagccctggaggccgtgttcacagacctggagatcctggccgccctgtttgccagcgccatccatgatgtggaccaccctggggtgagcaaccagttcctgatcaacaccaacagcgagctggccctgatgtacaatgatgcctctgtgctggagaaccaccacctggccgtgggcttcaagctgctgcaggccgagaactgtgacatcttccagaacctgagcgccaagcagaggctgagcctgcggaggatggtgattgacatggtgctggccacagacatgagcaagcacatgaacctgctggccgacctgaagaccatggtggagaccaagaaggtgaccagcctgggcgtgctgctgctggacaactacagcgaccgcatccaggtgctgcagaacctggtgcactgtgccgacctgagcaaccccaccaagcccctgcccctgtaccggcagtggacagaccgcatcatggccgagttcttccagcagggcgaccgggagcgggagagcggcctggacatcagccccatgtgtgacaagcacacagcctctgtggagaagagccaggtgggcttcatcgactacatcgcccaccccctgtgggagacctgggccgacctggtgcacccagatgcccaggacctgctggacaccctggaggacaaccgggagtggtaccagagcaagatccccaggagccccagcgacctgaccaaccctgagagagatggccctgaccgcttccagtttgagctgaccctggaggaggccgaggaggaggatgaggaggaggaggaggagggggaggagacagccctggccaaggaggccctggagctgcctgacacagagctgctgagccctgaggccggccctgaccccggggacctgcccctggacaaccagaggacatag

SEQ ID NO: 163922 - DNA, 6723 bp, synthetic construct
  misc_feature 1..6723: note = Description of Artificial Sequence: Synthetic coding sequence
  source 1..6723: mol_type = other DNA
atggagcagacctggacccgggactactttgctgaagatgatggagagatggtgcccaggaccagccacacagctgccttcctgagtgacaccaaggaccggggcccccctgtgcagagccagatctggaggtctggagagaaggtgccctttgtgcagacctacagcctgcgggcctttgagaagccaccccaggtgcagacccaggccctgcgggactttgagaagcacctgaatgacctgaagaaggagaacttcagcctgaagctgcgcatctacttcctggaggagaggatgcagcagaagtatgaggccagccgggaggacatctacaagagaaatattgagctgaaggtggaggtggagagcctgaagcgggagctgcaggacaagaagcagcacctggacaagacctgggcagatgtggagaacctgaacagccagaatgaagctgagctgcggcggcagtttgaggagcggcagcaggagacagagcacgtgtatgagctgctggagaacaagatccagctgctgcaggaggagagccggctggccaagaatgaagctgccaggatggccgccctggtggaggccgagaaggagtgcaacctggagctgtctgagaagctgaagggcgtgaccaagaactgggaggatgtgcctggggaccaggtgaagccagaccagtacacagaggccctggcccagagggacaagagaattgaggagctgaaccagagcctggccgcccaggagcggctggtggagcagctgagccgggagaagcagcagctgctgcacctgctggaggagcccacctccatggaggtgcagcccatgacagaggagctgctgaagcagcagaagctgaacagccatgagaccaccatcacccagcagagcgtgtctgacagccacctggccgagctgcaggagaagatccagcagacagaggccaccaacaagatcctgcaggagaagctgaatgagatgtcctatgagctgaagtgtgcccaggagagcagccagaagcaggacggcaccatccagaacctgaaggagaccctgaagagccgggagcgggagacagaggagctgtaccaggtgattgagggccagaatgacaccatggccaagctgcgggagatgctgcaccagagccagctgggccagctgcacagcagcgagggcaccagccctgcccagcagcaggtggccctgctggacctgcagagcgccctcttctgcagccagctggagatccagaagctgcagagggtggtgcggcagaaggagcggcagctggctgatgccaagcagtgtgtgcagtttgtggaggccgccgcccacgagagcgagcagcagaaggaggcctcctggaagcacaaccaggagctgaggaaggccctgcagcagctgcaggaggagctgcagaacaagagccagcagctgcgggcctgggaggccgagaagtacaatgagatccgcacccaggagcagaacatccagcacctgaaccacagcctgagccacaaggagcagctgctgcaggagttccgggagctgctgcagtacagagacaacagcgacaagaccctggaggccaatgagatgctgctggagaagctgcggcagagaattcatgacaaggctgtggccctggagcgggccattgatgagaagttcagcgccctggaggagaaggagaaggagctgcggcagctgcggctggccgtgcgggagcgggaccatgacctggagcggctgagagatgtgctgagcagcaatgaggccaccatgcagagcatggagagcctgctgcgggccaagggcctggaggtggagcagctgagcaccacctgccagaacctgcagtggctgaaggaggagatggagaccaagttcagccgctggcagaaggagcaggagagcatcatccagcagctgcagaccagcctgcatgacaggaacaaggaggtggaggacctgagcgccaccctgctgtgcaagctgggccctggccagagcgagattgctgaggagctgtgccagaggctgcagaggaaggagaggatgctgcaggacctgctgagtgacaggaacaagcaggtgctggagcacgagatggagatccagggcctgctgcagagcgtgtccacccgggagcaggagagccaggccgctgctgagaagctggtgcaggccctgatggagagaaattctgagctgcaggccctgcggcagtacctgggcggccgggacagcctgatgagccaggcccccatcagcaaccagcaggccgaggtgacccccaccggctgcctgggcaagcagacagaccagggctccatgcagatccccagcagagatgacagcaccagcctgacagccaaggaggatgtgtccatccccaggagcaccctgggggacctggacacagtggccggcctggagaaggagctgagcaatgccaaggaggagctggagctgatggccaagaaggagcgggagagccagatggagctgagcgccctgcagagcatgatggctgtgcaggaggaggagctgcaggtgcaggccgctgacatggagagcctgaccaggaacatccagatcaaggaggacctgatcaaggacctgcagatgcagctggtggaccctgaggacatcccagccatggagcggctgacccaggaggtgctgctgctgcgggagaaggtggcctctgtggagagccagggccaggagatcagcggcaacagacggcagcagctgctgctgatgctggagggcctggtggatgagaggagccggctgaatgaggccctgcaggccgagcggcagctgtacagcagcctggtgaagttccacgcccaccctgagagcagcgagcgggacaggaccctgcaggtggagctggagggcgcccaggtgctgcggagccggctggaggaggtgctgggccgcagcctggagcggctgaaccggctggagaccctggccgccatcggcggcgctgctgctggagatgacacagaggacaccagcacagagttcacagacagcattgaggaggaggccgcccaccacagccaccagcagctggtgaaggtggccctggagaagagcctggccaccgtggagacccagaaccccagcttcagcccccccagccccatgggcggggacagcaaccgctgcctgcaggaggagatgctgcacctgcgggcagagttccaccagcacctggaggagaagaggaaggccgaggaggagctgaaggagctgaaggcccagatcgaggaggccggcttcagctctgtgagccacatccggaacaccatgctgagcctgtgcctggagaatgctgagctgaaggagcagatgggagaggccatgtctgatggctgggagattgaggaggacaaggagaagggggagctggacaaccagagccagccccgggaccccggcccccagagcgccttcagcctgcccggcagcacccagcacctgcggagccagctgagccagtgcaagcagcgctaccaggacctgcaggagaagctgctgctgtctgaggccaccgtgtttgcccaggccaatgagctggagaagtacagagtgatgctgaccggggagagcctggtgaagcaggacagcaagcagatccaggtggacctgcaggacctgggctatgagacctgtggccgctcagaaaatgaagctgagcgggaggagaccaccagcccagaatgtgaggagcacaacagcctgaaggagatggtgctgatggagggcctgtgcagcgagcagggccggcggggcagcaccctggccagcagcagcgagaggaagcccctggagaaccagctgggcaagcaggaggagttccgggtgtatggcaagtctgagaacatcctggtgctgaggaaggacatcaaggacctgaaggcccagctgcagaatgccaacaaggtgatccagaacctgaagagccgggtgcgcagcctgtctgtgaccagtgactacagcagcagcctggagcggccctggaagctgcgggctgtgggcaccctggagggcagcagcccccacagcgtgcctgatgaagatgagggctggctgagtgatggcaccggggccttctacagccctggcctgcaggccaagaaggacctggagagcctcatccagagggtgtcccagctggaggcccagctgcccaagaatggcctggaggagaagctggccgaggagctgcggagcgcctcctggccaggcaagtatgacagcctcatccaggaccaggcccgggagctgagctacctgcggcagaagatccgggagggccggggcatctgctacctgatcaccaggcatgccaaggacacagtgaagagctttgaggacctgctgcggagcaatgacatcgactactacctgggccagagcttccgggagcagctggcccagggcagccagctgacagagcggctgaccagcaagctgagcaccaaggaccacaagtctgagaaggaccaggccggcctggagcccctggccctgcggctgagccgggagctgcaggagaaggagaaggtgattgaggtgctgcaggccaagctggatgcccggagcctgacccccagcagcagccacgccctgagtgacagccacaggagccccagcagcaccagcttcctgagtgatgagctggaggcctgcagcgacatggacatcgtgtctgagtacacccactatgaggagaagaaggccagccccagccacagcgacagcatccaccacagcagccacagcgctgtgctgagcagcaagcccagcagcaccagcgccagccagggcgccaaggccgagagcaacagcaaccccatcagcctgcccaccccccagaacacccccaaggaggccaaccaggcccacagcggggccagcacagtgcccccagccagcacagccaccctgctgagcaatgacctggaggccgacagcagctactacctgaacagcgcccagccccacagccccccccggggcaccatcgagctgggccgcatcctggagcccggctacctgggcagcagcggcaagtgggatgtgatgaggccccagaagggctctgtgtctggggacctgagcagcggcagctctgtgtaccagctgaacagcaagcccactggagctgacctgctggaggagcacctgggggagatccggaacctgcggcagaggctggaggagagcatctgcatcaatgaccggctgcgggagcagctggagcaccggctgaccagcacagcccggggccggggcagcaccagcaacttctacagccagggcctggagagcatcccccagctgtgcaatgaaaatagagtgctgcgggaggacaacagaaggctgcaggcccagctgagccacgtgtcccgggagcacagccaggagacagagagcctgcgggaggccctgctgagcagccgcagccacctgcaggagctggagaaggagctggagcaccagaaggtggagcggcagcagctgctggaggacctgcgggagaagcagcaggaggtgctgcacttccgggaggagcggctgagcctgcaggagaatgacagccggctgcagcacaagctggtgctgctgcagcagcagtgtgaggagaagcagcagctgtttgagagcctgcagagcgagctgcagatctatgaggccctgtatggcaacagcaagaagggcctgaaggcctacagcctggatgcctgccaccagatccccctgagcagtgacctgagccacctggtggccgaggtgcgggccctgcggggccagctggagcagagcatccagggcaacaactgcctgcggctgcagctgcagcagcagctggagagcggggccggcaaggccagcctgagccccagcagcatcaaccagaacttccctgccagcacagaccccggcaacaagcagctgctgctgcaggacagcgctgtgagcccccctgtgagagatgtgggcatgaacagccctgccctggtgttccccagcagcgccagcagcaccccaggcagcgagacccccatcatcaacagagccaacggcctgggcctggacaccagccctgtgatgaagaccccacccaagctggagggagatgccacagatggcagctttgccaacaagcacggcagacatgtgattggccacattgatgactacagcgccctgcggcagcagattgctgagggcaagctgctggtgaagaagatcgtgtccctggtgcgcagcgcctgcagcttccctggcctggaggcccagggcacagaggtgctgggcagcaagggcatccacgagctgcggagcagcaccagcgccctgcaccacgccctggaggagagcgccagcctgctgaccatgttctggagggctgccctgcccagcacccacatccctgtgctgcccgggaaggtgggggagagcacagagcgggagctgctggagctgcggaccaaggtgtccaagcaggagcggctgctgcagagcaccacagagcacctgaagaatgccaaccagcagaaggagagcatggagcagttcatcgtgtcccagctgaccaggacccatgatgtgctgaagaaggcccggaccaacctggaggtgaagagcctgcgggccctgccctgcaccccagccctgtag

SEQ ID NO: 163923 - DNA, 3399 bp, synthetic construct
  misc_feature 1..3399: note = Description of Artificial Sequence: Synthetic coding sequence
  source 1..3399: mol_type = other DNA
atgaaggagatctgccgcatctgtgcccgggagctgtgtggcaaccagaggcgctggatcttccacacagccagcaagctgaacctgcaggtgctgctgagccacgtgctgggcaaggatgtgcccagagatggcaaggccgagtttgcctgcagcaaatgtgccttcatgctggaccgcatctacagatttgacaccgtcatcgccagaattgaggccctgagcattgaaaggctgcagaagctgctgctggagaaggaccggctgaagttctgcatcgcctccatgtacaggaagaacaatgatgacagcggggctgagatcaaggctggaaatggcaccgtggacatgtctgtgctgcctgatgcccgctacagcgccctgctgcaggaggactttgcctacagcggctttgagtgctgggtggagaatgaagaccagatccaggagccccacagctgccacggcagcgagggccctggcaaccggccccggcgctgccggggctgtgccgccctgcgggtggccgacagcgactatgaggccatctgcaaggtgcccaggaaggtggcccggagcatcagctgtggccccagcagccgctggagcaccagcatctgcacagaggagcccgccctgtctgaggtgggccccccagacctggccagcaccaaggtgcccccagatggagagagcatggaggaggagaccccaggcagctctgtggagagcctggatgcctctgtgcaggccagccccccccagcagaaggatgaggagacagagaggtctgccaaggagctgggcaaatgtgactgctgcagtgatgaccaggccccccagcacggctgcaaccacaagctggagctggccctgtccatgatcaagggcctggactacaagcccatccagagcccccggggcagccggctgcccatccctgtgaagagcagcctgcccggggccaagccaggccccagcatgacagatggagtgagcagcggcttcctgaacagaagcctgaagcccctgtacaagacccctgtgtcctaccccctggagctgagtgacctgcaggagctgtgggatgacctgtgtgaggactacctgcccctgcgggtgcagcccatgacagaggagctgctgaagcagcagaagctgaacagccatgagaccaccatcacccagcagagcgtgtctgacagccacctggccgagctgcaggagaagatccagcagacagaggccaccaacaagatcctgcaggagaagctgaatgagatgtcctatgagctgaagtgtgcccaggagagcagccagaagcaggacggcaccatccagaacctgaaggagaccctgaagagccgggagcgggagacagaggagctgtaccaggtgattgagggccagaatgacaccatggccaagctgcgggagatgctgcaccagagccagctgggccagctgcacagcagcgagggcaccagccctgcccagcagcaggtggccctgctggacctgcagagcgccctcttctgcagccagctggagatccagaagctgcagagggtggtgcggcagaaggagcggcagctggctgatgccaagcagtgtgtgcagtttgtggaggccgccgcccatgaaagtgagcagcagaaggaggcctcctggaagcacaaccaggagctgaggaaggccctgcagcagctgcaggaggagctgcagaacaagagccagcagctgcgggcctgggaggccgagaagtacaatgagatccgcacccaggagcagaacatccagcacctgaaccacagcctgagccacaaggagcagctgctgcaggagttccgggagctgctgcagtacagagacaacagcgacaagaccctggaggccaatgagatgctgctggagaagctgcggcagagaattcatgacaaggctgtggccctggagcgggccattgatgagaagttcagcgccctggaggagaaggagaaggagctgcggcagctgcggctggccgtgcgggagcgggaccatgacctggagcggctgagagatgtgctgagcagcaatgaggccaccatgcagagcatggagagcctgctgcgggccaagggcctggaggtggagcagctgagcaccacctgccagaacctgcagtggctgaaggaggagatggagaccaagttcagccgctggcagaaggagcaggagagcatcatccagcagctgcagaccagcctgcatgacaggaacaaggaggtggaggacctgagcgccaccctgctgtgcaagctgggccctggccagagcgagattgctgaggagctgtgccagaggctgcagaggaaggagaggatgctgcaggacctgctgagtgacaggaacaagcaggtgctggagcacgagatggagatccagggcctgctgcagagcgtgtccacccgggagcaggagagccaggccgctgctgagaagctggtgcaggccctgatggagaggaacagcgagctgcaggccctgcggcagtacctgggcggccgggacagcctgatgagccaggcccccatcagcaaccagcaggccgaggtgacccccaccggctgcctgggcaagcagacagaccagggctccatgcagatccccagcagagatgacagcaccagcctgacagccaaggaggatgtgtccatccccaggagcaccctgggggacctggacacagtggccggcctggagaaggagctgagcaatgccaaggaggagctggagctgatggccaagaaggagcgggagagccagatggagctgagcgccctgcagagcatgatggctgtgcaggaggaggagctgcaggtgcaggccgctgacatggagagcctgaccaggaacatccagatcaaggaggacctgatcaaggacctgcagatgcagctggtggaccctgaggacatcccagccatggagcggctgacccaggaggtgctgctgctgcgggagaaggtggcctctgtggagagccagggccaggagatcagcggcaacagacggcagcagctgctgctgatgctggagggcctggtggatgagaggagccggctgaatgaggccctgcaggccgagcggcagctgtacagcagcctggtgaagttccacgcccaccctgagagcagcgagcgggacaggaccctgcaggtggagctggagggcgcccaggtgctgcggagccggctggaggaggtgctgggccgcagcctggagcggctgaaccggctggagaccctggccgccatcggcggcgctgctgctggagatgacacagaggacaccagcacagagttcacagacagcattgaggaggaggccgcccaccacagccaccagcagctgtag

SEQ ID NO: 163924 - DNA, 522 bp, synthetic construct
  misc_feature 1..522: note = Description of Artificial Sequence: Synthetic coding sequence
  source 1..522: mol_type = other DNA
atgagcaatggctaccgcaccctgagccagcacctgaatgacctgaagaaggagaacttcagcctgaagctgcgcatctacttcctggaggagaggatgcagcagaagtatgaggccagccgggaggacatctacaagagaaatattgagctgaaggtggaggtggagagcctgaagcgggagctgcaggacaagaagcagcacctggacaagacctgggcagatgtggagaacctgaacagccagaatgaagctgagctgcggcggcagtttgaggagcggcagcaggagacagagcacgtgtatgagctgctggagaacaagatccagctgctgcaggaggagagccggctggccaagaatgaagctgccaggatggccgccctggtggaggccgagaaggagtgcaacctggagctgtctgagaagctgaagggcgtgaccaagaactgggaggatgtgcctggggaccaggtgaagccagaccagtacacagaggccctggcccagagggacaagtag

SEQ ID NO: 163925 - DNA, 933 bp, synthetic construct
  misc_feature 1..933: note = Description of Artificial Sequence: Synthetic coding sequence
  source 1..933: mol_type = other DNA
atgaagggcacagacagcggcagctgctgcagaagaagatgtgactttggctgctgctgccgggccagccggcgggcccactacaccccctacagaagtggagatgccaccaggaccccccagagcccccggcagacccccagccgggagcggcggcggcctgagcctgctggctcctgggccgctgctgctgaggaggaggaggccgctgctgctgccaccccctggatgagggactactttgctgaagatgatggagagatggtgcccaggaccagccacacagctgccttcctgagtgacaccaaggaccggggcccccctgtgcagagccagatctggaggtctggagagaaggtgccctttgtgcagacctacagcctgcgggcctttgagaagccaccccaggtgcagacccaggccctgcgggactttgagaagcacctgaatgacctgaagaaggagaacttcagcctgaagctgcgcatctacttcctggaggagaggatgcagcagaagtatgaggccagccgggaggacatctacaagaggaacatcgagctgaaggtggaggtggagagcctgaagcgggagctgcaggacaagaagcagcacctggacaagacctgggcagatgtggagaacctgaacagccagaatgaggccgagctgcggcggcagtttgaggagcggcagcaggagacagaacatgtgtatgagctgctggagaacaagatccagctgctgcaggaggagagccggctggccaagaatgaggccgccaggatggccgccctggtggaggccgagaaggagtgcaacctggagctgtctgagaagctgaagggcgtgaccaagaactgggaggatgtgcctggggaccaggtgaagccagaccagtacacagaggccctggcccagagggacaagtag

SEQ ID NO: 163926 - DNA, 2910 bp, synthetic construct
  misc_feature 1..2910: note = Description of Artificial Sequence: Synthetic coding sequence
  source 1..2910: mol_type = other DNA
atgagcaatggctaccgcaccctgagccagcacctgaatgacctgaagaaggagaacttcagcctgaagctgcgcatctacttcctggaggagaggatgcagcagaagtatgaggccagccgggaggacatctacaagagaaatattgagctgaaggtggaggtggagagcctgaagcgggagctgcaggacaagaagcagcacctggacaagacctgggcagatgtggagaacctgaacagccagaatgaagctgagctgcggcggcagtttgaggagcggcagcaggagacagagcacgtgtatgagctgctggagaacaagatccagctgctgcaggaggagagccggctggccaagaatgaagctgccaggatggccgccctggtggaggccgagaaggagtgcaacctggagctgtctgagaagctgaagggcgtgaccaagaactgggaggatgtgcctggggaccaggtgaagccagaccagtacacagaggccctggcccagagggacaagagaattgaggagctgaaccagagcctggccgcccaggagcggctggtggagcagctgagccgggagaagcagcagctgctgcacctgctggaggagcccacctccatggaggtgcagcccatgacagaggagctgctgaagcagcagaagctgaacagccatgagaccaccatcacccagcagagcgtgtctgacagccacctggccgagctgcaggagaagatccagcagacagaggccaccaacaagatcctgcaggagaagctgaatgagatgtcctatgagctgaagtgtgcccaggagagcagccagaagcaggacggcaccatccagaacctgaaggagaccctgaagagccgggagcgggagacagaggagctgtaccaggtgattgagggccagaatgacaccatggccaagctgcgggagatgctgcaccagagccagctgggccagctgcacagcagcgagggcaccagccctgcccagcagcaggtggccctgctggacctgcagagcgccctcttctgcagccagctggagatccagaagctgcagagggtggtgcggcagaaggagcggcagctggctgatgccaagcagtgtgtgcagtttgtggaggccgccgcccacgagagcgagcagcagaaggaggcctcctggaagcacaaccaggagctgaggaaggccctgcagcagctgcaggaggagctgcagaacaagagccagcagctgcgggcctgggaggccgagaagtacaatgagatccgcacccaggagcagaacatccagcacctgaaccacagcctgagccacaaggagcagctgctgcaggagttccgggagctgctgcagtacagagacaacagcgacaagaccctggaggccaatgagatgctgctggagaagctgcggcagagaattcatgacaaggctgtggccctggagcgggccattgatgagaagttcagcgccctggaggagaaggagaaggagctgcggcagctgcggctggccgtgcgggagcgggaccatgacctggagcggctgagagatgtgctgagcagcaatgaggccaccatgcagagcatggagagcctgctgcgggccaagggcctggaggtggagcagctgagcaccacctgccagaacctgcagtggctgaaggaggagatggagaccaagttcagccgctggcagaaggagcaggagagcatcatccagcagctgcagaccagcctgcatgacaggaacaaggaggtggaggacctgagcgccaccctgctgtgcaagctgggccctggccagagcgagattgctgaggagctgtgccagaggctgcagaggaaggagaggatgctgcaggacctgctgagtgacaggaacaagcaggtgctggagcacgagatggagatccagggcctgctgcagagcgtgtccacccgggagcaggagagccaggccgctgctgagaagctggtgcaggccctgatggagagaaattctgagctgcaggccctgcggcagtacctgggcggccgggacagcctgatgagccaggcccccatcagcaaccagcaggccgaggtgacccccaccggctgcctgggcaagcagacagaccagggctccatgcagatccccagcagagatgacagcaccagcctgacagccaaggaggatgtgtccatccccaggagcaccctgggggacctggacacagtggccggcctggagaaggagctgagcaatgccaaggaggagctggagctgatggccaagaaggagcgggagagccagatggagctgagcgccctgcagagcatgatggctgtgcaggaggaggagctgcaggtgcaggccgctgacatggagagcctgaccaggaacatccagatcaaggaggacctgatcaaggacctgcagatgcagctggtggaccctgaggacatcccagccatggagcggctgacccaggaggtgctgctgctgcgggagaaggtggcctctgtggagagccagggccaggagatcagcggcaacagacggcagcagctgctgctgatgctggagggcctggtggatgagaggagccggctgaatgaggccctgcaggccgagcggcagctgtacagcagcctggtgaagttccacgcccaccctgagagcagcgagcgggacaggaccctgcaggtggagctggagggcgcccaggtgctgcggagccggctggaggaggtgctgggccgcagcctggagcggctgaaccggctggagaccctggccgccatcggcggcgctgctgctggagatgacacagaggacaccagcacagagttcacagacagcattgaggaggaggccgcccaccacagccaccagcagctgtag

SEQ ID NO: 163927 - DNA, 2967 bp, synthetic construct
  misc_feature 1..2967: note = Description of Artificial Sequence: Synthetic coding sequence
  source 1..2967: mol_type = other DNA
atgagcaatggctaccgcaccctgagccagcacctgaatgacctgaagaaggagaacttcagcctgaagctgcgcatctacttcctggaggagaggatgcagcagaagtatgaggccagccgggaggacatctacaagagaaatattgagctgaaggtggaggtggagagcctgaagcgggagctgcaggacaagaagcagcacctggacaagacctgggcagatgtggagaacctgaacagccagaatgaagctgagctgcggcggcagtttgaggagcggcagcaggagacagagcacgtgtatgagctgctggagaacaagatccagctgctgcaggaggagagccggctggccaagaatgaagctgccaggatggccgccctggtggaggccgagaaggagtgcaacctggagctgtctgagaagctgaagggcgtgaccaagaactgggaggatgtgcctggggaccaggtgaagccagaccagtacacagaggccctggcccagagggacaagagaattgaggagctgaaccagagcctggccgcccaggagcggctggtggagcagctgagccgggagaagcagcagctgctgcacctgctggaggagcccacctccatggaggtgcagcccatgacagaggagctgctgaagcagcagaagctgaacagccatgagaccaccatcacccagcagagcgtgtctgacagccacctggccgagctgcaggagaagatccagcagacagaggccaccaacaagatcctgcaggagaagctgaatgagatgtcctatgagctgaagtgtgcccaggagagcagccagaagcaggacggcaccatccagaacctgaaggagaccctgaagagccgggagcgggagacagaggagctgtaccaggtgattgagggccagaatgacaccatggccaagctgcgggagatgctgcaccagagccagctgggccagctgcacagcagcgagggcaccagccctgcccagcagcaggtggccctgctggacctgcagagcgccctcttctgcagccagctggagatccagaagctgcagagggtggtgcggcagaaggagcggcagctggctgatgccaagcagtgtgtgcagtttgtggaggccgccgcccacgagagcgagcagcagaaggaggcctcctggaagcacaaccaggagctgaggaaggccctgcagcagctgcaggaggagctgcagaacaagagccagcagctgcgggcctgggaggccgagaagtacaatgagatccgcacccaggagcagaacatccagcacctgaaccacagcctgagccacaaggagcagctgctgcaggagttccgggagctgctgcagtacagagacaacagcgacaagaccctggaggccaatgagatgctgctggagaagctgcggcagagaattcatgacaaggctgtggccctggagcgggccattgatgagaagttcagcgccctggaggagaaggagaaggagctgcggcagctgcggctggccgtgcgggagcgggaccatgacctggagcggctgagagatgtgctgagcagcaatgaggccaccatgcagagcatggagagcctgctgcgggccaagggcctggaggtggagcagctgagcaccacctgccagaacctgcagtggctgaaggaggagatggagaccaagttcagccgctggcagaaggagcaggagagcatcatccagcagctgcagaccagcctgcatgacaggaacaaggaggtggaggacctgagcgccaccctgctgtgcaagctgggccctggccagagcgagattgctgaggagctgtgccagaggctgcagaggaaggagaggatgctgcaggacctgctgagtgacaggaacaagcaggtgctggagcacgagatggagatccagggcctgctgcagagcgtgtccacccgggagcaggagagccaggccgctgctgagaagctggtgcaggccctgatggagagaaattctgagctgcaggccctgcggcagtacctgggcggccgggacagcctgatgagccaggcccccatcagcaaccagcaggccgaggtgacccccaccggctgcctgggcaagcagacagaccagggctccatgcagatccccagcagagatgacagcaccagcctgacagccaaggaggatgtgtccatccccaggagcaccctgggggacctggacacagtggccggcctggagaaggagctgagcaatgccaaggaggagctggagctgatggccaagaaggagcgggagagccagatggagctgagcgccctgcagagcatgatggctgtgcaggaggaggagctgcaggtgcaggccgctgacatggagagcctgaccaggaacatccagatcaaggaggacctgatcaaggacctgcagatgcagctggtggaccctgaggacatcccagccatggagcggctgacccaggaggtgctgctgctgcgggagaaggtggcctctgtggagagccagggccaggagatcagcggcaacagacggcagcagctgctgctgatgctggagggcctggtggatgagaggagccggctgaatgaggccctgcaggccgagcggcagctgtacagcagcctggtgaagttccacgcccaccctgagagcagcgagcgggacaggaccctgcaggtggagctggagggcgcccaggtgctgcggagccggctggaggaggtgctgggccgcagcctggagcggctgaaccggctggagaccctggccgccatcggcggcgctgctgctggagatgacacagaggacaccagcacagagttcacagacagcattgaggaggaggccgcccaccacagccaccagcaggtgtcccagtgccagggcctgggcctgcccggctggacagcccacagccccagcgaggtgtag

SEQ ID NO: 163928 - DNA, 3396 bp, synthetic construct
  misc_feature 1..3396: note = Description of Artificial Sequence: Synthetic coding sequence
  source 1..3396: mol_type = other DNA
atgaaggagatctgccgcatctgtgcccgggagctgtgtggcaaccagaggcgctggatcttccacacagccagcaagctgaacctgcaggtgctgctgagccacgtgctgggcaaggatgtgcccagagatggcaaggccgagtttgcctgcagcaaatgtgccttcatgctggaccgcatctacagatttgacaccgtcatcgccagaattgaggccctgagcattgaaaggctgcagaagctgctgctggagaaggaccggctgaagttctgcatcgcctccatgtacaggaagaacaatgatgacagcggggctgagatcaaggctggaaatggcaccgtggacatgtctgtgctgcctgatgcccgctacagcgccctgctgcaggaggactttgcctacagcggctttgagtgctgggtggagaatgaagaccagatccaggagccccacagctgccacggcagcgagggccctggcaaccggccccggcgctgccggggctgtgccgccctgcgggtggccgacagcgactatgaggccatctgcaaggtgcccaggaaggtggcccggagcatcagctgtggccccagcagccgctggagcaccagcatctgcacagaggagcccgccctgtctgaggtgggccccccagacctggccagcaccaaggtgcccccagatggagagagcatggaggaggagaccccaggcagctctgtggagagcctggatgcctctgtgcaggccagccccccccagcagaaggatgaggagacagagaggtctgccaaggagctgggcaaatgtgactgctgcagtgatgaccaggccccccagcacggctgcaaccacaagctggagctggccctgtccatgatcaagggcctggactacaagcccatccagagcccccggggcagccggctgcccatccctgtgaagagcagcctgcccggggccaagccaggccccagcatgacagatggagtgagcagcggcttcctgaacagaagcctgaagcccctgtacaagacccctgtgtcctaccccctggagctgagtgacctgcaggagctgtgggatgacctgtgtgaggactacctgcccctgcgggtgcagcccatgacagaggagctgctgaagcagcagaagctgaacagccatgagaccaccatcacccagcagagcgtgtctgacagccacctggccgagctgcaggagaagatccagcagacagaggccaccaacaagatcctgcaggagaagctgaatgagatgtcctatgagctgaagtgtgcccaggagagcagccagaagcaggacggcaccatccagaacctgaaggagaccctgaagagccgggagcgggagacagaggagctgtaccaggtgattgagggccagaatgacaccatggccaagctgcgggagatgctgcaccagagccagctgggccagctgcacagcagcgagggcaccagccctgcccagcagcaggtggccctgctggacctgcagagcgccctcttctgcagccagctggagatccagaagctgcagagggtggtgcggcagaaggagcggcagctggctgatgccaagcagtgtgtgcagtttgtggaggccgccgcccatgaaagtgagcagcagaaggaggcctcctggaagcacaaccaggagctgaggaaggccctgcagcagctgcaggaggagctgcagaacaagagccagcagctgcgggcctgggaggccgagaagtacaatgagatccgcacccaggagcagaacatccagcacctgaaccacagcctgagccacaaggagcagctgctgcaggagttccgggagctgctgcagtacagagacaacagcgacaagaccctggaggccaatgagatgctgctggagaagctgcggcagagaattcatgacaaggctgtggccctggagcgggccattgatgagaagttcagcgccctggaggagaaggagaaggagctgcggcagctgcggctggccgtgcgggagcgggaccatgacctggagcggctgagagatgtgctgagcagcaatgaggccaccatgcagagcatggagagcctgctgcgggccaagggcctggaggtggagcagctgagcaccacctgccagaacctgcagtggctgaaggaggagatggagaccaagttcagccgctggcagaaggagcaggagagcatcatccagcagctgcagaccagcctgcatgacaggaacaaggaggtggaggacctgagcgccaccctgctgtgcaagctgggccctggccagagcgagattgctgaggagctgtgccagaggctgcagaggaaggagaggatgctgcaggacctgctgagtgacaggaacaagcaggtgctggagcacgagatggagatccagggcctgctgcagagcgtgtccacccgggagcaggagagccaggccgctgctgagaagctggtgcaggccctgatggagaggaacagcgagctgcaggccctgcggcagtacctgggcggccgggacagcctgatgagccaggcccccatcagcaaccagcaggccgaggtgacccccaccggctgcctgggcaagcagacagaccagggctccatgcagatccccagcagagatgacagcaccagcctgacagccaaggaggatgtgtccatccccaggagcaccctgggggacctggacacagtggccggcctggagaaggagctgagcaatgccaaggaggagctggagctgatggccaagaaggagcgggagagccagatggagctgagcgccctgcagagcatgatggctgtgcaggaggaggagctgcaggtgcaggccgctgacatggagagcctgaccaggaacatccagatcaaggaggacctgatcaaggacctgcagatgcagctggtggaccctgaggacatcccagccatggagcggctgacccaggaggtgctgctgctgcgggagaaggtggcctctgtggagagccagggccaggagatcagcggcaacagacggcagcagctgctgctgatgctggagggcctggtggatgagaggagccggctgaatgaggccctgcaggccgagcggcagctgtacagcagcctggtgaagttccacgcccaccctgagagcagcgagcgggacaggaccctgcaggtggagctggagggcgcccaggtgctgcggagccggctggaggaggtgctgggccgcagcctggagcggctgaaccggctggagaccctggccgccatcggcggcgctgctgctggagatgacacagaggacaccagcacagagttcacagacagcattgaggaggaggccgcccaccacagccaccagcagtag

SEQ ID NO: 163929 - DNA, 7041 bp, synthetic construct
  misc_feature 1..7041: note = Description of Artificial Sequence: Synthetic coding sequence
  source 1..7041: mol_type = other DNA
atgagcaatggctaccgcaccctgagccagcacctgaatgacctgaagaaggagaacttcagcctgaagctgcgcatctacttcctggaggagaggatgcagcagaagtatgaggccagccgggaggacatctacaagagaaatattgagctgaaggtggaggtggagagcctgaagcgggagctgcaggacaagaagcagcacctggacaagacctgggcagatgtggagaacctgaacagccagaatgaagctgagctgcggcggcagtttgaggagcggcagcaggagacagagcacgtgtatgagctgctggagaacaagatccagctgctgcaggaggagagccggctggccaagaatgaagctgccaggatggccgccctggtggaggccgagaaggagtgcaacctggagctgtctgagaagctgaagggcgtgaccaagaactgggaggatgtgcctggggaccaggtgaagccagaccagtacacagaggccctggcccagagggacaagagaattgaggagctgaaccagagcctggccgcccaggagcggctggtggagcagctgagccgggagaagcagcagctgctgcacctgctggaggagcccacctccatggaggtgcagcccatgacagaggagctgctgaagcagcagaagctgaacagccatgagaccaccatcacccagcagagcgtgtctgacagccacctggccgagctgcaggagaagatccagcagacagaggccaccaacaagatcctgcaggagaagctgaatgagatgtcctatgagctgaagtgtgcccaggagagcagccagaagcaggacggcaccatccagaacctgaaggagaccctgaagagccgggagcgggagacagaggagctgtaccaggtgattgagggccagaatgacaccatggccaagctgcgggagatgctgcaccagagccagctgggccagctgcacagcagcgagggcaccagccctgcccagcagcaggtggccctgctggacctgcagagcgccctcttctgcagccagctggagatccagaagctgcagagggtggtgcggcagaaggagcggcagctggctgatgccaagcagtgtgtgcagtttgtggaggccgccgcccacgagagcgagcagcagaaggaggcctcctggaagcacaaccaggagctgaggaaggccctgcagcagctgcaggaggagctgcagaacaagagccagcagctgcgggcctgggaggccgagaagtacaatgagatccgcacccaggagcagaacatccagcacctgaaccacagcctgagccacaaggagcagctgctgcaggagttccgggagctgctgcagtacagagacaacagcgacaagaccctggaggccaatgagatgctgctggagaagctgcggcagagaattcatgacaaggctgtggccctggagcgggccattgatgagaagttcagcgccctggaggagaaggagaaggagctgcggcagctgcggctggccgtgcgggagcgggaccatgacctggagcggctgagagatgtgctgagcagcaatgaggccaccatgcagagcatggagagcctgctgcgggccaagggcctggaggtggagcagctgagcaccacctgccagaacctgcagtggctgaaggaggagatggagaccaagttcagccgctggcagaaggagcaggagagcatcatccagcagctgcagaccagcctgcatgacaggaacaaggaggtggaggacctgagcgccaccctgctgtgcaagctgggccctggccagagcgagattgctgaggagctgtgccagaggctgcagaggaaggagaggatgctgcaggacctgctgagtgacaggaacaagcaggtgctggagcacgagatggagatccagggcctgctgcagagcgtgtccacccgggagcaggagagccaggccgctgctgagaagctggtgcaggccctgatggagagaaattctgagctgcaggccctgcggcagtacctgggcggccgggacagcctgatgagccaggcccccatcagcaaccagcaggccgaggtgacccccaccggctgcctgggcaagcagacagaccagggctccatgcagatccccagcagagatgacagcaccagcctgacagccaaggaggatgtgtccatccccaggagcaccctgggggacctggacacagtggccggcctggagaaggagctgagcaatgccaaggaggagctggagctgatggccaagaaggagcgggagagccagatggagctgagcgccctgcagagcatgatggctgtgcaggaggaggagctgcaggtgcaggccgctgacatggagagcctgaccaggaacatccagatcaaggaggacctgatcaaggacctgcagatgcagctggtggaccctgaggacatcccagccatggagcggctgacccaggaggtgctgctgctgcgggagaaggtggcctctgtggagagccagggccaggagatcagcggcaacagacggcagcagctgctgctgatgctggagggcctggtggatgagaggagccggctgaatgaggccctgcaggccgagcggcagctgtacagcagcctggtgaagttccacgcccaccctgagagcagcgagcgggacaggaccctgcaggtggagctggagggcgcccaggtgctgcggagccggctggaggaggtgctgggccgcagcctggagcggctgaaccggctggagaccctggccgccatcggcggcgctgctgctggagatgacacagaggacaccagcacagagttcacagacagcattgaggaggaggccgcccaccacagccaccagcagctggtgaaggtggccctggagaagagcctggccaccgtggagacccagaaccccagcttcagcccccccagccccatgggcggggacagcaaccgctgcctgcaggaggagatgctgcacctgcgggcagagttccaccagcacctggaggagaagaggaaggccgaggaggagctgaaggagctgaaggcccagatcgaggaggccggcttcagctctgtgagccacatccggaacaccatgctgagcctgtgcctggagaatgctgagctgaaggagcagatgggagaggccatgtctgatggctgggagattgaggaggacaaggagaagggggaggtgatggtggagaccgtggtgaccaaggagggcctgtctgagagcagcctgcaggccgagttcaggaagctgcagggcaagctgaagaatgcccacaacatcatcaacctgctgaaggagcagctggtgctgagcagcaaggagggcaacagcaagctgaccccagagctgctggtgcacctgaccagcaccatcgagcgcatcaacacagagctggtgggcagccctgggaagcaccagcaccaggaggagggcaatgtgacagtgcggcccttcccccggccccagagcctggacctgggcgccaccttcaccgtggatgcccaccagctggacaaccagagccagccccgggaccccggcccccagagcgccttcagcctgcccggcagcacccagcacctgcggagccagctgagccagtgcaagcagcgctaccaggacctgcaggagaagctgctgctgtctgaggccaccgtgtttgcccaggccaatgagctggagaagtacagagtgatgctgaccggggagagcctggtgaagcaggacagcaagcagatccaggtggacctgcaggacctgggctatgagacctgtggccgctcagaaaatgaagctgagcgggaggagaccaccagcccagaatgtgaggagcacaacagcctgaaggagatggtgctgatggagggcctgtgcagcgagcagggccggcggggcagcaccctggccagcagcagcgagaggaagcccctggagaaccagctgggcaagcaggaggagttccgggtgtatggcaagtctgagaacatcctggtgctgaggaaggacatcaaggacctgaaggcccagctgcagaatgccaacaaggtgatccagaacctgaagagccgggtgcgcagcctgtctgtgaccagtgactacagcagcagcctggagcggccctggaagctgcgggctgtgggcaccctggagggcagcagcccccacagcgtgcctgatgaagatgagggctggctgagtgatggcaccggggccttctacagccctggcctgcaggccaagaaggacctggagagcctcatccagagggtgtcccagctggaggcccagctgcccaagaatggcctggaggagaagctggccgaggagctgcggagcgcctcctggccaggcaagtatgacagcctcatccaggaccaggcccgggagctgagctacctgcggcagaagatccgggagggccggggcatctgctacctgatcaccaggcatgccaaggacacagtgaagagctttgaggacctgctgcggagcaatgacatcgactactacctgggccagagcttccgggagcagctggcccagggcagccagctgacagagcggctgaccagcaagctgagcaccaaggaccacaagtctgagaaggaccaggccggcctggagcccctggccctgcggctgagccgggagctgcaggagaaggagaaggtgattgaggtgctgcaggccaagctggatgcccggagcctgacccccagcagcagccacgccctgagtgacagccacaggagccccagcagcaccagcttcctgagtgatgagctggaggcctgcagcgacatggacatcgtgtctgagtacacccactatgaggagaagaaggccagccccagccacagcgacagcatccaccacagcagccacagcgctgtgctgagcagcaagcccagcagcaccagcgccagccagggcgccaaggccgagagcaacagcaaccccatcagcctgcccaccccccagaacacccccaaggaggccaaccaggcccacagcggcttccacttccacagcatccccaagctggccagcctgccccaggcccccctgcccagcgcccccagcagcttcctgcccttcagccccaccggccccctgctgctgggctgctgtgagacccctgtggtgtccctggccgaggcccagcaggagctgcagatgctgcagaagcagctgggggagagcgccagcacagtgcccccagccagcacagccaccctgctgagcaatgacctggaggccgacagcagctactacctgaacagcgcccagccccacagccccccccggggcaccatcgagctgggccgcatcctggagcccggctacctgggcagcagcggcaagtgggatgtgatgaggccccagaagggctctgtgtctggggacctgagcagcggcagctctgtgtaccagctgaacagcaagcccactggagctgacctgctggaggagcacctgggggagatccggaacctgcggcagaggctggaggagagcatctgcatcaatgaccggctgcgggagcagctggagcaccggctgaccagcacagcccggggccggggcagcaccagcaacttctacagccagggcctggagagcatcccccagctgtgcaatgaaaatagagtgctgcgggaggacaacagaaggctgcaggcccagctgagccacgtgtcccgggagcacagccaggagacagagagcctgcgggaggccctgctgagcagccgcagccacctgcaggagctggagaaggagctggagcaccagaaggtggagcggcagcagctgctggaggacctgcgggagaagcagcaggaggtgctgcacttccgggaggagcggctgagcctgcaggagaatgacagccggctgcagcacaagctggtgctgctgcagcagcagtgtgaggagaagcagcagctgtttgagagcctgcagagcgagctgcagatctatgaggccctgtatggcaacagcaagaagggcctgaaggcctacagcctggatgcctgccaccagatccccctgagcagtgacctgagccacctggtggccgaggtgcgggccctgcggggccagctggagcagagcatccagggcaacaactgcctgcggctgcagctgcagcagcagctggagagcggggccggcaaggccagcctgagccccagcagcatcaaccagaacttccctgccagcacagaccccggcaacaagcagctgctgctgcaggacagcgctgtgagcccccctgtgagagatgtgggcatgaacagccctgccctggtgttccccagcagcgccagcagcaccccaggcagcgagacccccatcatcaacagagccaacggcctgggcctggacaccagccctgtgatgaagaccccacccaagctggagggagatgccacagatggcagctttgccaacaagcacggcagacatgtgattggccacattgatgactacagcgccctgcggcagcagattgctgagggcaagctgctggtgaagaagatcgtgtccctggtgcgcagcgcctgcagcttccctggcctggaggcccagggcacagaggtgctgggcagcaagggcatccacgagctgcggagcagcaccagcgccctgcaccacgccctggaggagagcgccagcctgctgaccatgttctggagggctgccctgcccagcacccacatccctgtgctgcccgggaaggtgggggagagcacagagcgggagctgctggagctgcggaccaaggtgtccaagcaggagcggctgctgcagagcaccacagagcacctgaagaatgccaaccagcagaaggagagcatggagcagttcatcgtgtcccagctgaccaggacccatgatgtgctgaagaaggcccggaccaacctggaggtgaagagcctgcgggccctgccctgcaccccagccctgtag

SEQ ID NO: 163930 - DNA, 7089 bp, synthetic construct
  misc_feature 1..7089: note = Description of Artificial Sequence: Synthetic coding sequence
  source 1..7089: mol_type = other DNA
atgagcaatggctaccgcaccctgagccagcacctgaatgacctgaagaaggagaacttcagcctgaagctgcgcatctacttcctggaggagaggatgcagcagaagtatgaggccagccgggaggacatctacaagagaaatattgagctgaaggtggaggtggagagcctgaagcgggagctgcaggacaagaagcagcacctggacaagacctgggcagatgtggagaacctgaacagccagaatgaagctgagctgcggcggcagtttgaggagcggcagcaggagacagagcacgtgtatgagctgctggagaacaagatccagctgctgcaggaggagagccggctggccaagaatgaagctgccaggatggccgccctggtggaggccgagaaggagtgcaacctggagctgtctgagaagctgaagggcgtgaccaagaactgggaggatgtgcctggggaccaggtgaagccagaccagtacacagaggccctggcccagagggacaagagaattgaggagctgaaccagagcctggccgcccaggagcggctggtggagcagctgagccgggagaagcagcagctgctgcacctgctggaggagcccacctccatggaggtgcagcccatgacagaggagctgctgaagcagcagaagctgaacagccatgagaccaccatcacccagcagagcgtgtctgacagccacctggccgagctgcaggagaagatccagcagacagaggccaccaacaagatcctgcaggagaagctgaatgagatgtcctatgagctgaagtgtgcccaggagagcagccagaagcaggacggcaccatccagaacctgaaggagaccctgaagagccgggagcgggagacagaggagctgtaccaggtgattgagggccagaatgacaccatggccaagctgcgggagatgctgcaccagagccagctgggccagctgcacagcagcgagggcaccagccctgcccagcagcaggtggccctgctggacctgcagagcgccctcttctgcagccagctggagatccagaagctgcagagggtggtgcggcagaaggagcggcagctggctgatgccaagcagtgtgtgcagtttgtggaggccgccgcccacgagagcgagcagcagaaggaggcctcctggaagcacaaccaggagctgaggaaggccctgcagcagctgcaggaggagctgcagaacaagagccagcagctgcgggcctgggaggccgagaagtacaatgagatccgcacccaggagcagaacatccagcacctgaaccacagcctgagccacaaggagcagctgctgcaggagttccgggagctgctgcagtacagagacaacagcgacaagaccctggaggccaatgagatgctgctggagaagctgcggcagagaattcatgacaaggctgtggccctggagcgggccattgatgagaagttcagcgccctggaggagaaggagaaggagctgcggcagctgcggctggccgtgcgggagcgggaccatgacctggagcggctgagagatgtgctgagcagcaatgaggccaccatgcagagcatggagagcctgctgcgggccaagggcctggaggtggagcagctgagcaccacctgccagaacctgcagtggctgaaggaggagatggagaccaagttcagccgctggcagaaggagcaggagagcatcatccagcagctgcagaccagcctgcatgacaggaacaaggaggtggaggacctgagcgccaccctgctgtgcaagctgggccctggccagagcgagattgctgaggagctgtgccagaggctgcagaggaaggagaggatgctgcaggacctgctgagtgacaggaacaagcaggtgctggagcacgagatggagatccagggcctgctgcagagcgtgtccacccgggagcaggagagccaggccgctgctgagaagctggtgcaggccctgatggagagaaattctgagctgcaggccctgcggcagtacctgggcggccgggacagcctgatgagccaggcccccatcagcaaccagcaggccgaggtgacccccaccggctgcctgggcaagcagacagaccagggctccatgcagatccccagcagagatgacagcaccagcctgacagccaaggaggatgtgtccatccccaggagcaccctgggggacctggacacagtggccggcctggagaaggagctgagcaatgccaaggaggagctggagctgatggccaagaaggagcgggagagccagatggagctgagcgccctgcagagcatgatggctgtgcaggaggaggagctgcaggtgcaggccgctgacatggagagcctgaccaggaacatccagatcaaggaggacctgatcaaggacctgcagatgcagctggtggaccctgaggacatcccagccatggagcggctgacccaggaggtgctgctgctgcgggagaaggtggcctctgtggagagccagggccaggagatcagcggcaacagacggcagcagctgctgctgatgctggagggcctggtggatgagaggagccggctgaatgaggccctgcaggccgagcggcagctgtacagcagcctggtgaagttccacgcccaccctgagagcagcgagcgggacaggaccctgcaggtggagctggagggcgcccaggtgctgcggagccggctggaggaggtgctgggccgcagcctggagcggctgaaccggctggagaccctggccgccatcggcggcgctgctgctggagatgacacagaggacaccagcacagagttcacagacagcattgaggaggaggccgcccaccacagccaccagcagctggtgaaggtggccctggagaagagcctggccaccgtggagacccagaaccccagcttcagcccccccagccccatgggcggggacagcaaccgctgcctgcaggaggagatgctgcacctgcgggcagagttccaccagcacctggaggagaagaggaaggccgaggaggagctgaaggagctgaaggcccagatcgaggaggccggcttcagctctgtgagccacatccggaacaccatgctgagcctgtgcctggagaatgctgagctgaaggagcagatgggagaggccatgtctgatggctgggagattgaggaggacaaggagaagggggaggtgatggtggagaccgtggtgaccaaggagggcctgtctgagagcagcctgcaggccgagttcaggaagctgcagggcaagctgaagaatgcccacaacatcatcaacctgctgaaggagcagctggtgctgagcagcaaggagggcaacagcaagctgaccccagagctgctggtgcacctgaccagcaccatcgagcgcatcaacacagagctggtgggcagccctgggaagcaccagcaccaggaggagggcaatgtgacagtgcggcccttcccccggccccagagcctggacctgggcgccaccttcaccgtggatgcccaccagctggacaaccagagccagccccgggaccccggcccccagagcgccttcagcctgcccggcagcacccagcacctgcggagccagctgagccagtgcaagcagcgctaccaggacctgcaggagaagctgctgctgtctgaggccaccgtgtttgcccaggccaatgagctggagaagtacagagtgatgctgaccggggagagcctggtgaagcaggacagcaagcagatccaggtggacctgcaggacctgggctatgagacctgtggccgctcagaaaatgaagctgagcgggaggagaccaccagcccagaatgtgaggagcacaacagcctgaaggagatggtgctgatggagggcctgtgcagcgagcagggccggcggggcagcaccctggccagcagcagcgagaggaagcccctggagaaccagctgggcaagcaggaggagttccgggtgtatggcaagtctgagaacatcctggtgctgaggaaggacatcaaggacctgaaggcccagctgcagaatgccaacaaggtgatccagaacctgaagagccgggtgcgcagcctgtctgtgaccagtgactacagcagcagcctggagcggccctggaagctgcgggctgtgggcaccctggagggcagcagcccccacagcgtgcctgatgaagatgagggctggctgagtgatggcaccggggccttctacagccctggcctgcaggccaagaaggacctggagagcctcatccagagggtgtcccagctggaggcccagctgcccaagaatggcctggaggagaagctggccgaggagctgcggagcgcctcctggccaggcaagtatgacagcctcatccaggaccaggcccgggagctgagctacctgcggcagaagatccgggagggccggggcatctgctacctgatcaccaggcatgccaaggacacagtgaagagctttgaggacctgctgcggagcaatgacatcgactactacctgggccagagcttccgggagcagctggcccagggcagccagctgacagagcggctgaccagcaagctgagcaccaaggaccacaagtctgagaaggaccaggccggcctggagcccctggccctgcggctgagccgggagctgcaggagaaggagaaggtgattgaggtgctgcaggccaagctggatgcccggagcctgacccccagcagcagccacgccctgagtgacagccacaggagccccagcagcaccagcttcctgagtgatgagctggaggcctgcagcgacatggacatcgtgtctgagtacacccactatgaggagaagaaggccagccccagccacagcgacagcatccaccacagcagccacagcgctgtgctgagcagcaagcccagcagcaccagcgccagccagggcgccaaggccgagagcaacagcaaccccatcagcctgcccaccccccagaacacccccaaggaggccaaccaggcccacagcggcttccacttccacagcatccccaagctggccagcctgccccaggcccccctgcccagcgcccccagcagcttcctgcccttcagccccaccggccccctgctgctgggctgctgtgagacccctgtggtgtccctggccgaggcccagcaggagctgcagatgctgcagaagcagctgggggagagcgccagcacagtgcccccagccagcacagccaccctgctgagcaatgacctggaggccgacagcagctactacctgaacagcgcccagccccacagccccccccggggcaccatcgagctgggccgcatcctggagcccggctacctgggcagcagcggcaagtgggatgtgatgaggccccagaagggctctgtgtctggggacctgagcagcggcagctctgtgtaccagctgaacagcaagcccactggagctgacctgctggaggagcacctgggggagatccggaacctgcggcagaggctggaggagagcatctgcatcaatgaccggctgcgggagcagctggagcaccggctgaccagcacagcccggggccggggcagcaccagcaacttctacagccagggcctggagagcatcccccagctgtgcaatgaaaatagagtgctgcgggaggacaacagaaggctgcaggcccagctgagccacgtgtcccgggagcacagccaggagacagagagcctgcgggaggccctgctgagcagccgcagccacctgcaggagctggagaaggagctggagcaccagaaggtggagcggcagcagctgctggaggacctgcgggagaagcagcaggaggtgctgcacttccgggaggagcggctgagcctgcaggagaatgacagccggctgcagcacaagctggtgctgctgcagcagcagtgtgaggagaagcagcagctgtttgagagcctgcagagcgagctgcagatctatgaggccctgtatggcaacagcaagaagggcctgaaggcctacagcctggatgcctgccaccagatccccctgagcagtgacctgagccacctggtggccgaggtgcgggccctgcggggccagctggagcagagcatccagggcaacaactgcctgcggctgcagctgcagcagcagctggagagcggggccggcaaggccagcctgagccccagcagcatcaaccagaacttccctgccagcacagaccccggcaacaagcagctgctgctgcaggacagcgctgtgagcccccctgtgagagatgtgggcatgaacagccctgccctggtgttccccagcagcgccagcagcaccccaggcagcgagacccccatcatcaacagagccaacggcctgggcctggacaccagccctgtgatgaagaccccacccaagctggagggagatgccacagatggcagctttgccaacaagcacggcagacatgtgattggccacattgatgactacagcgccctgcggcagcagattgctgagggcaagctgctggtgaagaagatcgtgtccctggtgcgcagcgcctgcagcttccctggcctggaggcccagggcacagaggtgctgggcagcaagggcatccacgagctgcggagcagcaccagcgccctgcaccacgccctggaggagagcgccagcctgctgaccatgttctggagggctgccctgcccagcacccacatccctgtgctgcccgggaaggtgggggagagcacagagcgggagctgctggagctgcggaccaaggtgtccaagcaggagcggctgctgcagagcaccacagagcacctgaagaatgccaaccagcagaaggagagcatggagcagttcatcgtgtcccagctgaccaggacccatgatgtgctgaagaaggcccggaccaacctggaggagccctgcaagaagaggagccaccagaagagcctgaagcagcaggagcgctgggcctgccccccatttgtgcagctgcccatctgctag

SEQ ID NO: 163931 - DNA, 1557 bp, synthetic construct
  misc_feature 1..1557: note = Description of Artificial Sequence: Synthetic coding sequence
  source 1..1557: mol_type = other DNA
atgcctgaggccaactacctgctgtctgtgtcctggggctacatcaagttcaagaggatgctgaaccgggagctgacccacctgtctgagatgagccgcagcggcaaccaggtgtctgagttcatcagcaacaccttcctggacaagcagcacgaggtggagatccccagccccacccagaaggagaaggagaagaagaagaggcccatgagccagatcagcggcgtgaagaagctgatgcacagcagcagcctgaccaacagcagcatccccaggtttggagtgaagacagagcaggaggatgtgctggccaaggagctggaggatgtgaacaagtggggcctgcacgtgttcagaattgctgagctgagcggcaaccggcccctgaccgtcatcatgcacaccatcttccaggagcgggacctgctgaagaccttcaagatccctgtggacaccctcatcacctacctgatgaccctggaggaccactaccacgcagatgtggcctaccacaacaacatccacgccgcagatgtggtgcagagcacccacgtgctgctgagcaccccagccctggaggccgtgttcacagacctggagatcctggccgccatctttgccagcgccatccatgatgtggaccaccctggggtgagcaaccagttcctgatcaacaccaacagcgagctggccctgatgtacaatgacagctctgtgctggagaaccaccacctggccgtgggcttcaagctgctgcaggaggagaactgtgacatcttccagaacctgaccaagaagcagaggcagagcctgaggaagatggtgattgacatcgtgctggccacagacatgagcaagcacatgaacctgctggccgacctgaagaccatggtggagaccaagaaggtgaccagcagcggcgtgctgctgctggacaactacagcgaccgcatccaggtgctgcagaacatggtgcactgtgccgacctgagcaaccccaccaagcccctgcagctgtaccggcagtggacagaccgcatcatggaggagttcttccggcagggcgaccgggagcgggagcggggcatggagatcagccccatgtgtgacaagcacaatgcctctgtggagaagagccaggtgggcttcatcgactacatcgtgcaccccctgtgggagacctgggccgacctggtgcacccagatgcccaggacatcctggacaccctggaggacaaccgggagtggtaccagagcaccatcccccagagccccagccctgccccagatgatcctgaggagggccggcagggccagacagagaagttccagtttgagctgaccctggaggaggatggagagagtgacacagagaaggacagcggcagccaggtggaggaggacaccagctgcagcgacagcaagaccctgtgcacccaggacagcgagagcacagagatccccctggatgagcaggtggaggaggaggccgtgggggaggaggaggagagccagcctgaggcctgtgtgattgatgacaggagcccagacacctag

SEQ ID NO: 163932 - DNA, 2430 bp, synthetic construct
  misc_feature 1..2430: note = Description of Artificial Sequence: Synthetic coding sequence
  source 1..2430: mol_type = other DNA
atggaggccgagggcagcagcgccccagcccgggccggcagcggggagggcagtgacagcgctggaggagccaccctgaaggcccccaagcacctgtggaggcatgagcagcaccaccagtaccccctgcggcagccccagttccggctgctgcacccccaccaccacctgcccccacctcctccacccagcccccagccccagccccagtgccccctgcagcccccacctcctccacccctgcccccacctcctcctcctcctggggccgcccggggccgctatgccagcagcggggccaccggccgggtgcgccaccggggctacagcgacacagagcgctacctgtactgccgggccatggacaggaccagctatgctgtggagaccggccaccggcccggcctgaagaagagcaggatgtcctggcccagcagcttccagggcctgcggagatttgatgtggacaatggcaccagcgctggccgcagccccctggaccccatgaccagccctggcagcggcctcatcctgcaggccaactttgtgcacagccagaggcgggagagcttcctgtacagaagtgacagcgactatgacctgagccccaagtccatgagcaggaacagcagcatcgccagtgacatccatggagatgacctgattgtgaccccatttgcccaggtgctggccagcctgaggacagtgaggaacaactttgctgccctgaccaacctgcaggaccgggcccccagcaagaggagccccatgtgcaaccagcccagcatcaacaaggccaccatcacagaggaggcctaccagaagctggccagcgagaccctggaggagctggactggtgcctggaccagctggagaccctgcagaccaggcacagcgtgtctgagatggccagcaacaagttcaagaggatgctgaaccgggagctgacccacctgtctgagatgagccgcagcggcaaccaggtgtctgagttcatcagcaacaccttcctggacaagcagcacgaggtggagatccccagccccacccagaaggagaaggagaagaagaagaggcccatgagccagatctctggagtgaagaagctgatgcacagcagcagcctgaccaacagcagcatcccccgcttcggcgtgaagacagagcaggaggatgtgctggccaaggagctggaggatgtgaacaagtggggcctgcacgtgttcagaattgctgagctgagcggcaaccggcccctgaccgtcatcatgcacaccatcttccaggagcgggacctgctgaagaccttcaagatccctgtggacaccctcatcacctacctgatgaccctggaggaccactaccacgcagatgtggcctaccacaacaacatccatgctgctgatgtggtgcagagcacccacgtgctgctgagcaccccagccctggaggccgtgttcacagacctggagatcctggccgccatctttgccagcgccatccatgatgtggaccaccctggggtgagcaaccagttcctgatcaacaccaacagcgagctggccctgatgtacaatgacagctctgtgctggagaaccaccacctggccgtgggcttcaagctgctgcaggaggagaactgtgacatcttccagaacctgaccaagaagcagaggcagagcctgaggaagatggtgattgatattgtgctggccacagacatgagcaagcacatgaacctgctggccgacctgaagaccatggtggagaccaagaaggtgaccagcagtggagtgctgctgctggacaactacagcgaccgcatccaggtgctgcagaacatggtgcactgtgccgacctgagcaaccccaccaagcccctgcagctgtaccggcagtggacagaccgcatcatggaggagttcttccggcagggcgaccgggagcgggagcggggcatggagatcagccccatgtgtgacaagcacaatgcctctgtggagaagagccaggtgggcttcatcgactacatcgtgcaccccctgtgggagacctgggccgacctggtgcacccagatgcccaggacatcctggacaccctggaggacaaccgggagtggtaccagagcaccatcccccagagccccagccctgccccagatgatcctgaggagggccggcagggccagacagagaagttccagtttgagctgaccctggaggaggatggagagagtgacacagagaaggacagcggcagccaggtggaggaggacaccagctgcagcgacagcaagaccctgtgcacccaggacagcgagagcacagagatccccctggatgagcaggtggaggaggaggccgtgggggaggaggaggagagccagcctgaggcctgtgtgattgatgacaggagcccagacacctag

SEQ ID NO: 163933 - DNA, 2037 bp, synthetic construct
  misc_feature 1..2037: note = Description of Artificial Sequence: Synthetic coding sequence
  source 1..2037: mol_type = other DNA
atgttcatctacagcttcaacaagttcttcttcaagaccacccactgctgggccatcatcagctttgatgtggacaatggcaccagcgctggccgcagccccctggaccccatgaccagccctggcagcggcctcatcctgcaggccaactttgtgcacagccagaggcgggagagcttcctgtacagaagtgacagcgactatgacctgagccccaagtccatgagcaggaacagcagcatcgccagtgacatccatggagatgacctgattgtgaccccatttgcccaggtgctggccagcctgaggacagtgaggaacaactttgctgccctgaccaacctgcaggaccgggcccccagcaagaggagccccatgtgcaaccagcccagcatcaacaaggccaccatcacagaggaggcctaccagaagctggccagcgagaccctggaggagctggactggtgcctggaccagctggagaccctgcagaccaggcacagcgtgtctgagatggccagcaacaagttcaagaggatgctgaaccgggagctgacccacctgtctgagatgagccgcagcggcaaccaggtgtctgagttcatcagcaacaccttcctggacaagcagcacgaggtggagatccccagccccacccagaaggagaaggagaagaagaagaggcccatgagccagatcagcggcgtgaagaagctgatgcacagcagcagcctgaccaacagcagcatccccaggtttggagtgaagacagagcaggaggatgtgctggccaaggagctggaggatgtgaacaagtggggcctgcacgtgttcagaattgctgagctgagcggcaaccggcccctgaccgtcatcatgcacaccatcttccaggagcgggacctgctgaagaccttcaagatccctgtggacaccctcatcacctacctgatgaccctggaggaccactaccacgcagatgtggcctaccacaacaacatccacgccgcagatgtggtgcagagcacccacgtgctgctgagcaccccagccctggaggccgtgttcacagacctggagatcctggccgccatctttgccagcgccatccatgatgtggaccaccctggggtgagcaaccagttcctgatcaacaccaacagcgagctggccctgatgtacaatgacagctctgtgctggagaaccaccacctggccgtgggcttcaagctgctgcaggaggagaactgtgacatcttccagaacctgaccaagaagcagaggcagagcctgaggaagatggtgattgacatcgtgctggccacagacatgagcaagcacatgaacctgctggccgacctgaagaccatggtggagaccaagaaggtgaccagcagcggcgtgctgctgctggacaactacagcgaccgcatccaggtgctgcagaacatggtgcactgtgccgacctgagcaaccccaccaagcccctgcagctgtaccggcagtggacagaccgcatcatggaggagttcttccggcagggcgaccgggagcgggagcggggcatggagatcagccccatgtgtgacaagcacaatgcctctgtggagaagagccaggtgggcttcatcgactacatcgtgcaccccctgtgggagacctgggccgacctggtgcacccagatgcccaggacatcctggacaccctggaggacaaccgggagtggtaccagagcaccatcccccagagccccagccctgccccagatgatcctgaggagggccggcagggccagacagagaagttccagtttgagctgaccctggaggaggatggagagagtgacacagagaaggacagcggcagccaggtggaggaggacaccagctgcagcgacagcaagaccctgtgcacccaggacagcgagagcacagagatccccctggatgagcaggtggaggaggaggccgtgggggaggaggaggagagccagcctgaggcctgtgtgattgatgacaggagcccagacacctag

SEQ ID NO: 163934 - DNA, 1524 bp, synthetic construct
  misc_feature 1..1524: note = Description of Artificial Sequence: Synthetic coding sequence
  source 1..1524: mol_type = other DNA
atggccagcaacaagttcaagaggatgctgaaccgggagctgacccacctgtctgagatgagccgcagcggcaaccaggtgtctgagttcatcagcaacaccttcctggacaagcagcacgaggtggagatccccagccccacccagaaggagaaggagaagaagaagaggcccatgagccagatctctggagtgaagaagctgatgcacagcagcagcctgaccaacagcagcatcccccgcttcggcgtgaagacagagcaggaggatgtgctggccaaggagctggaggatgtgaacaagtggggcctgcacgtgttcagaattgctgagctgagcggcaaccggcccctgaccgtcatcatgcacaccatcttccaggagcgggacctgctgaagaccttcaagatccctgtggacaccctcatcacctacctgatgaccctggaggaccactaccacgcagatgtggcctaccacaacaacatccatgctgctgatgtggtgcagagcacccacgtgctgctgagcaccccagccctggaggccgtgttcacagacctggagatcctggccgccatctttgccagcgccatccatgatgtggaccaccctggggtgagcaaccagttcctgatcaacaccaacagcgagctggccctgatgtacaatgacagctctgtgctggagaaccaccacctggccgtgggcttcaagctgctgcaggaggagaactgtgacatcttccagaacctgaccaagaagcagaggcagagcctgaggaagatggtgattgatattgtgctggccacagacatgagcaagcacatgaacctgctggccgacctgaagaccatggtggagaccaagaaggtgaccagcagtggagtgctgctgctggacaactacagcgaccgcatccaggtgctgcagaacatggtgcactgtgccgacctgagcaaccccaccaagcccctgcagctgtaccggcagtggacagaccgcatcatggaggagttcttccggcagggcgaccgggagcgggagcggggcatggagatcagccccatgtgtgacaagcacaatgcctctgtggagaagagccaggtgggcttcatcgactacatcgtgcaccccctgtgggagacctgggccgacctggtgcacccagatgcccaggacatcctggacaccctggaggacaaccgggagtggtaccagagcaccatcccccagagccccagccctgccccagatgatcctgaggagggccggcagggccagacagagaagttccagtttgagctgaccctggaggaggatggagagagtgacacagagaaggacagcggcagccaggtggaggaggacaccagctgcagcgacagcaagaccctgtgcacccaggacagcgagagcacagagatccccctggatgagcaggtggaggaggaggccgtgggggaggaggaggagagccagcctgaggcctgtgtgattgatgacaggagcccagacacctag

SEQ ID NO: 163935 - DNA, 2022 bp, synthetic construct
  misc_feature 1..2022: note = Description of Artificial Sequence: Synthetic coding sequence
  source 1..2022: mol_type = other DNA
atgatgcacgtgaacaacttccccttccgccgccacagctggatctgctttgatgtggacaatggcaccagcgctggccgcagccccctggaccccatgaccagccctggcagcggcctcatcctgcaggccaactttgtgcacagccagaggcgggagagcttcctgtacagaagtgacagcgactatgacctgagccccaagtccatgagcaggaacagcagcatcgccagtgacatccatggagatgacctgattgtgaccccatttgcccaggtgctggccagcctgaggacagtgaggaacaactttgctgccctgaccaacctgcaggaccgggcccccagcaagaggagccccatgtgcaaccagcccagcatcaacaaggccaccatcacagaggaggcctaccagaagctggccagcgagaccctggaggagctggactggtgcctggaccagctggagaccctgcagaccaggcacagcgtgtctgagatggccagcaacaagttcaagaggatgctgaaccgggagctgacccacctgtctgagatgagccgcagcggcaaccaggtgtctgagttcatcagcaacaccttcctggacaagcagcacgaggtggagatccccagccccacccagaaggagaaggagaagaagaagaggcccatgagccagatctctggagtgaagaagctgatgcacagcagcagcctgaccaacagcagcatcccccgcttcggcgtgaagacagagcaggaggatgtgctggccaaggagctggaggatgtgaacaagtggggcctgcacgtgttcagaattgctgagctgagcggcaaccggcccctgaccgtcatcatgcacaccatcttccaggagcgggacctgctgaagaccttcaagatccctgtggacaccctcatcacctacctgatgaccctggaggaccactaccacgcagatgtggcctaccacaacaacatccatgctgctgatgtggtgcagagcacccacgtgctgctgagcaccccagccctggaggccgtgttcacagacctggagatcctggccgccatctttgccagcgccatccatgatgtggaccaccctggggtgagcaaccagttcctgatcaacaccaacagcgagctggccctgatgtacaatgacagctctgtgctggagaaccaccacctggccgtgggcttcaagctgctgcaggaggagaactgtgacatcttccagaacctgaccaagaagcagaggcagagcctgaggaagatggtgattgatattgtgctggccacagacatgagcaagcacatgaacctgctggccgacctgaagaccatggtggagaccaagaaggtgaccagcagtggagtgctgctgctggacaactacagcgaccgcatccaggtgctgcagaacatggtgcactgtgccgacctgagcaaccccaccaagcccctgcagctgtaccggcagtggacagaccgcatcatggaggagttcttccggcagggcgaccgggagcgggagcggggcatggagatcagccccatgtgtgacaagcacaatgcctctgtggagaagagccaggtgggcttcatcgactacatcgtgcaccccctgtgggagacctgggccgacctggtgcacccagatgcccaggacatcctggacaccctggaggacaaccgggagtggtaccagagcaccatcccccagagccccagccctgccccagatgatcctgaggagggccggcagggccagacagagaagttccagtttgagctgaccctggaggaggatggagagagtgacacagagaaggacagcggcagccaggtggaggaggacaccagctgcagcgacagcaagaccctgtgcacccaggacagcgagagcacagagatccccctggatgagcaggtggaggaggaggccgtgggggaggaggaggagagccagcctgaggcctgtgtgattgatgacaggagcccagacacctag

SEQ ID NO: 163936 - DNA, 2064 bp, synthetic construct
  misc_feature 1..2064: note = Description of Artificial Sequence: Synthetic coding sequence
  source 1..2064: mol_type = other DNA
atggcctttgtgtgggaccccctgggcgccaccgtgcccggccccagcacccgggccaagagccggctgcgcttcagcaagagctacagctttgatgtggacaatggcaccagcgctggccgcagccccctggaccccatgaccagccctggcagcggcctcatcctgcaggccaactttgtgcacagccagaggcgggagagcttcctgtacagaagtgacagcgactatgacctgagccccaagtccatgagcaggaacagcagcatcgccagtgacatccatggagatgacctgattgtgaccccatttgcccaggtgctggccagcctgaggacagtgaggaacaactttgctgccctgaccaacctgcaggaccgggcccccagcaagaggagccccatgtgcaaccagcccagcatcaacaaggccaccatcacagaggaggcctaccagaagctggccagcgagaccctggaggagctggactggtgcctggaccagctggagaccctgcagaccaggcacagcgtgtctgagatggccagcaacaagttcaagaggatgctgaaccgggagctgacccacctgtctgagatgagccgcagcggcaaccaggtgtctgagttcatcagcaacaccttcctggacaagcagcacgaggtggagatccccagccccacccagaaggagaaggagaagaagaagaggcccatgagccagatctctggagtgaagaagctgatgcacagcagcagcctgaccaacagcagcatcccccgcttcggcgtgaagacagagcaggaggatgtgctggccaaggagctggaggatgtgaacaagtggggcctgcacgtgttcagaattgctgagctgagcggcaaccggcccctgaccgtcatcatgcacaccatcttccaggagcgggacctgctgaagaccttcaagatccctgtggacaccctcatcacctacctgatgaccctggaggaccactaccacgcagatgtggcctaccacaacaacatccatgctgctgatgtggtgcagagcacccacgtgctgctgagcaccccagccctggaggccgtgttcacagacctggagatcctggccgccatctttgccagcgccatccatgatgtggaccaccctggggtgagcaaccagttcctgatcaacaccaacagcgagctggccctgatgtacaatgacagctctgtgctggagaaccaccacctggccgtgggcttcaagctgctgcaggaggagaactgtgacatcttccagaacctgaccaagaagcagaggcagagcctgaggaagatggtgattgatattgtgctggccacagacatgagcaagcacatgaacctgctggccgacctgaagaccatggtggagaccaagaaggtgaccagcagtggagtgctgctgctggacaactacagcgaccgcatccaggtgctgcagaacatggtgcactgtgccgacctgagcaaccccaccaagcccctgcagctgtaccggcagtggacagaccgcatcatggaggagttcttccggcagggcgaccgggagcgggagcggggcatggagatcagccccatgtgtgacaagcacaatgcctctgtggagaagagccaggtgggcttcatcgactacatcgtgcaccccctgtgggagacctgggccgacctggtgcacccagatgcccaggacatcctggacaccctggaggacaaccgggagtggtaccagagcaccatcccccagagccccagccctgccccagatgatcctgaggagggccggcagggccagacagagaagttccagtttgagctgaccctggaggaggatggagagagtgacacagagaaggacagcggcagccaggtggaggaggacaccagctgcagcgacagcaagaccctgtgcacccaggacagcgagagcacagagatccccctggatgagcaggtggaggaggaggccgtgggggaggaggaggagagccagcctgaggcctgtgtgattgatgacaggagcccagacacctag

SEQ ID NO: 163937 - DNA, 2247 bp, synthetic construct
  misc_feature 1..2247: note = Description of Artificial Sequence: Synthetic coding sequence
  source 1..2247: mol_type = other DNA
atgaagaggaacacctgtgacctgctgagccgcagcaagagcgccagcgaggagaccctgcacagcagcaatgaggaggaggaccccttccggggcatggagccctacctggtgcggcggctgagctgcaggaacatccagctgccccccctggccttccggcagctggagcaggccgacctgaagtctgagagcgagaacatccagaggcccaccagcctgcccctgaagatcctgcccctcatcgccatcaccagcgctgagagcagcggctttgatgtggacaatggcaccagcgctggccgcagccccctggaccccatgaccagccctggcagcggcctcatcctgcaggccaactttgtgcacagccagaggcgggagagcttcctgtacagaagtgacagcgactatgacctgagccccaagtccatgagcaggaacagcagcatcgccagtgacatccatggagatgacctgattgtgaccccatttgcccaggtgctggccagcctgaggacagtgaggaacaactttgctgccctgaccaacctgcaggaccgggcccccagcaagaggagccccatgtgcaaccagcccagcatcaacaaggccaccatcacagaggaggcctaccagaagctggccagcgagaccctggaggagctggactggtgcctggaccagctggagaccctgcagaccaggcacagcgtgtctgagatggccagcaacaagttcaagaggatgctgaaccgggagctgacccacctgtctgagatgagccgcagcggcaaccaggtgtctgagttcatcagcaacaccttcctggacaagcagcacgaggtggagatccccagccccacccagaaggagaaggagaagaagaagaggcccatgagccagatcagcggcgtgaagaagctgatgcacagcagcagcctgaccaacagcagcatccccaggtttggagtgaagacagagcaggaggatgtgctggccaaggagctggaggatgtgaacaagtggggcctgcacgtgttcagaattgctgagctgagcggcaaccggcccctgaccgtcatcatgcacaccatcttccaggagcgggacctgctgaagaccttcaagatccctgtggacaccctcatcacctacctgatgaccctggaggaccactaccacgcagatgtggcctaccacaacaacatccacgccgcagatgtggtgcagagcacccacgtgctgctgagcaccccagccctggaggccgtgttcacagacctggagatcctggccgccatctttgccagcgccatccatgatgtggaccaccctggggtgagcaaccagttcctgatcaacaccaacagcgagctggccctgatgtacaatgacagctctgtgctggagaaccaccacctggccgtgggcttcaagctgctgcaggaggagaactgtgacatcttccagaacctgaccaagaagcagaggcagagcctgaggaagatggtgattgacatcgtgctggccacagacatgagcaagcacatgaacctgctggccgacctgaagaccatggtggagaccaagaaggtgaccagcagcggcgtgctgctgctggacaactacagcgaccgcatccaggtgctgcagaacatggtgcactgtgccgacctgagcaaccccaccaagcccctgcagctgtaccggcagtggacagaccgcatcatggaggagttcttccggcagggcgaccgggagcgggagcggggcatggagatcagccccatgtgtgacaagcacaatgcctctgtggagaagagccaggtgggcttcatcgactacatcgtgcaccccctgtgggagacctgggccgacctggtgcacccagatgcccaggacatcctggacaccctggaggacaaccgggagtggtaccagagcaccatcccccagagccccagccctgccccagatgatcctgaggagggccggcagggccagacagagaagttccagtttgagctgaccctggaggaggatggagagagtgacacagagaaggacagcggcagccaggtggaggaggacaccagctgcagcgacagcaagaccctgtgcacccaggacagcgagagcacagagatccccctggatgagcaggtggaggaggaggccgtgggggaggaggaggagagccagcctgaggcctgtgtgattgatgacaggagcccagacacctag

SEQ ID NO: 163938 - DNA, 660 bp, synthetic construct
  misc_feature 1..660: note = Description of Artificial Sequence: Synthetic coding sequence
  source 1..660: mol_type = other DNA
atggcccagcagaccagcccagacaccctgactgtgcctgaggtggacaacccccactgccccaacccctggctgaatgaagacctggtgaagagcctgcgggagaacctgctgcagcacgagaagagcaagacagccaggaagtctgtgagccccaagctgagccctgtgatcagccccaggaacagcccccggctgctgcggaggatgctgctgagcagcaacatccccaagcagaggcgcttcaccgtggcccacacctgctttgatgtggacaatggcaccagcgctggccgcagccccctggaccccatgaccagccctggcagcggcctcatcctgcaggccaactttgtgcacagccagaggcgggagagcttcctgtacagaagtgacagcgactatgacctgagccccaagtccatgagcaggaacagcagcatcgccagtgacatccatggagatgacctgattgtgaccccatttgcccaggtgctggccagcctgaggacagtgaggaacaactttgctgccctgaccaacctgcaggaccgggcccccagcaagaggagccccatgtgcaaccagcccagcatcaacaaggccaccatcaccggctcctggatggagctgaacccctacaccctgctggacatgtag

SEQ ID NO: 163939 - DNA, 2040 bp, synthetic construct
  misc_feature 1..2040: note = Description of Artificial Sequence: Synthetic coding sequence
  source 1..2040: mol_type = other DNA
atgagcatcatcatgaagcccaggagccgcagcaccagcagcctgaggacagctgaggccgtgtgctttgatgtggacaatggcaccagcgctggccgcagccccctggaccccatgaccagccctggcagcggcctcatcctgcaggccaactttgtgcacagccagaggcgggagagcttcctgtacagaagtgacagcgactatgacctgagccccaagtccatgagcaggaacagcagcatcgccagtgacatccatggagatgacctgattgtgaccccatttgcccaggtgctggccagcctgaggacagtgaggaacaactttgctgccctgaccaacctgcaggaccgggcccccagcaagaggagccccatgtgcaaccagcccagcatcaacaaggccaccatcacagaggaggcctaccagaagctggccagcgagaccctggaggagctggactggtgcctggaccagctggagaccctgcagaccaggcacagcgtgtctgagatggccagcaacaagttcaagaggatgctgaaccgggagctgacccacctgtctgagatgagccgcagcggcaaccaggtgtctgagttcatcagcaacaccttcctggacaagcagcacgaggtggagatccccagccccacccagaaggagaaggagaagaagaagaggcccatgagccagatctctggagtgaagaagctgatgcacagcagcagcctgaccaacagcagcatcccccgcttcggcgtgaagacagagcaggaggatgtgctggccaaggagctggaggatgtgaacaagtggggcctgcacgtgttcagaattgctgagctgagcggcaaccggcccctgaccgtcatcatgcacaccatcttccaggagcgggacctgctgaagaccttcaagatccctgtggacaccctcatcacctacctgatgaccctggaggaccactaccacgcagatgtggcctaccacaacaacatccatgctgctgatgtggtgcagagcacccacgtgctgctgagcaccccagccctggaggccgtgttcacagacctggagatcctggccgccatctttgccagcgccatccatgatgtggaccaccctggggtgagcaaccagttcctgatcaacaccaacagcgagctggccctgatgtacaatgacagctctgtgctggagaaccaccacctggccgtgggcttcaagctgctgcaggaggagaactgtgacatcttccagaacctgaccaagaagcagaggcagagcctgaggaagatggtgattgatattgtgctggccacagacatgagcaagcacatgaacctgctggccgacctgaagaccatggtggagaccaagaaggtgaccagcagtggagtgctgctgctggacaactacagcgaccgcatccaggtgctgcagaacatggtgcactgtgccgacctgagcaaccccaccaagcccctgcagctgtaccggcagtggacagaccgcatcatggaggagttcttccggcagggcgaccgggagcgggagcggggcatggagatcagccccatgtgtgacaagcacaatgcctctgtggagaagagccaggtgggcttcatcgactacatcgtgcaccccctgtgggagacctgggccgacctggtgcacccagatgcccaggacatcctggacaccctggaggacaaccgggagtggtaccagagcaccatcccccagagccccagccctgccccagatgatcctgaggagggccggcagggccagacagagaagttccagtttgagctgaccctggaggaggatggagagagtgacacagagaaggacagcggcagccaggtggaggaggacaccagctgcagcgacagcaagaccctgtgcacccaggacagcgagagcacagagatccccctggatgagcaggtggaggaggaggccgtgggggaggaggaggagagccagcctgaggcctgtgtgattgatgacaggagcccagacacctag

SEQ ID NO: 163940 - DNA, 1269 bp, synthetic construct
  misc_feature 1..1269: note = Description of Artificial Sequence: Synthetic coding sequence
  source 1..1269: mol_type = other DNA
atggccagcaacaagttcaagaggatgctgaaccgggagctgacccacctgtctgagatgagccgcagcggcaaccaggtgtctgagttcatcagcaacaccttcctggacaagcagcacgaggtggagatccccagccccacccagaaggagaaggagaagaagaagaggcccatgagccagatctctggagtgaagaagctgatgcacagcagcagcctgaccaacagcagcatcccccgcttcggcgtgaagacagagcaggaggatgtgctggccaaggagctggaggatgtgaacaagtggggcctgcacgtgttcagaattgctgagctgagcggcaaccggcccctgaccgtcatcatgcacaccatcttccaggagcgggacctgctgaagaccttcaagatccctgtggacaccctcatcacctacctgatgaccctggaggaccactaccacgcagatgtggcctaccacaacaacatccatgctgctgatgtggtgcagagcacccacgtgctgctgagcaccccagccctggaggccgtgttcacagacctggagatcctggccgccatctttgccagcgccatccatgatgtggaccaccctggggtgagcaaccagttcctgatcaacaccaacagcgagctggccctgatgtacaatgacagctctgtgctggagaaccaccacctggccgtgggcttcaagctgctgcaggaggagaactgtgacatcttccagaacctgaccaagaagcagaggcagagcctgaggaagatggtgattgatattgtgctggccacagacatgagcaagcacatgaacctgctggccgacctgaagaccatggtggagaccaagaaggtgaccagcagtggagtgctgctgctggacaactacagcgaccgcatccaggtgctgcagaacatggtgcactgtgccgacctgagcaaccccaccaagcccctgcagctgtaccggcagtggacagaccgcatcatggaggagttcttccggcagggcgaccgggagcgggagcggggcatggagatcagccccatgtgtgacaagcacaatgcctctgtggagaagagccaggtgggcttcatcgactacatcgtgcaccccctgtgggagacctgggccgacctggtgcacccagatgcccaggacatcctggacaccctggaggacaaccgggagtggtaccagagcaccatcccccagagccccagccctgccccagatgatcctgagtag

SEQ ID NO: 163941 - DNA, 246 bp, synthetic construct
  misc_feature 1..246: note = Description of Artificial Sequence: Synthetic coding sequence
  source 1..246: mol_type = other DNA
atgaagaggaacacctgtgacctgctgagccgcagcaagagcgccagcgaggagaccctgcacagcagcaatgaggaggaggaccccttccggggcatggagccctacctggtgcggcggctgagctgcaggaacatccagctgccccccctggccttccggcagctggagcaggccgacctgaagtctgagagcgagaacatccagaggcccaccagcctgcccctgaagatcctgcccctgtag

SEQ ID NO: 163942 - DNA, 2238 bp, synthetic construct
  misc_feature 1..2238: note = Description of Artificial Sequence: Synthetic coding sequence
  source 1..2238: mol_type = other DNA
atggcccagcagaccagcccagacaccctgactgtgcctgaggtggacaacccccactgccccaacccctggctgaatgaagacctggtgaagagcctgcgggagaacctgctgcagcacgagaagagcaagacagccaggaagtctgtgagccccaagctgagccctgtgatcagccccaggaacagcccccggctgctgcggaggatgctgctgagcagcaacatccccaagcagaggcgcttcaccgtggcccacacctgctttgatgtggacaatggcaccagcgctggccgcagccccctggaccccatgaccagccctggcagcggcctcatcctgcaggccaactttgtgcacagccagaggcgggagagcttcctgtacagaagtgacagcgactatgacctgagccccaagtccatgagcaggaacagcagcatcgccagtgacatccatggagatgacctgattgtgaccccatttgcccaggtgctggccagcctgaggacagtgaggaacaactttgctgccctgaccaacctgcaggaccgggcccccagcaagaggagccccatgtgcaaccagcccagcatcaacaaggccaccatcacagaggaggcctaccagaagctggccagcgagaccctggaggagctggactggtgcctggaccagctggagaccctgcagaccaggcacagcgtgtctgagatggccagcaacaagttcaagaggatgctgaaccgggagctgacccacctgtctgagatgagccgcagcggcaaccaggtgtctgagttcatcagcaacaccttcctggacaagcagcacgaggtggagatccccagccccacccagaaggagaaggagaagaagaagaggcccatgagccagatctctggagtgaagaagctgatgcacagcagcagcctgaccaacagcagcatcccccgcttcggcgtgaagacagagcaggaggatgtgctggccaaggagctggaggatgtgaacaagtggggcctgcacgtgttcagaattgctgagctgagcggcaaccggcccctgaccgtcatcatgcacaccatcttccaggagcgggacctgctgaagaccttcaagatccctgtggacaccctcatcacctacctgatgaccctggaggaccactaccacgcagatgtggcctaccacaacaacatccatgctgctgatgtggtgcagagcacccacgtgctgctgagcaccccagccctggaggccgtgttcacagacctggagatcctggccgccatctttgccagcgccatccatgatgtggaccaccctggggtgagcaaccagttcctgatcaacaccaacagcgagctggccctgatgtacaatgacagctctgtgctggagaaccaccacctggccgtgggcttcaagctgctgcaggaggagaactgtgacatcttccagaacctgaccaagaagcagaggcagagcctgaggaagatggtgattgatattgtgctggccacagacatgagcaagcacatgaacctgctggccgacctgaagaccatggtggagaccaagaaggtgaccagcagtggagtgctgctgctggacaactacagcgaccgcatccaggtgctgcagaacatggtgcactgtgccgacctgagcaaccccaccaagcccctgcagctgtaccggcagtggacagaccgcatcatggaggagttcttccggcagggcgaccgggagcgggagcggggcatggagatcagccccatgtgtgacaagcacaatgcctctgtggagaagagccaggtgggcttcatcgactacatcgtgcaccccctgtgggagacctgggccgacctggtgcacccagatgcccaggacatcctggacaccctggaggacaaccgggagtggtaccagagcaccatcccccagagccccagccctgccccagatgatcctgaggagggccggcagggccagacagagaagttccagtttgagctgaccctggaggaggatggagagagtgacacagagaaggacagcggcagccaggtggaggaggacaccagctgcagcgacagcaagaccctgtgcacccaggacagcgagagcacagagatccccctggatgagcaggtggaggaggaggccgtgggggaggaggaggagagccagcctgaggcctgtgtgattgatgacaggagcccagacacctag

SEQ ID NO: 163943 - DNA, 228 bp, synthetic construct
  misc_feature 1..228: note = Description of Artificial Sequence: Synthetic coding sequence
  source 1..228: mol_type = other DNA
atgaagaggaacacctgtgacctgctgagccgcagcaagagcgccagcgaggagaccctgcacagcagcaatgaggaggaggaccccttccggggcatggagccctacctggtgcggcggctgagctgcaggaacatccagctgccccccctggccttccggcagctggagcaggccgacctgaagtctgagagcgagaacatccagaggcccaccagcctgccctag

SEQ ID NO: 163944 - DNA, 2247 bp, synthetic construct; identical to SEQ ID NO: 163937
  misc_feature 1..2247: note = Description of Artificial Sequence: Synthetic coding sequence
  source 1..2247: mol_type = other DNA

SEQ ID NO: 163945 - DNA, 2502 bp, synthetic construct
  misc_feature 1..2502: note = Description of Artificial Sequence: Synthetic coding sequence
  source 1..2502: mol_type = other DNA
atgctgccctttggagacaagacccgggagatggtgaatgcctggtttgctgagcgggtgcacaccatccctgtgtgcaaggagggcatccggggccacacagagagctgcagctgccccctgcagcagagccccagggctgacaacagcgcccctggcacccccaccaggaagatcagcgccagcgagtttgaccggcccctgcggcccatcgtggtgaaggacagcgagggcaccgtgtccttcctgagtgacagcgagaagaaggagcagatgcccctgaccccacccaggtttgaccatgatgaaggagaccagtgcagccggctgctggagctggtgaaggacatcagcagccacctggatgtgacagccctgtgccacaagatcttcctgcacatccacggcctcatctctgctgaccgctacagcctcttcctggtgtgtgaggacagcagcaatgacaagttcctgatcagccggctgtttgatgtggccgagggcagcaccctggaggaggtgagcaacaactgcatccggctggagtggaacaagggcatcgtgggccacgtggccgccctgggggagcccctgaacatcaaggatgcctatgaggacccccgcttcaatgctgaggtggaccagatcaccggctacaagacccagagcatcctgtgcatgcccatcaagaaccaccgggaggaggtggtgggcgtggcccaggccatcaacaagaagtctggaaatggaggcaccttcacagagaaggatgagaaggactttgctgcctacctggccttctgtggcatcgtgctgcacaatgcccagctgtatgagaccagcctgctggagaacaagaggaaccaggtgctgctggacctggccagcctcatctttgaggagcagcagagcctggaggtgatcctgaagaagattgctgccaccatcatctccttcatgcaggtgcagaagtgcaccatcttcatcgtggatgaggactgcagcgacagcttcagcagcgtcttccacatggagtgtgaggagctggagaagagcagtgacaccctgacccgggagcatgatgccaacaagatcaactacatgtatgcccagtatgtgaagaacaccatggagcccctgaacatcccagatgtgtccaaggacaagcgcttcccctggaccacagagaacacaggaaatgtgaaccagcagtgcatccgcagcctgctgtgcacccccatcaagaatggcaagaagaacaaggtgattggagtgtgccagctggtgaacaagatggaggagaacacaggcaaggtgaagcccttcaacagaaatgatgagcagttcctggaggcctttgtgatcttctgtggcctgggcatccagaacacccagatgtatgaagctgtggagcgggccatggccaagcagatggtgaccctggaggtgctgagctaccacgccagcgctgctgaggaggagacccgggagctgcagagcctggccgctgctgtggtgcccagcgcccagaccctgaagatcacagacttctccttcagtgactttgagctgagtgacctggagacagccctgtgcaccatccgcatgttcacagacctgaacctggtgcagaacttccagatgaagcatgaggtgctgtgccgctggatcctgtctgtgaagaagaactacaggaagaatgtggcctaccacaactggaggcatgccttcaacacagcccagtgcatgtttgctgccctgaaggccggcaagatccagaacaagctgacagacctggagatcctggccctgctgattgctgccctgagccatgacctggaccacagaggagtgaacaacagctacatccagaggtctgagcaccccctggcccagctgtactgccacagcatcatggagcaccaccactttgaccagtgcctgatgatcctgaacagccctggcaaccagatcctgagcggcctgagcattgaggagtacaagaccaccctgaagatcatcaagcaggccatcctggccacagacctggccctgtacatcaagagaagaggagagttctttgagctgatcaggaagaaccagttcaacctggaggacccccaccagaaggagctgttcctggccatgctgatgacagcctgtgacctgagcgccatcaccaagccctggcccatccagcagagaattgctgagctggtggccacagagttctttgaccagggcgaccgggagaggaaggagctgaacatcgagcccacagacctgatgaaccgggagaagaagaacaagatccccagcatgcaggtgggcttcattgatgccatctgcctgcagctgtatgaggccctgacccacgtgtctgaggactgcttccccctgctggatggctgcaggaagaaccggcagaagtggcaggccctggccgagcagcaggagaagatgctgatcaacggggagagcggccaggccaagaggaactag

SEQ ID NO: 163946 - DNA, 2628 bp, synthetic construct
  misc_feature 1..2628: note = Description of Artificial Sequence: Synthetic coding sequence
  source 1..2628: mol_type = other DNA
atggagcgggccggccccagctttggccagcagaggcagcagcagcagccccagcagcagaagcagcagcagagggaccaggacagcgtggaggcctggctggatgaccactgggacttcaccttctcctactttgtgaggaaggccacccgggagatggtgaatgcctggtttgctgagcgggtgcacaccatccctgtgtgcaaggagggcatccggggccacacagagagctgcagctgccccctgcagcagagccccagggctgacaacagcgcccctggcacccccaccaggaagatcagcgccagcgagtttgaccggcccctgcggcccatcgtggtgaaggacagcgagggcaccgtgtccttcctgagtgacagcgagaagaaggagcagatgcccctgaccccacccaggtttgaccatgatgaaggagaccagtgcagccggctgctggagctggtgaaggacatcagcagccacctggatgtgacagccctgtgccacaagatcttcctgcacatccacggcctcatctctgctgaccgctacagcctcttcctggtgtgtgaggacagcagcaatgacaagttcctgatcagccggctgtttgatgtggccgagggcagcaccctggaggaggtgagcaacaactgcatccggctggagtggaacaagggcatcgtgggccacgtggccgccctgggggagcccctgaacatcaaggatgcctatgaggacccccgcttcaatgctgaggtggaccagatcaccggctacaagacccagagcatcctgtgcatgcccatcaagaaccaccgggaggaggtggtgggcgtggcccaggccatcaacaagaagtctggaaatggaggcaccttcacagagaaggatgagaaggactttgctgcctacctggccttctgtggcatcgtgctgcacaatgcccagctgtatgagaccagcctgctggagaacaagaggaaccaggtgctgctggacctggccagcctcatctttgaggagcagcagagcctggaggtgatcctgaagaagattgctgccaccatcatctccttcatgcaggtgcagaagtgcaccatcttcatcgtggatgaggactgcagcgacagcttcagcagcgtcttccacatggagtgtgaggagctggagaagagcagtgacaccctgacccgggagcatgatgccaacaagatcaactacatgtatgcccagtatgtgaagaacaccatggagcccctgaacatcccagatgtgtccaaggacaagcgcttcccctggaccacagagaacacaggaaatgtgaaccagcagtgcatccgcagcctgctgtgcacccccatcaagaatggcaagaagaacaaggtgattggagtgtgccagctggtgaacaagatggaggagaacacaggcaaggtgaagcccttcaacagaaatgatgagcagttcctggaggcctttgtgatcttctgtggcctgggcatccagaacacccagatgtatgaagctgtggagcgggccatggccaagcagatggtgaccctggaggtgctgagctaccacgccagcgctgctgaggaggagacccgggagctgcagagcctggccgctgctgtggtgcccagcgcccagaccctgaagatcacagacttctccttcagtgactttgagctgagtgacctggagacagccctgtgcaccatccgcatgttcacagacctgaacctggtgcagaacttccagatgaagcatgaggtgctgtgccgctggatcctgtctgtgaagaagaactacaggaagaatgtggcctaccacaactggaggcatgccttcaacacagcccagtgcatgtttgctgccctgaaggccggcaagatccagaacaagctgacagacctggagatcctggccctgctgattgctgccctgagccatgacctggaccacagaggagtgaacaacagctacatccagaggtctgagcaccccctggcccagctgtactgccacagcatcatggagcaccaccactttgaccagtgcctgatgatcctgaacagccctggcaaccagatcctgagcggcctgagcattgaggagtacaagaccaccctgaagatcatcaagcaggccatcctggccacagacctggccctgtacatcaagagaagaggagagttctttgagctgatcaggaagaaccagttcaacctggaggacccccaccagaaggagctgttcctggccatgctgatgacagcctgtgacctgagcgccatcaccaagccctggcccatccagcagagaattgctgagctggtggccacagagttctttgaccagggcgaccgggagaggaaggagctgaacatcgagcccacagacctgatgaaccgggagaagaagaacaagatccccagcatgcaggtgggcttcattgatgccatctgcctgcagctgtatgaggccctgacccacgtgtctgaggactgcttccccctgctggatggctgcaggaagaaccggcagaagtggcaggccctggccgagcagcaggagaagatgctgatcaacggggagagcggccaggccaagaggaactag

SEQ ID NO: 163947 - DNA, 2472 bp, synthetic construct
  misc_feature 1..2472: note = Description of Artificial Sequence: Synthetic coding sequence
  source 1..2472: mol_type = other DNA
atggtgaatgcctggtttgctgagcgggtgcacaccatccctgtgtgcaaggagggcatccggggccacacagagagctgcagctgccccctgcagcagagccccagggctgacaacagcgcccctggcacccccaccaggaagatcagcgccagcgagtttgaccggcccctgcggcccatcgtggtgaaggacagcgagggcaccgtgtccttcctgagtgacagcgagaagaaggagcagatgcccctgaccccacccaggtttgaccatgatgaaggagaccagtgcagccggctgctggagctggtgaaggacatcagcagccacctggatgtgacagccctgtgccacaagatcttcctgcacatccacggcctcatctctgctgaccgctacagcctcttcctggtgtgtgaggacagcagcaatgacaagttcctgatcagccggctgtttgatgtggccgagggcagcaccctggaggaggtgagcaacaactgcatccggctggagtggaacaagggcatcgtgggccacgtggccgccctgggggagcccctgaacatcaaggatgcctatgaggacccccgcttcaatgctgaggtggaccagatcaccggctacaagacccagagcatcctgtgcatgcccatcaagaaccaccgggaggaggtggtgggcgtggcccaggccatcaacaagaagtctggaaatggaggcaccttcacagagaaggatgagaaggactttgctgcctacctggccttctgtggcatcgtgctgcacaatgcccagctgtatgagaccagcctgctggagaacaagaggaaccaggtgctgctggacctggccagcctcatctttgaggagcagcagagcctggaggtgatcctgaagaagattgctgccaccatcatctccttcatgcaggtgcagaagtgcaccatcttcatcgtggatgaggactgcagcgacagcttcagcagcgtcttccacatggagtgtgaggagctggagaagagcagtgacaccctgacccgggagcatgatgccaacaagatcaactacatgtatgcccagtatgtgaagaacaccatggagcccctgaacatcccagatgtgtccaaggacaagcgcttcccctggaccacagagaacacaggaaatgtgaaccagcagtgcatccgcagcctgctgtgcacccccatcaagaatggcaagaagaacaaggtgattggagtgtgccagctggtgaacaagatggaggagaacacaggcaaggtgaagcccttcaacagaaatgatgagcagttcctggaggcctttgtgatcttctgtggcctgggcatccagaacacccagatgtatgaagctgtggagcgggccatggccaagcagatggtgaccctggaggtgctgagctaccacgccagcgctgctgaggaggagacccgggagctgcagagcctggccgctgctgtggtgcccagcgcccagaccctgaagatcacagacttctccttcagtgactttgagctgagtgacctggagacagccctgtgcaccatccgcatgttcacagacctgaacctggtgcagaacttccagatgaagcatgaggtgctgtgccgctggatcctgtctgtgaagaagaactacaggaagaatgtggcctaccacaactggaggcatgccttcaacacagcccagtgcatgtttgctgccctgaaggccggcaagatccagaacaagctgacagacctggagatcctggccctgctgattgctgccctgagccatgacctggaccacagaggagtgaacaacagctacatccagaggtctgagcaccccctggcccagctgtactgccacagcatcatggagcaccaccactttgaccagtgcctgatgatcctgaacagccctggcaaccagatcctgagcggcctgagcattgaggagtacaagaccaccctgaagatcatcaagcaggccatcctggccacagacctggccctgtacatcaagagaagaggagagttctttgagctgatcaggaagaaccagttcaacctggaggacccccaccagaaggagctgttcctggccatgctgatgacagcctgtgacctgagcgccatcaccaagccctggcccatccagcagagaattgctgagctggtggccacagagttctttgaccagggcgaccgggagaggaaggagctgaacatcgagcccacagacctgatgaaccgggagaagaagaacaagatccccagcatgcaggtgggcttcattgatgccatctgcctgcagctgtatgaggccctgacccacgtgtctgaggactgcttccccctgctggatggctgcaggaagaaccggcagaagtggcaggccctggccgagcagcaggagaagatgctgatcaacggggagagcggccaggccaagaggaactag

SEQ ID NO: 163948 - DNA, 2583 bp, synthetic construct
  misc_feature 1..2583: note = Description of Artificial Sequence: Synthetic coding sequence
  source 1..2583: mol_type = other DNA
atgggagaggtgacagctgaggaggtggagaagttcctggacagcaacattggatttgccaagcagtactacaacctgcactaccgggccaagctgatcagtgacctgctgggcgccaaggaggccgctgtggacttcagcaactaccacagccccagctccatggaggagagcgagatcatctttgacctgctgcgggacttccaggagaacctgcagacagagaagtgcatcttcaacgtgatgaagaagctgtgcttcctgctgcaggccgacaggatgagcctcttcatgtaccgcaccagaaatggaattgctgagctggccaccaggctcttcaacgtgcacaaggatgctgtgctggaggactgcctggtgatgccagaccaggagatcgtgttccccctggacatgggcatcgtgggccacgtggcccacagcaagaagatcgccaacgtgcccaacacagaggaggatgagcacttctgtgactttgtggacatcctgacagagtacaagaccaagaacatcctggccagccccatcatgaatggcaaggatgtggtggccatcatcatggctgtgaacaaggtggatggcagccacttcaccaagagagatgaggagatcctgctgaagtacctgaactttgccaacctgatcatgaaggtgtaccacctgagctacctgcacaactgtgagacccggcggggccagatcctgctgtggagcggcagcaaggtgtttgaggagctgacagacatcgagcggcagttccacaaggccctgtacacagtgcgggccttcctgaactgtgaccgctacagcgtgggcctgctggacatgaccaagcagaaggagttctttgatgtgtggcctgtgctgatgggagaggtgcccccctacagcggccccaggaccccagatggccgggagatcaacttctacaaggtgattgactacatcctgcacggcaaggaggacatcaaggtgatccccaaccccccaccagaccactgggccctggtgtctggcctgcctgcctacgtggcccagaatggcctcatctgcaacatcatgaatgccccagctgaggacttctttgccttccagaaggagcccctggatgagagcggctggatgatcaagaatgtgctgtccatgcccatcgtgaacaagaaggaggagatcgtgggcgtggccaccttctacaacaggaaggatggcaagccctttgatgagatggatgagaccctgatggagagcctgacccagttcctgggctggagcgtgctgaacccagacacctatgaatccatgaacaagctggagaacaggaaggacatcttccaggacatcgtgaagtaccacgtgaagtgtgacaatgaggagatccagaagatcctgaagacccgggaggtgtatggcaaggagccctgggagtgtgaggaggaggagctggccgagatcctgcaggccgagctgcctgatgctgacaagtatgagatcaacaagttccacttcagtgacctgcccctgacagagctggagctggtgaagtgtggcatccagatgtactatgagctgaaggtggtggacaagttccacatcccccaggaggccctggtgcgcttcatgtacagcctgagcaagggctacaggaagatcacctaccacaactggaggcatggcttcaacgtgggccagaccatgttcagcctgctggtgacaggcaagctgaagcgctacttcacagacctggaggccctggccatggtgacagctgccttctgccacgacatcgaccaccggggcaccaacaacctgtaccagatgaagagccagaaccccctggccaagctgcacggcagcagcatcctggagcggcaccacctggagtttgggaagaccctgctgagagatgagagcctgaacatcttccagaacctgaacagacggcagcatgaacatgccatccacatgatggacatcgccatcatcgccacagacctggccctgtacttcaagaagaggaccatgttccagaagatcgtggaccagagcaagacctatgaaagtgagcaggagtggacccagtacatgatgctggagcagaccaggaaggagatcgtgatggccatgatgatgacagcctgtgacctgagcgccatcaccaagccctgggaggtgcagagccaggtggccctgctggtggccgctgagttctgggagcagggcgacctggagaggacagtgctgcagcagaaccccatccccatgatggacaggaacaaggcagatgagctgcccaagctgcaggtgggcttcatcgactttgtgtgcacctttgtgtacaaggagttcagccgcttccacgaggagatcacccccatgctggatggcatcaccaacaacaggaaggagtggaaggccctggctgatgaatatgatgccaagatgaaggtgcaggaggagaagaagcagaagcagcagagcgccaagtctgctgctgctggcaaccagcccggcggcaaccccagccctgggggcgccaccaccagcaagagctgctgcatccagtag

SEQ ID NO: 163949 - DNA, 1728 bp, synthetic construct
  misc_feature 1..1728: note = Description of Artificial Sequence: Synthetic coding sequence
  source 1..1728: mol_type = other DNA
atgaccaaggagaaggagttctttgatgtgtggagcgtgctgatgggagagagccagccctacagcggccccaggaccccagatggccgggagatcgtgttctacaaggtgattgattatgtgctgcacggcaaggaggagatcaaggtgatccccaccccatctgctgaccactgggccctggccagcggcctgcccagctatgtggccgagagcggcttcatctgcaacatcatgaatgccagcgcagatgagatgttcaagttccaggagggcgccctggatgattctggctggctgatcaagaatgtgctgtccatgcccatcgtgaacaagaaggaggagatcgtgggcgtggccaccttctacaacaggaaggatggcaagccctttgatgagcaggatgaggtgctgatggagagcctgacccagttcctgggctggagcgtgatgaacacagacacctatgacaagatgaacaagctggagaacaggaaggacatcgcccaggacatggtgctgtaccacgtgaagtgtgacagagatgagatccagctgatcctgcccacccgggcccggctgggcaaggagcctgctgactgtgatgaagatgagctgggggagatcctgaaggaggagctgcccggccccaccacctttgacatctatgagttccacttcagtgacctggagtgcacagagctggacctggtgaagtgtggcatccagatgtactatgagctgggcgtggtgaggaagttccagatcccccaggaggtgctggtgcgcttcctgttcagcatcagcaagggctaccgccgcatcacctaccacaactggaggcatggcttcaacgtggcccagaccatgttcaccctgctgatgaccgggaagctgaagagctactacacagacctggaggcctttgccatggtgacagctggcctgtgccacgacatcgaccaccggggcaccaacaacctgtaccagatgaagagccagaaccccctggccaagctgcacggcagcagcatcctggagcggcaccacctggagtttgggaagttcctgctgtctgaggagaccctgaacatctaccagaacctgaacagacggcagcacgagcacgtgatccacctgatggacatcgccatcatcgccacagacctggccctgtacttcaagaagagggccatgttccagaagatcgtggatgagagcaagaactaccaggacaagaagtcctgggtggagtacctgagcctggagaccaccaggaaggagatcgtgatggccatgatgatgacagcctgtgacctgagcgccatcaccaagccctgggaggtgcagagcaaggtggccctgctggtggccgctgagttctgggagcagggcgacctggagaggacagtgctggaccagcagcccatccccatgatggacaggaacaaggctgctgagctgcccaagctgcaggtgggcttcatcgactttgtgtgcacctttgtgtacaaggagttcagccgcttccacgaggagatcctgcccatgtttgaccggctgcagaacaacaggaaggagtggaaggccctggctgatgaatatgaggccaaggtgaaggccctggaggagaaggaggaggaggagcgggtggccgccaagaaggtgggcacagagatctgcaatggaggccctgcccccaagagcagcacctgctgcatcctgtag

SEQ ID NO: 163950 - DNA, 2562 bp, synthetic construct
  misc_feature 1..2562: note = Description of Artificial Sequence: Synthetic coding sequence
  source 1..2562: mol_type = other DNA
atgagcctgtctgaggagcaggcccggagcttcctggaccagaacccagactttgcccggcagtactttgggaagaagctgagcccagaaaatgtggccgccgcctgtgaagatggctgccccccagactgtgacagcctgcgggacctgtgccaggtggaggagagcacagccctgctggagctggtgcaggacatgcaggagagcatcaacatggagcgggtggtgttcaaggtgctgcggcggctgtgcaccctgctgcaggccgaccgctgcagcctcttcatgtaccggcagagaaatggagtggccgagctggccaccaggctcttctctgtgcagccagattctgtgctggaggactgcctggtgcccccagacagcgagatcgtgttccccctggacatcggcgtggtgggccacgtggcccagaccaagaagatggtgaatgtggaggatgtggccgagtgcccccacttcagcagctttgctgatgagctgacagactacaagaccaagaacatgctggccacccccatcatgaatggcaaggatgtggtggccgtcatcatggctgtgaacaagctgaatggccccttcttcaccagtgaagatgaagatgtgttcctgaagtacctgaactttgccaccctgtacctgaagatctaccacctgagctacctgcacaactgtgagacccggcggggccaggtgctgctgtggagcgccaacaaggtgtttgaggagctgacagacatcgagcggcagttccacaaggccttctacacagtgcgggcctacctgaactgtgagcgctacagcgtgggcctgctggacatgaccaaggagaaggagttctttgatgtgtggagcgtgctgatgggagagagccagccctacagcggccccaggaccccagatggccgggagatcgtgttctacaaggtgattgattatgtgctgcacggcaaggaggagatcaaggtgatccccacccccagcgctgaccactgggccctggccagcggcctgcccagctatgtggccgagagcggcttcatctgcaacatcatgaatgccagcgcagatgagatgttcaagttccaggagggcgccctggatgacagcggctggctgatcaagaatgtgctgtccatgcccatcgtgaacaagaaggaggagatcgtgggcgtggccaccttctacaacaggaaggatggcaagccctttgatgagcaggatgaggtgctgatggagagcctgacccagttcctgggctggagcgtgatgaacacagacacctatgacaagatgaacaagctggagaacaggaaggacatcgcccaggacatggtgctgtaccacgtgaagtgtgacagagatgagatccagctgatcctgcccacccgggcccggctgggcaaggagcctgctgactgtgatgaagatgagctgggggagatcctgaaggaggagctgcccggccccaccacctttgacatctatgagttccacttcagtgacctggagtgcacagagctggacctggtgaagtgtggcatccagatgtactatgagctgggcgtggtgaggaagttccagatcccccaggaggtgctggtgcgcttcctgttcagcatcagcaagggctaccgccgcatcacctaccacaactggaggcatggcttcaacgtggcccagaccatgttcaccctgctgatgaccgggaagctgaagagctactacacagacctggaggcctttgccatggtgacagctggcctgtgccacgacatcgaccaccggggcaccaacaacctgtaccagatgaagagccagaaccccctggccaagctgcacggcagcagcatcctggagcggcaccacctggagtttgggaagttcctgctgtctgaggagaccctgaacatctaccagaacctgaacagacggcagcatgaacatgtgatccacctgatggacatcgccatcatcgccacagacctggccctgtacttcaagaagagggccatgttccagaagatcgtggatgagagcaagaactaccaggacaagaagtcctgggtggagtacctgagcctggagaccaccaggaaggagatcgtgatggccatgatgatgacagcctgtgacctgagcgccatcaccaagccctgggaggtgcagagcaaggtggccctgctggtggccgctgagttctgggagcagggcgacctggagaggacagtgctggaccagcagcccatccccatgatggacaggaacaaggctgctgagctgcccaagctgcaggtgggcttcatcgactttgtgtgcacctttgtgtacaaggagttcagccgcttccacgaggagatcctgcccatgtttgaccggctgcagaacaacaggaaggagtggaaggccctggctgatgaatatgaggccaaggtgaaggccctggaggagaaggaggaggaggagcgggtggccgccaagaagggcacagagatctgcaatggaggccctgcccccaagagcagcacctgctgcatcctgtag

SEQ ID NO: 163951 - DNA, 2565 bp, synthetic construct
  misc_feature 1..2565: note = Description of Artificial Sequence: Synthetic coding sequence
  source 1..2565: mol_type = other DNA
atgagcctgtctgaggagcaggcccggagcttcctggaccagaacccagactttgcccggcagtactttgggaagaagctgagcccagaaaatgtggccgccgcctgtgaagatggctgccccccagactgtgacagcctgcgggacctgtgccaggtggaggagagcacagccctgctggagctggtgcaggacatgcaggagagcatcaacatggagcgggtggtgttcaaggtgctgcggcggctgtgcaccctgctgcaggccgaccgctgcagcctcttcatgtaccggcagagaaatggagtggccgagctggccaccaggctcttctctgtgcagccagattctgtgctggaggactgcctggtgcccccagacagcgagatcgtgttccccctggacatcggcgtggtgggccacgtggcccagaccaagaagatggtgaatgtggaggatgtggccgagtgcccccacttcagcagctttgctgatgagctgacagactacaagaccaagaacatgctggccacccccatcatgaatggcaaggatgtggtggccgtcatcatggctgtgaacaagctgaatggccccttcttcaccagtgaagatgaagatgtgttcctgaagtacctgaactttgccaccctgtacctgaagatctaccacctgagctacctgcacaactgtgagacccggcggggccaggtgctgctgtggagcgccaacaaggtgtttgaggagctgacagacatcgagcggcagttccacaaggccttctacacagtgcgggcctacctgaactgtgagcgctacagcgtgggcctgctggacatgaccaaggagaaggagttctttgatgtgtggagcgtgctgatgggagagagccagccctacagcggccccaggaccccagatggccgggagatcgtgttctacaaggtgattgattatgtgctgcacggcaaggaggagatcaaggtgatccccacccccagcgctgaccactgggccctggccagcggcctgcccagctatgtggccgagagcggcttcatctgcaacatcatgaatgccagcgcagatgagatgttcaagttccaggagggcgccctggatgacagcggctggctgatcaagaatgtgctgtccatgcccatcgtgaacaagaaggaggagatcgtgggcgtggccaccttctacaacaggaaggatggcaagccctttgatgagcaggatgaggtgctgatggagagcctgacccagttcctgggctggagcgtgatgaacacagacacctatgacaagatgaacaagctggagaacaggaaggacatcgcccaggacatggtgctgtaccacgtgaagtgtgacagagatgagatccagctgatcctgcccacccgggcccggctgggcaaggagcctgctgactgtgatgaagatgagctgggggagatcctgaaggaggagctgcccggccccaccacctttgacatctatgagttccacttcagtgacctggagtgcacagagctggacctggtgaagtgtggcatccagatgtactatgagctgggcgtggtgaggaagttccagatcccccaggaggtgctggtgcgcttcctgttcagcatcagcaagggctaccgccgcatcacctaccacaactggaggcatggcttcaacgtggcccagaccatgttcaccctgctgatgaccgggaagctgaagagctactacacagacctggaggcctttgccatggtgacagctggcctgtgccacgacatcgaccaccggggcaccaacaacctgtaccagatgaagagccagaaccccctggccaagctgcacggcagcagcatcctggagcggcaccacctggagtttgggaagttcctgctgtctgaggagaccctgaacatctaccagaacctgaacagacggcagcatgaacatgtgatccacctgatggacatcgccatcatcgccacagacctggccctgtacttcaagaagagggccatgttccagaagatcgtggatgagagcaagaactaccaggacaagaagtcctgggtggagtacctgagcctggagaccaccaggaaggagatcgtgatggccatgatgatgacagcctgtgacctgagcgccatcaccaagccctgggaggtgcagagcaaggtggccctgctggtggccgctgagttctgggagcagggcgacctggagaggacagtgctggaccagcagcccatccccatgatggacaggaacaaggctgctgagctgcccaagctgcaggtgggcttcatcgactttgtgtgcacctttgtgtacaaggagttcagccgcttccacgaggagatcctgcccatgtttgaccggctgcagaacaacaggaaggagtggaaggccctggctgatgaatatgaggccaaggtgaaggccctggaggagaaggaggaggaggagcgggtggccgccaagaaggtgggcacagagatctgcaatggaggccctgcccccaagagcagcacctgctgcatcctgtag

SEQ ID NO: 163952 - DNA, 2577 bp, synthetic construct
  misc_feature 1..2577: note = Description of Artificial Sequence: Synthetic coding sequence
  source 1..2577: mol_type = other DNA
atgggagagatcaaccaggtggccgtggagaagtacctggaggagaacccccagtttgccaaggagtactttgacaggaagctgcgggtggaggtgctgggggagatcttcaagaacagccaggtgcctgtgcagagctccatgtccttcagcgagctgacccaggtggaggagagcgccctgtgcctggagctgctgtggacagtgcaggaggagggcggcaccccagagcagggcgtgcaccgggccctgcagaggctggcccacctgctgcaggccgaccgctgcagcatgttcctgtgccgcagcagaaatggcatccctgaggtggccagccggctgctggatgtgacccccaccagcaagtttgaggacaacctggtgggccctgacaaggaggtggtgttccccctggacatcggcatcgtgggctgggccgcccacaccaagaagacccacaacgtgcctgatgtgaagaagaacagccacttcagtgacttcatggacaagcagacaggctacgtgaccaagaacctgctggccacccccatcgtggtgggcaaggaggtgctggccgtcatcatggctgtgaacaaggtgaatgccagcgagttcagcaagcaggatgaggaggtgttcagcaagtacctgaactttgtgtccatcatcctgcggctgcaccacaccagctacatgtacaacatcgagagccgccgcagccagatcctgatgtggagcgccaacaaggtgtttgaggagctgacagatgtggagcggcagttccacaaggccctgtacacagtgcgcagctacctgaactgtgagcgctacagcatcggcctgctggacatgaccaaggagaaggagttctatgatgagtggcccatcaagctgggggaggtggagccctacaagggccccaagaccccagatggccgggaggtgaacttctacaagatcatcgactacatcctgcacggcaaggaggagatcaaggtgatccccaccccacctgctgaccactggaccctcatcagcggcctgcccacctacgtggccgagaatggcttcatctgcaacatgatgaatgccccagcagatgagtacttcaccttccagaagggccctgtggatgagaccggctgggtgatcaagaatgtgctgagcctgcccatcgtgaacaagaaggaggacatcgtgggcgtggccaccttctacaacaggaaggatggcaagccctttgatgaacatgatgagtacatcacagagaccctgacccagttcctgggctggagcctgctgaacacagacacctatgacaagatgaacaagctggagaacaggaaggacatcgcccaggagatgctgatgaaccagaccaaggccaccccagaggagatcaagagcatcctgaagttccaggagaagctgaatgtggatgtgattgatgactgtgaggagaagcagctggtggccatcctgaaggaggacctgcctgaccccaggtctgctgagctgtatgagttccgcttcagtgacttccccctgacagaacatggcctcatcaagtgtggcatccgcctcttctttgagatcaacgtggtggagaagttcaaggtgcctgtggaggtgctgacccgctggatgtacacagtgaggaagggctacagagctgtgacctaccacaactggaggcatggcttcaacgtgggccagaccatgttcaccctgctgatgacaggccgcctgaagaagtactacacagacctggaggcctttgccatgctggccgccgccttctgccacgacatcgaccaccggggcaccaacaacctgtaccagatgaagagcaccagccccctggcccggctgcacggcagcagcatcctggagcggcaccacctggagtacagcaagaccctgctgcaggatgagagcctgaacatcttccagaacctgaacaagaggcagtttgagaccgtcatccacctgtttgaggtggccatcatcgccacagacctggccctgtacttcaagaagaggaccatgttccagaagatcgtggatgcctgtgagcagatgcagacagaggaggaggccatcaagtatgtgacagtggaccccaccaagaaggagatcatcatggccatgatgatgacagcctgtgacctgagcgccatcaccaagccctgggaggtgcagagccaggtggccctgatggtggccaatgagttctgggagcagggcgacctggagaggacagtgctgcagcagcagcccatccccatgatggacaggaacaagagagatgagctgcccaagctgcaggtgggcttcatcgactttgtgtgcacctttgtgtacaaggagttcagccgcttccacaaggagatcacccccatgctgagcggcctgcagaacaacagagtggagtggaagagcctggctgatgaatatgatgccaagatgaaggtgattgaggaggaggccaagaagcaggagggcggcgctgagaaggctgctgaggacagcggcggcggagatgacaagaagagcaagacctgcctgatgctgtag

SEQ ID NO: 163953 - DNA, 453 bp, synthetic construct
  misc_feature 1..453: note = Description of Artificial Sequence: Synthetic coding sequence
  source 1..453: mol_type = other DNA
atgtctgccaaggatgagcgggcccgggagatcctgcggggcttcaagctgaactggatgaacctgagagatgctgagaccgggaagatcctgtggcagggcacagaggacctgtctgtgcctggggtggagcacgaggcccgggtgcccaagaagatcctgaagtgcaaggctgtgtcccgggagctgaacttcagcagcacagagcagatggagaagttccggctggagcagaaggtgtacttcaagggccagtgcctggaggagtggttctttgaatttggcttcgtcatccccaacagcaccaacacctggcagagcctgattgaagctgcccctgagagccagatgatgcctgcctctgtgctgactggaaatgtcatcatcgagaccaagttctttgatgatgacctgctggtgtccaccagccgggtgcggctcttctacgtgtag

SEQ ID NO: 163954 - DNA, 414 bp, synthetic construct
  misc_feature 1..414: note = Description of Artificial Sequence: Synthetic coding sequence
  source 1..414: mol_type = other DNA
atgaagcagagggacaagggccggggctggcaccctgctgagggcggccctgccctgacagcccagcccccagagaccaggcctgccctggacaggagccggcgggagagccgcagccagggctgccggggcgtgtctgtgtccctgaccatgaacctggagccccccaaggccgagttccgcagcgccaccagggtggccggcggccctgtgacccccaggaaaggaccacccaagttcaagcagaggcagacccggcagttcaagagcaagccacccaagaagggcgtgcagggctttggagatgacatccctggcatggagggcctgggcacagacatcaccgtcatctgcccctgggaggccttcaaccacctggagctgcacgagctggcccagtatggcatcatctag

SEQ ID NO: 163955 - DNA, 264 bp, synthetic construct
  misc_feature 1..264: note = Description of Artificial Sequence: Synthetic coding sequence
  source 1..264: mol_type = other DNA
atgaacctggagccccccaaggccgagttccgcagcgccaccagggtggccggcggccctgtgacccccaggaaaggaccacccaagttcaagcagaggcagacccggcagttcaagagcaagccacccaagaagggcgtgcagggctttggagatgacatccctggcatggagggcctgggcacagacatcaccgtcatctgcccctgggaggccttcaaccacctggagctgcacgagctggcccagtatggcatcatctag

SEQ ID NO: 163956 - DNA, 252 bp, synthetic construct
  misc_feature 1..252: note = Description of Artificial Sequence: Synthetic coding sequence
  source 1..252: mol_type = other DNA
atgtctgacaacaccaccctgcctgccccagccagcaaccagggccccaccacccccaggaaaggaccacccaagttcaagcagaggcagacccggcagttcaagagcaagccacccaagaagggcgtgaagggctttggagatgacatccctggcatggagggcctgggcacagacatcaccgtcatctgcccctgggaggccttcagccacctggagctgcacgagctggcccagtttggcatcatctag

SEQ ID NO: 163957 - DNA, 1371 bp, synthetic construct
  misc_feature 1..1371: note = Description of Artificial Sequence: Synthetic coding sequence
  source 1..1371: mol_type = other DNA
atgggcatcaccctcatctggtgcctggccctggtgctgatcaagtggatcaccagcaagagaagaggagccatctcctatgacagcagtgaccagacagccctgtacatccgcatgctgggagatgtgcgggtgcgcagcagagctggctttgaaagtgaaagaagaggcagccacccctacatcgacttccgcatcttccacagccagagcgagattgaggtgtctgtgtctgccaggaacatccggcggctgctgtccttccagcgctacctgcggagcagccgcttcttccggggcacagctgtgagcaacagcctgaacatcctggatgatgactacaacggccaggccaagtgcatgctggagaaggtgggcaactggaactttgacatcttcctgtttgaccggctgaccaacggcaacagcctggtgtccctgaccttccacctgttcagcctgcacggcctcatcgagtacttccacctggacatgatgaagctgcggcgcttcctggtgatgatccaggaggactaccacagccagaacccctaccacaatgctgtgcatgctgctgatgtgacccaggccatgcactgctacctgaaggagcccaagctggccaacagcgtgaccccctgggacatcctgctgagcctgattgctgctgccacccatgacctggaccaccctggggtgaaccagcccttcctgatcaagaccaaccactacctggccaccctgtacaagaacacctctgtgctggagaaccaccactggaggtctgctgtgggcctgctgcgggagagcggcctcttcagccacctgcccctggagagccggcagcagatggagacccagatcggggccctgatcctggccacagacatcagccggcagaatgagtacctgagcctcttccgcagccacctggacagaggagacctgtgcctggaggacaccaggcaccgccacctggtgctgcagatggccctgaagtgtgccgacatctgcaacccctgcaggacctgggagctgagcaagcagtggagcgagaaggtgacagaggagttcttccaccagggcgacatcgagaagaagtaccacctgggcgtgagccccctgtgtgacagacacacagagagcatcgccaacatccagatcggcttcatgacctacctggtggagcccctcttcacagagtgggcccgcttcagcaacacccggctgagccagaccatgctgggccacgtgggcctgaacaaggcctcctggaagggcctgcagcgggagcagagcagcagcgaggacacagatgctgcctttgagctgaacagccagctgctgccccaggagaaccggctgtcctag

SEQ ID NO: 163958 - DNA, 1275 bp, synthetic construct
  misc_feature 1..1275: note = Description of Artificial Sequence: Synthetic coding sequence
  source 1..1275: mol_type = other DNA
atggaggtgtgctaccagctgcctgtgctgcccctggacaggcctgtgccccagcacgtgctgagcagaagaggagccatctccttcagcagcagcagcgccctgtttggctgccccaacccccggcagctgagccagaggagaggagccatctcctatgacagcagtgaccagacagccctgtacatccgcatgctgggagatgtgcgggtgcgcagcagagctggctttgaaagtgaaagaagaggcagccacccctacatcgacttccgcatcttccacagccagagcgagattgaggtgtctgtgtctgccaggaacatccggcggctgctgtccttccagcgctacctgcggagcagccgcttcttccggggcacagctgtgagcaacagcctgaacatcctggatgatgactacaacggccaggccaagtgcatgctggagaaggtgggcaactggaactttgacatcttcctgtttgaccggctgaccaacggcaacagcctggtgtccctgaccttccacctgttcagcctgcacggcctcatcgagtacttccacctggacatgatgaagctgcggcgcttcctggtgatgatccaggaggactaccacagccagaacccctaccacaatgctgtgcatgctgctgatgtgacccaggccatgcactgctacctgaaggagcccaagctggccaacagcgtgaccccctgggacatcctgctgagcctgattgctgctgccacccatgacctggaccaccctggggtgaaccagcccttcctgatcaagaccaaccactacctggccaccctgtacaagaacacctctgtgctggagaaccaccactggaggtctgctgtgggcctgctgcgggagagcggcctcttcagccacctgcccctggagagccggcagcagatggagacccagatcggggccctgatcctggccacagacatcagccggcagaatgagtacctgagcctcttccgcagccacctggacagaggagacctgtgcctggaggacaccaggcaccgccacctggtgctgcagatggccctgaagtgtgccgacatctgcaacccctgcaggacctgggagctgagcaagcagtggagcgagaaggtgacagaggagttcttccaccagggcgacatcgagaagaagtaccacctgggcgtgagccccctgtgtgacagacacacagagagcatcgccaacatccagatcggcaactacacctacctggacattgctggatag

SEQ ID NO: 163959 - DNA, 1449 bp, synthetic construct
  misc_feature 1..1449: note = Description of Artificial Sequence: Synthetic coding sequence
  source 1..1449: mol_type = other DNA
atggaggtgtgctaccagctgcctgtgctgcccctggacaggcctgtgccccagcacgtgctgagcagaagaggagccatctccttcagcagcagcagcgccctgtttggctgccccaacccccggcagctgagccagaggagaggagccatctcctatgacagcagtgaccagacagccctgtacatccgcatgctgggagatgtgcgggtgcgcagcagagctggctttgaaagtgaaagaagaggcagccacccctacatcgacttccgcatcttccacagccagagcgagattgaggtgtctgtgtctgccaggaacatccggcggctgctgtccttccagcgctacctgcggagcagccgcttcttccggggcacagctgtgagcaacagcctgaacatcctggatgatgactacaacggccaggccaagtgcatgctggagaaggtgggcaactggaactttgacatcttcctgtttgaccggctgaccaacggcaacagcctggtgtccctgaccttccacctgttcagcctgcacggcctcatcgagtacttccacctggacatgatgaagctgcggcgcttcctggtgatgatccaggaggactaccacagccagaacccctaccacaatgctgtgcatgctgctgatgtgacccaggccatgcactgctacctgaaggagcccaagctggccaacagcgtgaccccctgggacatcctgctgagcctgattgctgctgccacccatgacctggaccaccctggggtgaaccagcccttcctgatcaagaccaaccactacctggccaccctgtacaagaacacctctgtgctggagaaccaccactggaggtctgctgtgggcctgctgcgggagagcggcctcttcagccacctgcccctggagagccggcagcagatggagacccagatcggggccctgatcctggccacagacatcagccggcagaatgagtacctgagcctcttccgcagccacctggacagaggagacctgtgcctggaggacaccaggcaccgccacctggtgctgcagatggccctgaagtgtgccgacatctgcaacccctgcaggacctgggagctgagcaagcagtggagcgagaaggtgacagaggagttcttccaccagggcgacatcgagaagaagtaccacctgggcgtgagccccctgtgtgacagacacacagagagcatcgccaacatccagatcggcttcatgacctacctggtggagcccctcttcacagagtgggcccgcttcagcaacacccggctgagccagaccatgctgggccacgtgggcctgaacaaggcctcctggaagggcctgcagcgggagcagagcagcagcgaggacacagatgctgcctttgagctgaacagccagctgctgccccaggagaaccggctgtcctag

SEQ ID NO: 163960 - DNA, 2490 bp, synthetic construct
  misc_feature 1..2490: note = Description of Artificial Sequence: Synthetic coding sequence
  source 1..2490: mol_type = other DNA
atgggctgtgcccccagcatccacatcagcgagcggctggtggccgaggatgcccccagccctgctgccccacccctgagcagcggcggcccccggctgccccagggccagaagacagctgccctgcccaggaccaggggggccggcctgctggagagcgagctgagagatggcagcggcaagaaggtggccgtggctgatgtgcagtttggccccatgaggttccaccaggaccagctgcaggtgctgctggtgttcaccaaggaggacaaccagtgcaatggcttctgccgggcctgtgagaaggccggcttcaagtgcaccgtgaccaaggaggcccaggccgtgctggcctgcttcctggacaagcaccacgacatcatcatcatcgaccacaggaacccccggcagctggatgctgaggccctgtgccgcagcatccgcagcagcaagctgtctgagaacacagtcatcgtgggcgtggtgagaagagtggaccgggaggagctgtctgtgatgcccttcatctctgctggcttcacccggcgctacgtggagaaccccaacatcatggcctgctacaatgagctgctgcagctggagtttggagaggtgcgcagccagctgaagctgcgggcctgcaacagcgtcttcaccgccctggagaacagtgaagatgccatcgagatcaccagtgaagatcgcttcatccagtatgccaacccagcctttgagaccaccatgggctaccagagcggggagctgattggcaaggagctgggggaggtgcccatcaatgagaagaaggctgacctgctggacaccatcaacagctgcatccgcatcggcaaggagtggcagggcatctactatgccaagaagaagaatggagacaacatccagcagaatgtgaagatcatccctgtgattggccagggcggcaagatccgccactacgtgtccatcatccgggtgtgcaatggaaacaacaaggccgagaagatcagtgaatgtgtgcagagcgacacccacacagacaaccagacaggcaagcacaaggacaggaggaagggcagcctggatgtgaaggctgtggccagccgggccacagaggtgagcagccagaggaggcacagctccatggcccgcatccacagcatgaccatcgaggcccccatcaccaaggtgatcaacatcatcaatgctgcccaggagagcagccccatgcctgtgacagaggccctggacagagtgctggagatcctgcggaccacagagctgtacagcccccagtttggagccaaggatgatgacccccacgccaatgacctggtgggcggcctgatgtctgatggcctgcggcggctgtctggaaatgaatatgtgctgagcaccaagaacacccagatggtgagcagcaacatcatcacccccatcagcctggatgatgtgcccccacgcatcgcccgggccatggagaatgaggagtactgggactttgacatctttgagctggaggccgccacccacaaccggcccctcatctacctgggcctgaagatgtttgccaggtttggcatctgtgagttcctgcactgcagcgagagcaccctgcgctcctggctgcagatcatcgaggccaactaccacagcagcaacccctaccacaacagcacccacagcgcagatgtgctgcacgccacagcctacttcctgagcaaggagcgcatcaaggagaccctggaccccattgatgaggtggccgccctgattgctgccaccatccatgatgtggaccaccctggccgcaccaacagcttcctgtgcaatgccggcagcgagctggccatcctgtacaatgacacagctgtgctggagagccaccacgccgccctggccttccagctgaccactggagatgacaagtgcaacatcttcaagaacatggagagaaatgactaccgcaccctgcggcagggcatcatcgacatggtgctggccacagagatgaccaagcactttgagcacgtgaacaagtttgtgaacagcatcaacaagcccctggccaccctggaggagaatggagaaacagacaagaaccaggaggtgatcaacaccatgctgcggaccccagagaacagaaccctcatcaagaggatgctgatcaagtgtgctgatgtgagcaacccctgccggcccctgcagtactgcatcgagtgggccgcccgcatcagcgaggagtacttcagccagacagatgaggagaagcagcagggcctgcctgtggtgatgcctgtgtttgacaggaacacctgcagcatccccaagagccagatctccttcatcgactacttcatcacagacatgtttgatgcctgggatgcctttgtggacctgcctgacctgatgcagcacctggacaacaacttcaagtactggaagggcctggatgagatgaagctgaggaacctgcggcccccacctgagtag

SEQ ID NO: 163961 - DNA, 2352 bp, synthetic construct
  misc_feature 1..2352: note = Description of Artificial Sequence: Synthetic coding sequence
  source 1..2352: mol_type = other DNA
atgggctgtgcccccagcatccacatcagcgagcggctggtggccgaggatgcccccagccctgctgccccacccctgagcagcggcggcccccggctgccccagggccagaagacagctgccctgcccaggaccaggggggccggcctgctggagagcgagctgagagatggcagcggcaagaaggtggccgtggctgatgtgcagtttggccccatgaggttccaccaggaccagctgcaggtgctgctggtgttcaccaaggaggacaaccagtgcaatggcttctgccgggcctgtgagaaggccggcttcaagtgcaccgtgaccaaggaggcccaggccgtgctggcctgcttcctggacaagcaccacgacatcatcatcatcgaccacaggaacccccggcagctggatgctgaggccctgtgccgcagcatccgcagcagcaagctgtctgagaacacagtcatcgtgggcgtggtgagaagagtggaccgggaggagctgtctgtgatgcccttcatctctgctggcttcacccggcgctacgtggagaaccccaacatcatggcctgctacaatgagctgctgcagctggagtttggagaggtgcgcagccagctgaagctgcgggcctgcaacagcgtcttcaccgccctggagaacagtgaagatgccatcgagatcaccagtgaagatcgcttcatccaggagtggcagggcatctactatgccaagaagaagaatggagacaacatccagcagaatgtgaagatcatccctgtgattggccagggcggcaagatccgccactacgtgtccatcatccgggtgtgcaatggaaacaacaaggccgagaagatcagtgaatgtgtgcagagcgacacccacacagacaaccagacaggcaagcacaaggacaggaggaagggcagcctggatgtgaaggctgtggccagccgggccacagaggtgagcagccagaggaggcacagctccatggcccgcatccacagcatgaccatcgaggcccccatcaccaaggtgatcaacatcatcaatgctgcccaggagagcagccccatgcctgtgacagaggccctggacagagtgctggagatcctgcggaccacagagctgtacagcccccagtttggagccaaggatgatgacccccacgccaatgacctggtgggcggcctgatgtctgatggcctgcggcggctgtctggaaatgaatatgtgctgagcaccaagaacacccagatggtgagcagcaacatcatcacccccatcagcctggatgatgtgcccccacgcatcgcccgggccatggagaatgaggagtactgggactttgacatctttgagctggaggccgccacccacaaccggcccctcatctacctgggcctgaagatgtttgccaggtttggcatctgtgagttcctgcactgcagcgagagcaccctgcgctcctggctgcagatcatcgaggccaactaccacagcagcaacccctaccacaacagcacccacagcgcagatgtgctgcacgccacagcctacttcctgagcaaggagcgcatcaaggagaccctggaccccattgatgaggtggccgccctgattgctgccaccatccatgatgtggaccaccctggccgcaccaacagcttcctgtgcaatgccggcagcgagctggccatcctgtacaatgacacagctgtgctggagagccaccacgccgccctggccttccagctgaccactggagatgacaagtgcaacatcttcaagaacatggagagaaatgactaccgcaccctgcggcagggcatcatcgacatggtgctggccacagagatgaccaagcactttgagcacgtgaacaagtttgtgaacagcatcaacaagcccctggccaccctggaggagaatggagaaacagacaagaaccaggaggtgatcaacaccatgctgcggaccccagagaacagaaccctcatcaagaggatgctgatcaagtgtgctgatgtgagcaacccctgccggcccctgcagtactgcatcgagtgggccgcccgcatcagcgaggagtacttcagccagacagatgaggagaagcagcagggcctgcctgtggtgatgcctgtgtttgacaggaacacctgcagcatccccaagagccagatctccttcatcgactacttcatcacagacatgtttgatgcctgggatgcctttgtggacctgcctgacctgatgcagcacctggacaacaacttcaagtactggaagggcctggatgagatgaagctgaggaacctgcggcccccacctgagtag

SEQ ID NO: 163962 - DNA, 2490 bp, synthetic construct; identical to SEQ ID NO: 163960
  misc_feature 1..2490: note = Description of Artificial Sequence: Synthetic coding sequence
  source 1..2490: mol_type = other DNA

SEQ ID NO: 163963 - DNA, 2274 bp, synthetic construct
  misc_feature 1..2274: note = Description of Artificial Sequence: Synthetic coding sequence
  source 1..2274: mol_type = other DNA
atgaggttccaccaggaccagctgcaggtgctgctggtgttcaccaaggaggacaaccagtgcaatggcttctgccgggcctgtgagaaggccggcttcaagtgcaccgtgaccaaggaggcccaggccgtgctggcctgcttcctggacaagcaccacgacatcatcatcatcgaccacaggaacccccggcagctggatgctgaggccctgtgccgcagcatccgcagcagcaagctgtctgagaacacagtcatcgtgggcgtggtgagaagagtggaccgggaggagctgtctgtgatgcccttcatctctgctggcttcacccggcgctacgtggagaaccccaacatcatggcctgctacaatgagctgctgcagctggagtttggagaggtgcgcagccagctgaagctgcgggcctgcaacagcgtcttcaccgccctggagaacagtgaagatgccatcgagatcaccagtgaagatcgcttcatccagtatgccaacccagcctttgagaccaccatgggctaccagagcggggagctgattggcaaggagctgggggaggtgcccatcaatgagaagaaggctgacctgctggacaccatcaacagctgcatccgcatcggcaaggagtggcagggcatctactatgccaagaagaagaatggagacaacatccagcagaatgtgaagatcatccctgtgattggccagggcggcaagatccgccactacgtgtccatcatccgggtgtgcaatggaaacaacaaggccgagaagatcagtgaatgtgtgcagagcgacacccacacagacaaccagacaggcaagcacaaggacaggaggaagggcagcctggatgtgaaggctgtggccagccgggccacagaggtgagcagccagaggaggcacagctccatggcccgcatccacagcatgaccatcgaggcccccatcaccaaggtgatcaacatcatcaatgctgcccaggagagcagccccatgcctgtgacagaggccctggacagagtgctggagatcctgcggaccacagagctgtacagcccccagtttggagccaaggatgatgacccccacgccaatgacctggtgggcggcctgatgtctgatggcctgcggcggctgtctggaaatgaatatgtgctgagcaccaagaacacccagatggtgagcagcaacatcatcacccccatcagcctggatgatgtgcccccacgcatcgcccgggccatggagaatgaggagtactgggactttgacatctttgagctggaggccgccacccacaaccggcccctcatctacctgggcctgaagatgtttgccaggtttggcatctgtgagttcctgcactgcagcgagagcaccctgcgctcctggctgcagatcatcgaggccaactaccacagcagcaacccctaccacaacagcacccacagcgcagatgtgctgcacgccacagcctacttcctgagcaaggagcgcatcaaggagaccctggaccccattgatgaggtggccgccctgattgctgccaccatccatgatgtggaccaccctggccgcaccaacagcttcctgtgcaatgccggcagcgagctggccatcctgtacaatgacacagctgtgctggagagccaccacgccgccctggccttccagctgaccactggagatgacaagtgcaacatcttcaagaacatggagagaaatgactaccgcaccctgcggcagggcatcatcgacatggtgctggccacagagatgaccaagcactttgagcacgtgaacaagtttgtgaacagcatcaacaagcccctggccaccctggaggagaatggagaaacagacaagaaccaggaggtgatcaacaccatgctgcggaccccagagaacagaaccctcatcaagaggatgctgatcaagtgtgctgatgtgagcaacccctgccggcccctgcagtactgcatcgagtgggccgcccgcatcagcgaggagtacttcagccagacagatgaggagaagcagcagggcctgcctgtggtgatgcctgtgtttgacaggaacacctgcagcatccccaagagccagatctccttcatcgactacttcatcacagacatgtttgatgcctgggatgcctttgtggacctgcctgacctgatgcagcacctggacaacaacttcaagtactggaagggcctggatgagatgaagctgaggaacctgcggcccccacctgagtag

SEQ ID NO: 163964 - DNA, 2658 bp, synthetic construct
  misc_feature 1..2658: note = Description of Artificial Sequence: Synthetic coding sequence
  source 1..2658: mol_type = other DNA
atgggctgtgcccccagcatccacgtgtcccagagcggggtcatctactgccgggacagtgatgagagcagcagcccccggcagaccacctctgtgtcccagggccctgctgcccccctgcccggcctgtttgtgcagacagatgctgctgatgccatcccccccagccgggccagcggccccccatctgtggcccgggtgcggcgggccaggacagagctgggcagcggcagcagcgctggcagcgctgccccagctgccaccaccagccggggcagaagaagacactgctgcagcagcgctgaggccgagacccagacctgctacacctctgtgaagcaggtgtcctctgctgaggtgcgcatcggccccatgaggctgacccaggaccccatccaggtgctgctgatctttgccaaggaggacagccagagtgatggcttctggtgggcctgtgacagagctggctaccgctgcaacatcgcccggaccccagagagcgccctggagtgcttcctggacaagcaccacgagatcatcgtcatcgaccaccggcagacccagaactttgatgctgaggccgtgtgccgcagcatccgggccaccaaccccagcgagcacacagtcatcctggccgtggtgtcccgggtgtctgatgaccacgaggaggcctctgtgctgcccctgctgcacgccggcttcaacagacgcttcatggagaacagcagcatcatcgcctgctacaatgaactcatccagatcgagcacggggaggtgcgcagccagttcaagctgcgggcctgcaacagcgtcttcaccgccctggaccactgccacgaggccatcgagatcaccagtgatgaccacgtgatccagtatgtgaacccagcctttgagaggatgatgggctaccacaagggggagctgctgggcaaggagctggccgacctgcccaagagtgacaagaacagagctgacctgctggacaccatcaacacctgcatcaagaagggcaaggagtggcagggcgtgtactatgcccggaggaagagcggggacagcatccagcagcacgtgaagatcacccctgtgattggccagggcggcaagatccgccactttgtgtccctgaagaagctgtgctgcaccacagacaacaacaagcagatccacaagatccaccgggacagcggggacaacagccagacagagccccacagcttccgctacaagaacagaaggaaggagagcattgatgtgaagagcatcagcagccggggcagtgatgcccccagcctgcagaacagacgctaccccagcatggcccgcatccacagcatgaccatcgaggcccccatcaccaaggtgatcaacatcatcaatgctgcccaggagaacagccctgtgacagtggccgaggccctggacagagtgctggagatcctgcggaccacagagctgtacagcccccagctgggcaccaaggatgaggacccccacaccagtgacctggtgggcggcctgatgacagatggcctgcggcggctgtctggaaatgaatatgtgttcaccaagaatgtgcaccagagccacagccacctggccatgcccatcaccatcaatgatgtgcccccctgcatcagccagctgctggacaatgaggagagctgggacttcaacatctttgagctggaggccatcacccacaagaggcccctggtgtacctgggcctgaaggtgttcagccgcttcggcgtgtgtgagttcctgaactgcagcgagaccaccctgcgggcctggttccaggtgattgaggccaactaccacagcagcaatgcctaccacaacagcacccacgccgcagatgtgctgcacgccacagccttcttcctgggcaaggagcgggtgaagggcagcctggaccagctggatgaggtggccgccctgattgctgccaccgtgcatgatgtggaccaccctggccgcaccaacagcttcctgtgcaatgccggcagcgagctggccgtgctgtacaatgacacagctgtgctggagagccaccacacagccctggccttccagctgactgtgaaggacaccaagtgcaacatcttcaagaacatcgacaggaaccactaccgcaccctgcggcaggccatcatcgacatggtgctggccacagagatgaccaagcactttgaacatgtgaacaagtttgtgaacagcatcaacaagcccatggctgctgagattgagggcagtgactgtgagtgcaacccagctgggaagaacttccctgagaaccagatcctgatcaagaggatgatgatcaagtgtgctgatgtggccaacccctgccggcccctggacctgtgcatcgagtgggccggccgcatcagcgaggagtactttgcccagacagatgaggagaagaggcagggcctgcctgtggtgatgcctgtgtttgacaggaacacctgcagcatccccaagagccagatctccttcatcgactacttcatcacagacatgtttgatgcctgggatgcctttgcccacctgcctgccctgatgcagcacctggccgacaactacaagcactggaagaccctggatgacctgaagtgcaagagcctgcggctgcccagcgacagctag

SEQ ID NO: 163965 - DNA, 2493 bp, synthetic construct
  misc_feature 1..2493: note = Description of Artificial Sequence: Synthetic coding sequence
  source 1..2493: mol_type = other DNA
atgggctgtgcccccagcatccacgtgtcccagagcggggtcatctactgccgggacagtgatgagagcagcagcccccggcagaccacctctgtgtcccagggccctgctgcccccctgcccggcctgtttgtgcagacagatgctgctgatgccatcccccccagccgggccagcggccccccatctgtggcccgggtgcggcgggccaggacagagctgggcagcggcagcagcgctggcagcgctgccccagctgccaccaccagccggggcagaagaagacactgctgcagcagcgctgaggccgagacccagacctgctacacctctgtgaagcaggtgtcctctgctgaggtgcgcatcggccccatgaggctgacccaggaccccatccaggtgctgctgatctttgccaaggaggacagccagagtgatggcttctggtgggcctgtgacagagctggctaccgctgcaacatcgcccggaccccagagagcgccctggagtgcttcctggacaagcaccacgagatcatcgtcatcgaccaccggcagacccagaactttgatgctgaggccgtgtgccgcagcatccgggccaccaaccccagcgagcacacagtcatcctggccgtggtgtcccgggtgtctgatgaccacgaggaggcctctgtgctgcccctgctgcacgccggcttcaacagacgcttcatggagaacagcagcatcatcgcctgctacaatgaactcatccagatcgagcacggggaggtgcgcagccagttcaagctgcgggcctgcaacagcgtcttcaccgccctggaccactgccacgaggccatcgagatcaccagtgatgaccacgtgatccagtatgtgaacccagcctttgagaggatgatgggctaccacaagggggagctgctgggcaaggagctggccgacctgcccaagagtgacaagaacagagctgacctgctggacaccatcaacacctgcatcaagaagggcaaggagtggcagggcgtgtactatgcccggaggaagagcggggacagcatccagcagcacgtgaagatcacccctgtgattggccagggcggcaagatccgccactttgtgtccctgaagaagctgtgctgcaccacagacaacaacaagcagatccacaagatccaccgggacagcggggacaacagccagacagagccccacagcttccgctacaagaacagaaggaaggagagcattgatgtgaagagcatcagcagccggggcagtgatgcccccagcctgcagaacagacgctaccccagcatggcccgcatccacagcatgaccatcgaggcccccatcaccaaggatggcctgcggcggctgtctggaaatgaatatgtgttcaccaagaatgtgcaccagagccacagccacctggccatgcccatcaccatcaatgatgtgcccccctgcatcagccagctgctggacaatgaggagagctgggacttcaacatctttgagctggaggccatcacccacaagaggcccctggtgtacctgggcctgaaggtgttcagcagatttggagtgtgtgagttcctgaactgcagcgagaccaccctgcgggcctggttccaggtgattgaggccaactaccacagcagcaatgcctaccacaacagcacccatgctgctgatgtgctgcacgccacagccttcttcctgggcaaggagcgggtgaagggcagcctggaccagctggatgaggtggccgccctgattgctgccaccgtgcatgatgtggaccaccctggccgcaccaacagcttcctgtgcaatgccggcagcgagctggccgtgctgtacaatgacacagctgtgctggagagccaccacacagccctggccttccagctgactgtgaaggacaccaagtgcaacatcttcaagaacatcgacaggaaccactaccgcaccctgcggcaggccatcatcgacatggtgctggccacagagatgaccaagcactttgagcacgtgaacaagtttgtgaacagcatcaacaagcccatggctgctgagattgagggcagtgactgtgagtgcaacccagctgggaagaacttccctgagaaccagatcctgatcaagaggatgatgatcaagtgtgctgatgtggccaacccctgccggcccctggacctgtgcatcgagtgggccggccgcatcagcgaggagtactttgcccagacagatgaggagaagaggcagggcctgcctgtggtgatgcctgtgtttgacaggaacacctgcagcatccccaagagccagatctccttcatcgactacttcatcacagacatgtttgatgcctgggatgcctttgcccacctgcctgccctgatgcagcacctggccgacaactacaagcactggaagaccctggatgacctgaagtgcaagagcctgcggctgcccagcgacagctag

SEQ ID NO: 163966 - DNA, 2517 bp, synthetic construct
  misc_feature 1..2517: note = Description of Artificial Sequence: Synthetic coding sequence
  source 1..2517: mol_type = other DNA
atgggctgtgcccccagcatccacgtgtcccagagcggggtcatctactgccgggacagtgatgagagcagcagcccccggcagaccacctctgtgtcccagggccctgctgcccccctgcccggcctgtttgtgcagacagatgctgctgatgccatcccccccagccgggccagcggccccccatctgtggcccgggtgcggcgggccaggacagagctgggcagcggcagcagcgctggcagcgctgccccagctgccaccaccagccggggcagaagaagacactgctgcagcagcgctgaggccgagacccagacctgctacacctctgtgaagcaggtgtcctctgctgaggtgcgcatcggccccatgaggctgacccaggaccccatccaggtgctgctgatctttgccaaggaggacagccagagtgatggcttctggtgggcctgtgacagagctggctaccgctgcaacatcgcccggaccccagagagcgccctggagtgcttcctggacaagcaccacgagatcatcgtcatcgaccaccggcagacccagaactttgatgctgaggccgtgtgccgcagcatccgggccaccaaccccagcgagcacacagtcatcctggccgtggtgtcccgggtgtctgatgaccacgaggaggcctctgtgctgcccctgctgcacgccggcttcaacagacgcttcatggagaacagcagcatcatcgcctgctacaatgaactcatccagatcgagcacggggaggtgcgcagccagttcaagctgcgggcctgcaacagcgtcttcaccgccctggaccactgccacgaggccatcgagatcaccagtgatgaccacgtgatccaggagtggcagggcgtgtactatgcccggaggaagagcggggacagcatccagcagcacgtgaagatcacccctgtgattggccagggcggcaagatccgccactttgtgtccctgaagaagctgtgctgcaccacagacaacaacaagcagatccacaagatccaccgggacagcggggacaacagccagacagagccccacagcttccgctacaagaacagaaggaaggagagcattgatgtgaagagcatcagcagccggggcagtgatgcccccagcctgcagaacagacgctaccccagcatggcccgcatccacagcatgaccatcgaggcccccatcaccaaggtgatcaacatcatcaatgctgcccaggagaacagccctgtgacagtggccgaggccctggacagagtgctggagatcctgcggaccacagagctgtacagcccccagctgggcaccaaggatgaggacccccacaccagtgacctggtgggcggcctgatgacagatggcctgcggcggctgtctggaaatgaatatgtgttcaccaagaatgtgcaccagagccacagccacctggccatgcccatcaccatcaatgatgtgcccccctgcatcagccagctgctggacaatgaggagagctgggacttcaacatctttgagctggaggccatcacccacaagaggcccctggtgtacctgggcctgaaggtgttcagcagatttggagtgtgtgagttcctgaactgcagcgagaccaccctgcgggcctggttccaggtgattgaggccaactaccacagcagcaatgcctaccacaacagcacccatgctgctgatgtgctgcacgccacagccttcttcctgggcaaggagcgggtgaagggcagcctggaccagctggatgaggtggccgccctgattgctgccaccgtgcatgatgtggaccaccctggccgcaccaacagcttcctgtgcaatgccggcagcgagctggccgtgctgtacaatgacacagctgtgctggagagccaccacacagccctggccttccagctgactgtgaaggacaccaagtgcaacatcttcaagaacatcgacaggaaccactaccgcaccctgcggcaggccatcatcgacatggtgctggccacagagatgaccaagcactttgagcacgtgaacaagtttgtgaacagcatcaacaagcccatggctgctgagattgagggcagtgactgtgagtgcaacccagctgggaagaacttccctgagaaccagatcctgatcaagaggatgatgatcaagtgtgctgatgtggccaacccctgccggcccctggacctgtgcatcgagtgggccggccgcatcagcgaggagtactttgcccagacagatgaggagaagaggcagggcctgcctgtggtgatgcctgtgtttgacaggaacacctgcagcatccccaagagccagatctccttcatcgactacttcatcacagacatgtttgatgcctgggatgcctttgcccacctgcctgccctgatgcagcacctggccgacaactacaagcactggaagaccctggatgacctgaagtgcaagagcctgcggctgcccagcgacagctag

SEQ ID NO: 163967 - DNA, 2598 bp, synthetic construct
  misc_feature 1..2598: note = Description of Artificial Sequence: Synthetic coding sequence
  source 1..2598: mol_type = other DNA
atgggctgtgcccccagcatccacgtgtcccagagcggggtcatctactgccgggacagtgatgagagcagcagcccccggcagaccacctctgtgtcccagggccctgctgcccccctgcccggcctgtttgtgcagacagatgctgctgatgccatcccccccagccgggccagcggccccccatctgtggcccgggtgcggcgggccaggacagagctgggcagcggcagcagcgctggcagcgctgccccagctgccaccaccagccggggcagaagaagacactgctgcagcagcgctgaggccgagacccagacctgctacacctctgtgaaggtgctgctgatctttgccaaggaggacagccagagtgatggcttctggtgggcctgtgacagagctggctaccgctgcaacatcgcccggaccccagagagcgccctggagtgcttcctggacaagcaccacgagatcatcgtcatcgaccaccggcagacccagaactttgatgctgaggccgtgtgccgcagcatccgggccaccaaccccagcgagcacacagtcatcctggccgtggtgtcccgggtgtctgatgaccacgaggaggcctctgtgctgcccctgctgcacgccggcttcaacagacgcttcatggagaacagcagcatcatcgcctgctacaatgaactcatccagatcgagcacggggaggtgcgcagccagttcaagctgcgggcctgcaacagcgtcttcaccgccctggaccactgccacgaggccatcgagatcaccagtgatgaccacgtgatccagtatgtgaacccagcctttgagaggatgatgggctaccacaagggggagctgctgggcaaggagctggccgacctgcccaagagtgacaagaacagagctgacctgctggacaccatcaacacctgcatcaagaagggcaaggagtggcagggcgtgtactatgcccggaggaagagcggggacagcatccagcagcacgtgaagatcacccctgtgattggccagggcggcaagatccgccactttgtgtccctgaagaagctgtgctgcaccacagacaacaacaagcagatccacaagatccaccgggacagcggggacaacagccagacagagccccacagcttccgctacaagaacagaaggaaggagagcattgatgtgaagagcatcagcagccggggcagtgatgcccccagcctgcagaacagacgctaccccagcatggcccgcatccacagcatgaccatcgaggcccccatcaccaaggtgatcaacatcatcaatgctgcccaggagaacagccctgtgacagtggccgaggccctggacagagtgctggagatcctgcggaccacagagctgtacagcccccagctgggcaccaaggatgaggacccccacaccagtgacctggtgggcggcctgatgacagatggcctgcggcggctgtctggaaatgaatatgtgttcaccaagaatgtgcaccagagccacagccacctggccatgcccatcaccatcaatgatgtgcccccctgcatcagccagctgctggacaatgaggagagctgggacttcaacatctttgagctggaggccatcacccacaagaggcccctggtgtacctgggcctgaaggtgttcagccgcttcggcgtgtgtgagttcctgaactgcagcgagaccaccctgcgggcctggttccaggtgattgaggccaactaccacagcagcaatgcctaccacaacagcacccacgccgcagatgtgctgcacgccacagccttcttcctgggcaaggagcgggtgaagggcagcctggaccagctggatgaggtggccgccctgattgctgccaccgtgcatgatgtggaccaccctggccgcaccaacagcttcctgtgcaatgccggcagcgagctggccgtgctgtacaatgacacagctgtgctggagagccaccacacagccctggccttccagctgactgtgaaggacaccaagtgcaacatcttcaagaacatcgacaggaaccactaccgcaccctgcggcaggccatcatcgacatggtgctggccacagagatgaccaagcactttgaacatgtgaacaagtttgtgaacagcatcaacaagcccatggctgctgagattgagggcagtgactgtgagtgcaacccagctgggaagaacttccctgagaaccagatcctgatcaagaggatgatgatcaagtgtgctgatgtggccaacccctgccggcccctggacctgtgcatcgagtgggccggccgcatcagcgaggagtactttgcccagacagatgaggagaagaggcagggcctgcctgtggtgatgcctgtgtttgacaggaacacctgcagcatccccaagagccagatctccttcatcgactacttcatcacagacatgtttgatgcctgggatgcctttgcccacctgcctgccctgatgcagcacctggccgacaactacaagcactggaagaccctggatgacctgaagtgcaagagcctgcggctgcccagcgacagctag

SEQ ID NO: 163968 - DNA, 2367 bp, synthetic construct
  misc_feature 1..2367: note = Description of Artificial Sequence: Synthetic coding sequence
  source 1..2367: mol_type = other DNA
atgggctgtgcccccagcatccacgtgtcccagagcggggtcatctactgccgggacagtgatgagagcagcagcccccggcagaccacctctgtgtcccagggccctgctgcccccctgcccggcctgtttgtgcagacagatgctgctgatgccatcccccccagccgggccagcggccccccatctgtggcccgggtgcggcgggccaggacagagctgggcagcggcagcagcgctggcagcgctgccccagctgccaccaccagccggggcagaagaagacactgctgcagcagcgctgaggccgagacccagacctgctacacctctgtgaagcaggtgtcctctgctgaggtgcgcatcggccccatgaggctgacccaggaccccatccaggtgctgctgatctttgccaaggaggacagccagagtgatggcttctggtgggcctgtgacagagctggctaccgctgcaacatcgcccggaccccagagagcgccctggagtgcttcctggacaagcaccacgagatcatcgtcatcgaccaccggcagacccagaactttgatgctgaggccgtgtgccgcagcatccgggccaccaaccccagcgagcacacagtcatcctggccgtggtgtcccgggtgtctgatgaccacgaggaggcctctgtgctgcccctgctgcacgccggcttcaacagacgcttcatggagaacagcagcatcatcgcctgctacaatgaactcatccagatcgagcacggggaggtgcgcagccagttcaagctgcgggcctgcaacagcgtcttcaccgccctggaccactgccacgaggccatcgagatcaccagtgatgaccacgtgatccagatccacaagatccaccgggacagcggggacaacagccagacagagccccacagcttccgctacaagaacagaaggaaggagagcattgatgtgaagagcatcagcagccggggcagtgatgcccccagcctgcagaacagacgctaccccagcatggcccgcatccacagcatgaccatcgaggcccccatcaccaaggtgatcaacatcatcaatgctgcccaggagaacagccctgtgacagtggccgaggccctggacagagtgctggagatcctgcggaccacagagctgtacagcccccagctgggcaccaaggatgaggacccccacaccagtgacctggtgggcggcctgatgacagatggcctgcggcggctgtctggaaatgaatatgtgttcaccaagaatgtgcaccagagccacagccacctggccatgcccatcaccatcaatgatgtgcccccctgcatcagccagctgctggacaatgaggagagctgggacttcaacatctttgagctggaggccatcacccacaagaggcccctggtgtacctgggcctgaaggtgttcagcagatttggagtgtgtgagttcctgaactgcagcgagaccaccctgcgggcctggttccaggtgattgaggccaactaccacagcagcaatgcctaccacaacagcacccatgctgctgatgtgctgcacgccacagccttcttcctgggcaaggagcgggtgaagggcagcctggaccagctggatgaggtggccgccctgattgctgccaccgtgcatgatgtggaccaccctggccgcaccaacagcttcctgtgcaatgccggcagcgagctggccgtgctgtacaatgacacagctgtgctggagagccaccacacagccctggccttccagctgactgtgaaggacaccaagtgcaacatcttcaagaacatcgacaggaaccactaccgcaccctgcggcaggccatcatcgacatggtgctggccacagagatgaccaagcactttgagcacgtgaacaagtttgtgaacagcatcaacaagcccatggctgctgagattgagggcagtgactgtgagtgcaacccagctgggaagaacttccctgagaaccagatcctgatcaagaggatgatgatcaagtgtgctgatgtggccaacccctgccggcccctggacctgtgcatcgagtgggccggccgcatcagcgaggagtactttgcccagacagatgaggagaagaggcagggcctgcctgtggtgatgcctgtgtttgacaggaacacctgcagcatccccaagagccagatctccttcatcgactacttcatcacagacatgtttgatgcctgggatgcctttgcccacctgcctgccctgatgcagcacctggccgacaactacaagcactggaagaccctggatgacctgaagtgcaagagcctgcggctgcccagcgacagctag

SEQ ID NO: 163969 - DNA, 1053 bp, synthetic construct
  misc_feature 1..1053: note = Description of Artificial Sequence: Synthetic coding sequence
  source 1..1053: mol_type = other DNA
atgcccatcaccatcaatgatgtgcccccctgcatcagccagctgctggacaatgaggagagctgggacttcaacatctttgagctggaggccatcacccacaagaggcccctggtgtacctgggcctgaaggtgttcagcagatttggagtgtgtgagttcctgaactgcagcgagaccaccctgcgggcctggttccaggtgattgaggccaactaccacagcagcaatgcctaccacaacagcacccatgctgctgatgtgctgcacgccacagccttcttcctgggcaaggagcgggtgaagggcagcctggaccagctggatgaggtggccgccctgattgctgccaccgtgcatgatgtggaccaccctggccgcaccaacagcttcctgtgcaatgccggcagcgagctggccgtgctgtacaatgacacagctgtgctggagagccaccacacagccctggccttccagctgactgtgaaggacaccaagtgcaacatcttcaagaacatcgacaggaaccactaccgcaccctgcggcaggccatcatcgacatggtgctggccacagagatgaccaagcactttgagcacgtgaacaagtttgtgaacagcatcaacaagcccatggctgctgagattgagggcagtgactgtgagtgcaacccagctgggaagaacttccctgagaaccagatcctgatcaagaggatgatgatcaagtgtgctgatgtggccaacccctgccggcccctggacctgtgcatcgagtgggccggccgcatcagcgaggagtactttgcccagacagatgaggagaagaggcagggcctgcctgtggtgatgcctgtgtttgacaggaacacctgcagcatccccaagagccagatctccttcatcgactacttcatcacagacatgtttgatgcctgggatgcctttgcccacctgcctgccctgatgcagcacctggccgacaactacaagcactggaagaccctggatgacctgaagtgcaagagcctgcggctgcccagcgacagctag

SEQ ID NO: 163970 - DNA, 1782 bp, synthetic construct
  misc_feature 1..1782: note = Description of Artificial Sequence: Synthetic coding sequence
  source 1..1782: mol_type = other DNA
atgggcagcggcagcagcagctaccggcccaaggccatctacctggacattgatggccgcatccagaaggtgatcttcagcaagtactgcaacagcagtgacatcatggacctcttctgcatcgccaccggcctgcccaggaacaccaccatcagcctgctgaccacagatgatgccatggtgtccattgaccccaccatgcctgccaacagcgagaggaccccctacaaggtgcggcctgtggccatcaagcagctgtctgctggggtggaggacaagaggaccaccagccggggccagagcgctgagcggcccctgcgggacagaagagtggtgggcctggagcagccccggcgggagggcgcctttgaaagtggccaggtggagccccggccccgggagccccagggctgctaccaggagggccagaggatccccccagagcgggaggagctgatccagagcgtgctggcccaggtggccgagcagttcagccgggccttcaagatcaatgagctgaaggccgaggtggccaaccacctggccgtgctggagaagagggtggagctggagggcctgaaggtggtggagattgagaagtgcaagagtgacatcaagaagatgagggaggagctggccgcccggagcagcaggaccaactgcccctgcaagtacagcttcctggacaaccacaagaagctgaccccaagaagagatgtgcccacctaccccaagtacctgctgagccctgagaccatcgaggccctgaggaagcccacctttgatgtgtggctgtgggagcccaatgagatgctgagctgcctggagcacatgtaccatgacctgggcctggtgcgggacttcagcatcaaccctgtgaccctgcggcgctggctgttctgtgtgcatgacaactacagaaacaaccccttccacaacttccgccactgcttctgtgtggcccagatgatgtacagcatggtgtggctgtgcagcctgcaggagaagttcagccagacagacatcctgatcctgatgacagctgccatctgccacgacctggaccaccctggctacaacaacacctaccagatcaatgccaggacagagctggccgtgcgctacaatgacatcagccccctggagaaccaccactgtgctgtggccttccagatcctggccgagcctgagtgcaacatcttcagcaacatccccccagatggcttcaagcagatccggcagggcatgatcaccctcatcctggccacagacatggcccggcatgctgagatcatggacagcttcaaggagaagatggagaactttgactacagcaatgaggagcacatgaccctgctgaagatgatcctgatcaagtgctgtgacatcagcaatgaggtgcggcccatggaggtggccgagccctgggtggactgcctgctggaggagtacttcatgcagagcgaccgggagaagtctgagggcctgcctgtggcccccttcatggaccgggacaaggtgaccaaggccacagcccagatcggcttcatcaagtttgtgctgatccccatgtttgaaacagtgaccaagctgttccccatggtggaggagatcatgctgcagcccctgtgggagagccgggacagatatgaggagctgaagagaattgatgatgccatgaaggagctgcagaagaagacagacagcctgaccagcggggccacagagaagagccgggagaggagcagagatgtgaagaacagcgagggggactgtgcctag

SEQ ID NO: 163971 - DNA, 1704 bp, synthetic construct
  misc_feature 1..1704: note = Description of Artificial Sequence: Synthetic coding sequence
  source 1..1704: mol_type = other DNA
atgggcagcggcagcagcagctaccggcccaaggccatctacctggacattgatggccgcatccagaaggtgatcttcagcaagtactgcaacagcagtgacatcatggacctcttctgcatcgccaccggcctgcccaggaccccctacaaggtgcggcctgtggccatcaagcagctgtctgctggggtggaggacaagaggaccaccagccggggccagagcgctgagcggcccctgcgggacagaagagtggtgggcctggagcagccccggcgggagggcgcctttgaaagtggccaggtggagccccggccccgggagccccagggctgctaccaggagggccagaggatccccccagagcgggaggagctgatccagagcgtgctggcccaggtggccgagcagttcagccgggccttcaagatcaatgagctgaaggccgaggtggccaaccacctggccgtgctggagaagagggtggagctggagggcctgaaggtggtggagattgagaagtgcaagagtgacatcaagaagatgagggaggagctggccgcccggagcagcaggaccaactgcccctgcaagtacagcttcctggacaaccacaagaagctgaccccaagaagagatgtgcccacctaccccaagtacctgctgagccctgagaccatcgaggccctgaggaagcccacctttgatgtgtggctgtgggagcccaatgagatgctgagctgcctggagcacatgtaccatgacctgggcctggtgcgggacttcagcatcaaccctgtgaccctgcggcgctggctgttctgtgtgcatgacaactacagaaacaaccccttccacaacttccgccactgcttctgtgtggcccagatgatgtacagcatggtgtggctgtgcagcctgcaggagaagttcagccagacagacatcctgatcctgatgacagctgccatctgccacgacctggaccaccctggctacaacaacacctaccagatcaatgccaggacagagctggccgtgcgctacaatgacatcagccccctggagaaccaccactgtgctgtggccttccagatcctggccgagcctgagtgcaacatcttcagcaacatccccccagatggcttcaagcagatccggcagggcatgatcaccctcatcctggccacagacatggcccggcatgctgagatcatggacagcttcaaggagaagatggagaactttgactacagcaatgaggagcacatgaccctgctgaagatgatcctgatcaagtgctgtgacatcagcaatgaggtgcggcccatggaggtggccgagccctgggtggactgcctgctggaggagtacttcatgcagagcgaccgggagaagtctgagggcctgcctgtggcccccttcatggaccgggacaaggtgaccaaggccacagcccagatcggcttcatcaagtttgtgctgatccccatgtttgaaacagtgaccaagctgttccccatggtggaggagatcatgctgcagcccctgtgggagagccgggacagatatgaggagctgaagagaattgatgatgccatgaaggagctgcagaagaagacagacagcctgaccagcggggccacagagaagagccgggagaggagcagagatgtgaagaacagcgagggggactgtgcctag

SEQ ID NO: 163972 - DNA, 1476 bp, synthetic construct
  misc_feature 1..1476: note = Description of Artificial Sequence: Synthetic coding sequence
  source 1..1476: mol_type = other DNA
atgggcagcggcagcagcagctaccggcccaaggccatctacctggacattgatggccgcatccagaaggagcatgaccacctgcctgctgaccacagaagaagacatggcctgcaccggccccaccacgcccgggagttccgcacccacagcgtgcagagcgagacctgtggccaccaggccaccctgcgggccttcaagatcaatgagctgaaggccgaggtggccaaccacctggccgtgctggagaagagggtggagctggagggcctgaaggtggtggagattgagaagtgcaagagtgacatcaagaagatgagggaggagctggccgcccggagcagcaggaccaactgcccctgcaagtacagcttcctggacaaccacaagaagctgaccccaagaagagatgtgcccacctaccccaagtacctgctgagccctgagaccatcgaggccctgaggaagcccacctttgatgtgtggctgtgggagcccaatgagatgctgagctgcctggagcacatgtaccatgacctgggcctggtgcgggacttcagcatcaaccctgtgaccctgcggcgctggctgttctgtgtgcatgacaactacagaaacaaccccttccacaacttccgccactgcttctgtgtggcccagatgatgtacagcatggtgtggctgtgcagcctgcaggagaagttcagccagacagacatcctgatcctgatgacagctgccatctgccacgacctggaccaccctggctacaacaacacctaccagatcaatgccaggacagagctggccgtgcgctacaatgacatcagccccctggagaaccaccactgtgctgtggccttccagatcctggccgagcctgagtgcaacatcttcagcaacatccccccagatggcttcaagcagatccggcagggcatgatcaccctcatcctggccacagacatggcccggcatgctgagatcatggacagcttcaaggagaagatggagaactttgactacagcaatgaggagcacatgaccctgctgaagatgatcctgatcaagtgctgtgacatcagcaatgaggtgcggcccatggaggtggccgagccctgggtggactgcctgctggaggagtacttcatgcagagcgaccgggagaagtctgagggcctgcctgtggcccccttcatggaccgggacaaggtgaccaaggccacagcccagatcggcttcatcaagtttgtgctgatccccatgtttgaaacagtgaccaagctgttccccatggtggaggagatcatgctgcagcccctgtgggagagccgggacagatatgaggagctgaagagaattgatgatgccatgaaggagctgcagaagaagacagacagcctgaccagcggggccacagagaagagccgggagaggagcagagatgtgaagaacagcgagggggactgtgcctag

SEQ ID NO: 163973 - DNA, 1602 bp, synthetic construct
  misc_feature 1..1602: note = Description of Artificial Sequence: Synthetic coding sequence
  source 1..1602: mol_type = other DNA
atgggcagcggcagcagcagctaccggcccaaggccatctacctggacattgatggccgcatccagaaggtgatcttcagcaagtactgcaacagcagtgacatcatggacctcttctgcatcgccaccggcctgcccaggaacaccaccatcagcctgctgaccacagatgatgccatggtgtccattgaccccaccatgcctgccaacagcgagaggaccccctacaaggtgcggcctgtggccatcaagcagctgtctgagcgggaggagctgatccagagcgtgctggcccaggtggccgagcagttcagccgggccttcaagatcaatgagctgaaggccgaggtggccaaccacctggccgtgctggagaagagggtggagctggagggcctgaaggtggtggagattgagaagtgcaagagtgacatcaagaagatgagggaggagctggccgcccggagcagcaggaccaactgcccctgcaagtacagcttcctggacaaccacaagaagctgaccccaagaagagatgtgcccacctaccccaagtacctgctgagccctgagaccatcgaggccctgaggaagcccacctttgatgtgtggctgtgggagcccaatgagatgctgagctgcctggagcacatgtaccatgacctgggcctggtgcgggacttcagcatcaaccctgtgaccctgcggcgctggctgttctgtgtgcatgacaactacagaaacaaccccttccacaacttccgccactgcttctgtgtggcccagatgatgtacagcatggtgtggctgtgcagcctgcaggagaagttcagccagacagacatcctgatcctgatgacagctgccatctgccacgacctggaccaccctggctacaacaacacctaccagatcaatgccaggacagagctggccgtgcgctacaatgacatcagccccctggagaaccaccactgtgctgtggccttccagatcctggccgagcctgagtgcaacatcttcagcaacatccccccagatggcttcaagcagatccggcagggcatgatcaccctcatcctggccacagacatggcccggcatgctgagatcatggacagcttcaaggagaagatggagaactttgactacagcaatgaggagcacatgaccctgctgaagatgatcctgatcaagtgctgtgacatcagcaatgaggtgcggcccatggaggtggccgagccctgggtggactgcctgctggaggagtacttcatgcagagcgaccgggagaagtctgagggcctgcctgtggcccccttcatggaccgggacaaggtgaccaaggccacagcccagatcggcttcatcaagtttgtgctgatccccatgtttgaaacagtgaccaagctgttccccatggtggaggagatcatgctgcagcccctgtgggagagccgggacagatatgaggagctgaagagaattgatgatgccatgaaggagctgcagaagaagacagacagcctgaccagcggggccacagagaagagccgggagaggagcagagatgtgaagaacagcgagggggactgtgcctag

SEQ ID NO: 163974 - DNA, 1398 bp, synthetic construct
  misc_feature 1..1398: note = Description of Artificial Sequence: Synthetic coding sequence
  source 1..1398: mol_type = other DNA
atgggcagcggcagcagcagctaccggcccaaggccatctacctggacattgatggccgcatccagaagcacagcgtgcagagcgagacctgtggccaccaggccaccctgcgggccttcaagatcaatgagctgaaggccgaggtggccaaccacctggccgtgctggagaagagggtggagctggagggcctgaaggtggtggagattgagaagtgcaagagtgacatcaagaagatgagggaggagctggccgcccggagcagcaggaccaactgcccctgcaagtacagcttcctggacaaccacaagaagctgaccccaagaagagatgtgcccacctaccccaagtacctgctgagccctgagaccatcgaggccctgaggaagcccacctttgatgtgtggctgtgggagcccaatgagatgctgagctgcctggagcacatgtaccatgacctgggcctggtgcgggacttcagcatcaaccctgtgaccctgcggcgctggctgttctgtgtgcatgacaactacagaaacaaccccttccacaacttccgccactgcttctgtgtggcccagatgatgtacagcatggtgtggctgtgcagcctgcaggagaagttcagccagacagacatcctgatcctgatgacagctgccatctgccacgacctggaccaccctggctacaacaacacctaccagatcaatgccaggacagagctggccgtgcgctacaatgacatcagccccctggagaaccaccactgtgctgtggccttccagatcctggccgagcctgagtgcaacatcttcagcaacatccccccagatggcttcaagcagatccggcagggcatgatcaccctcatcctggccacagacatggcccggcatgctgagatcatggacagcttcaaggagaagatggagaactttgactacagcaatgaggagcacatgaccctgctgaagatgatcctgatcaagtgctgtgacatcagcaatgaggtgcggcccatggaggtggccgagccctgggtggactgcctgctggaggagtacttcatgcagagcgaccgggagaagtctgagggcctgcctgtggcccccttcatggaccgggacaaggtgaccaaggccacagcccagatcggcttcatcaagtttgtgctgatccccatgtttgaaacagtgaccaagctgttccccatggtggaggagatcatgctgcagcccctgtgggagagccgggacagatatgaggagctgaagagaattgatgatgccatgaaggagctgcagaagaagacagacagcctgaccagcggggccacagagaagagccgggagaggagcagagatgtgaagaacagcgagggggactgtgcctag

SEQ ID NO: 163975 - DNA, 1623 bp, synthetic construct
  misc_feature 1..1623: note = Description of Artificial Sequence: Synthetic coding sequence
  source 1..1623: mol_type = other DNA
atgggcagcggcagcagcagctaccggcccaaggccatctacctggacattgatggccgcatccagaaggtgatcttcagcaagtactgcaacagcagtgacatcatggacctcttctgcatcgccaccggcctgcccaggaacaccaccatcagcctgctgaccacagatgatgccatggtgtccattgaccccaccatgcctgccaacagcgagagaaatgagctgatcctgtacaccagcctgaggaacctgctcttcctgcccagcaaggagagctgggccagccaccagcacagcgtgcagagcgagacctgtggccaccaggccaccctgcgggccttcaagatcaatgagctgaaggccgaggtggccaaccacctggccgtgctggagaagagggtggagctggagggcctgaaggtggtggagattgagaagtgcaagagtgacatcaagaagatgagggaggagctggccgcccggagcagcaggaccaactgcccctgcaagtacagcttcctggacaaccacaagaagctgacccccaggagagatgtgcccacctaccccaagtacctgctgagccctgagaccatcgaggccctgaggaagcccacctttgatgtgtggctgtgggagcccaatgagatgctgagctgcctggagcacatgtaccatgacctgggcctggtgcgggacttcagcatcaaccctgtgaccctgcggcgctggctgttctgtgtgcatgacaactacagaaacaaccccttccacaacttccgccactgcttctgtgtggcccagatgatgtacagcatggtgtggctgtgcagcctgcaggagaagttcagccagacagacatcctgatcctgatgacagctgccatctgccacgacctggaccaccctggctacaacaacacctaccagatcaatgccaggacagagctggccgtgcgctacaatgacatcagccccctggagaaccaccactgtgctgtggccttccagatcctggccgagcctgagtgcaacatcttcagcaacatccccccagatggcttcaagcagatccggcagggcatgatcaccctcatcctggccacagacatggcccggcatgctgagatcatggacagcttcaaggagaagatggagaactttgactacagcaatgaggagcacatgaccctgctgaagatgatcctgatcaagtgctgtgacatcagcaatgaggtgcggcccatggaggtggccgagccctgggtggactgcctgctggaggagtacttcatgcagagcgaccgggagaagtctgagggcctgcctgtggcccccttcatggaccgggacaaggtgaccaaggccacagcccagatcggcttcatcaagtttgtgctgatccccatgtttgagaccgtgaccaagctgttccccatggtggaggagatcatgctgcagcccctgtgggagagccgggacagatatgaggagctgaagagaattgatgatgccatgaaggagctgcagaagaagacagacagcctgaccagcggggccacagagaagagccgggagaggagcagagatgtgaagaacagcgagggggactgtgcctag

SEQ ID NO: 163976 - DNA, 1401 bp, synthetic construct
  misc_feature 1..1401: note = Description of Artificial Sequence: Synthetic coding sequence
  source 1..1401: mol_type = other DNA
atggatgccttccgcagcaccccctacaaggtgcggcctgtggccatcaagcagctgtctgagcgggaggagctgatccagagcgtgctggcccaggtggccgagcagttcagccgggccttcaagatcaatgagctgaaggccgaggtggccaaccacctggccgtgctggagaagagggtggagctggagggcctgaaggtggtggagattgagaagtgcaagagtgacatcaagaagatgagggaggagctggccgcccggagcagcaggaccaactgcccctgcaagtacagcttcctggacaaccacaagaagctgacccccaggagagatgtgcccacctaccccaagtacctgctgagccctgagaccatcgaggccctgaggaagcccacctttgatgtgtggctgtgggagcccaatgagatgctgagctgcctggagcacatgtaccatgacctgggcctggtgcgggacttcagcatcaaccctgtgaccctgcggcgctggctgttctgtgtgcatgacaactacagaaacaaccccttccacaacttccgccactgcttctgtgtggcccagatgatgtacagcatggtgtggctgtgcagcctgcaggagaagttcagccagacagacatcctgatcctgatgacagctgccatctgccacgacctggaccaccctggctacaacaacacctaccagatcaatgccaggacagagctggccgtgcgctacaatgacatcagccccctggagaaccaccactgtgctgtggccttccagatcctggccgagcctgagtgcaacatcttcagcaacatccccccagatggcttcaagcagatccggcagggcatgatcaccctcatcctggccacagacatggcccggcatgctgagatcatggacagcttcaaggagaagatggagaactttgactacagcaatgaggagcacatgaccctgctgaagatgatcctgatcaagtgctgtgacatcagcaatgaggtgcggcccatggaggtggccgagccctgggtggactgcctgctggaggagtacttcatgcagagcgaccgggagaagtctgagggcctgcctgtggcccccttcatggaccgggacaaggtgaccaaggccacagcccagatcggcttcatcaagtttgtgctgatccccatgtttgagaccgtgaccaagctgttccccatggtggaggagatcatgctgcagcccctgtgggagagccgggacagatatgaggagctgaagagaattgatgatgccatgaaggagctgcagaagaagacagacagcctgaccagcggggccacagagaagagccgggagaggagcagagatgtgaagaacagcgagggggactgtgcctag

SEQ ID NO: 163977 - DNA, 1659 bp, synthetic construct
  misc_feature 1..1659: note = Description of Artificial Sequence: Synthetic coding sequence
  source 1..1659: mol_type = other DNA
atggatgccttcagaagaaacaccaccatcagcctgctgaccacagatgatgccatggtgtccattgaccccaccatgcctgccaacagcgagaggaccccctacaaggtgcggcctgtggccatcaagcagctgtctgctggggtggaggacaagaggaccaccagccggggccagagcgctgagcggcccctgcgggaccggcgggtggtgggcctggagcagccccggcgggagggcgcctttgagagcggccaggtggagccccggccccgggagccccagggctgctaccaggagggccagagaattcctcctgagcgggaggagctgatccagagcgtgctggcccaggtggccgagcagttcagccgggccttcaagatcaatgagctgaaggccgaggtggccaaccacctggccgtgctggagaagagggtggagctggagggcctgaaggtggtggagattgagaagtgcaagagtgacatcaagaagatgagggaggagctggccgcccggagcagcaggaccaactgcccctgcaagtacagcttcctggacaaccacaagaagctgacccccaggagagatgtgcccacctaccccaagtacctgctgagccctgagaccatcgaggccctgaggaagcccacctttgatgtgtggctgtgggagcccaatgagatgctgagctgcctggagcacatgtaccatgacctgggcctggtgcgggacttcagcatcaaccctgtgaccctgcggcgctggctgttctgtgtgcatgacaactacagaaacaaccccttccacaacttccgccactgcttctgtgtggcccagatgatgtacagcatggtgtggctgtgcagcctgcaggagaagttcagccagacagacatcctgatcctgatgacagctgccatctgccacgacctggaccaccctggctacaacaacacctaccagatcaatgccaggacagagctggccgtgcgctacaatgacatcagccccctggagaaccaccactgtgctgtggccttccagatcctggccgagcctgagtgcaacatcttcagcaacatccccccagatggcttcaagcagatccggcagggcatgatcaccctcatcctggccacagacatggcccggcatgctgagatcatggacagcttcaaggagaagatggagaactttgactacagcaatgaggagcacatgaccctgctgaagatgatcctgatcaagtgctgtgacatcagcaatgaggtgcggcccatggaggtggccgagccctgggtggactgcctgctggaggagtacttcatgcagagcgaccgggagaagtctgagggcctgcctgtggcccccttcatggaccgggacaaggtgaccaaggccacagcccagatcggcttcatcaagtttgtgctgatccccatgtttgagaccgtgaccaagctgttccccatggtggaggagatcatgctgcagcccctgtgggagagccgggacagatatgaggagctgaagagaattgatgatgccatgaaggagctgcagaagaagacagacagcctgaccagcggggccacagagaagagccgggagaggagcagagatgtgaagaacagcgagggggactgtgcctag

SEQ ID NO: 163978 - DNA, 1302 bp, synthetic construct
  misc_feature 1..1302: note = Description of Artificial Sequence: Synthetic coding sequence
  source 1..1302: mol_type = other DNA
atggatgccttcagaagagccttcaagatcaatgagctgaaggccgaggtggccaaccacctggccgtgctggagaagagggtggagctggagggcctgaaggtggtggagattgagaagtgcaagagtgacatcaagaagatgagggaggagctggccgcccggagcagcaggaccaactgcccctgcaagtacagcttcctggacaaccacaagaagctgaccccaagaagagatgtgcccacctaccccaagtacctgctgagccctgagaccatcgaggccctgaggaagcccacctttgatgtgtggctgtgggagcccaatgagatgctgagctgcctggagcacatgtaccatgacctgggcctggtgcgggacttcagcatcaaccctgtgaccctgcggcgctggctgttctgtgtgcatgacaactacagaaacaaccccttccacaacttccgccactgcttctgtgtggcccagatgatgtacagcatggtgtggctgtgcagcctgcaggagaagttcagccagacagacatcctgatcctgatgacagctgccatctgccacgacctggaccaccctggctacaacaacacctaccagatcaatgccaggacagagctggccgtgcgctacaatgacatcagccccctggagaaccaccactgtgctgtggccttccagatcctggccgagcctgagtgcaacatcttcagcaacatccccccagatggcttcaagcagatccggcagggcatgatcaccctcatcctggccacagacatggcccggcatgctgagatcatggacagcttcaaggagaagatggagaactttgactacagcaatgaggagcacatgaccctgctgaagatgatcctgatcaagtgctgtgacatcagcaatgaggtgcggcccatggaggtggccgagccctgggtggactgcctgctggaggagtacttcatgcagagcgaccgggagaagtctgagggcctgcctgtggcccccttcatggaccgggacaaggtgaccaaggccacagcccagatcggcttcatcaagtttgtgctgatccccatgtttgaaacagtgaccaagctgttccccatggtggaggagatcatgctgcagcccctgtgggagagccgggacagatatgaggagctgaagagaattgatgatgccatgaaggagctgcagaagaagacagacagcctgaccagcggggccacagagaagagccgggagaggagcagagatgtgaagaacagcgagggggactgtgcctag

SEQ ID NO: 163979 - DNA, 1380 bp, synthetic construct
  misc_feature 1..1380: note = Description of Artificial Sequence: Synthetic coding sequence
  source 1..1380: mol_type = other DNA
atggatgccttcagaagaaacaccaccatcagcctgctgaccacagatgatgccatggtgtccattgaccccaccatgcctgccaacagcgagcgggccttcaagatcaatgagctgaaggccgaggtggccaaccacctggccgtgctggagaagagggtggagctggagggcctgaaggtggtggagattgagaagtgcaagagtgacatcaagaagatgagggaggagctggccgcccggagcagcaggaccaactgcccctgcaagtacagcttcctggacaaccacaagaagctgaccccaagaagagatgtgcccacctaccccaagtacctgctgagccctgagaccatcgaggccctgaggaagcccacctttgatgtgtggctgtgggagcccaatgagatgctgagctgcctggagcacatgtaccatgacctgggcctggtgcgggacttcagcatcaaccctgtgaccctgcggcgctggctgttctgtgtgcatgacaactacagaaacaaccccttccacaacttccgccactgcttctgtgtggcccagatgatgtacagcatggtgtggctgtgcagcctgcaggagaagttcagccagacagacatcctgatcctgatgacagctgccatctgccacgacctggaccaccctggctacaacaacacctaccagatcaatgccaggacagagctggccgtgcgctacaatgacatcagccccctggagaaccaccactgtgctgtggccttccagatcctggccgagcctgagtgcaacatcttcagcaacatccccccagatggcttcaagcagatccggcagggcatgatcaccctcatcctggccacagacatggcccggcatgctgagatcatggacagcttcaaggagaagatggagaactttgactacagcaatgaggagcacatgaccctgctgaagatgatcctgatcaagtgctgtgacatcagcaatgaggtgcggcccatggaggtggccgagccctgggtggactgcctgctggaggagtacttcatgcagagcgaccgggagaagtctgagggcctgcctgtggcccccttcatggaccgggacaaggtgaccaaggccacagcccagatcggcttcatcaagtttgtgctgatccccatgtttgaaacagtgaccaagctgttccccatggtggaggagatcatgctgcagcccctgtgggagagccgggacagatatgaggagctgaagagaattgatgatgccatgaaggagctgcagaagaagacagacagcctgaccagcggggccacagagaagagccgggagaggagcagagatgtgaagaacagcgagggggactgtgcctag

SEQ ID NO: 163980 - DNA, 1581 bp, synthetic construct
  misc_feature 1..1581: note = Description of Artificial Sequence: Synthetic coding sequence
  source 1..1581: mol_type = other DNA
atggatgccttccgcagcaccccctacaaggtgcggcctgtggccatcaagcagctgtctgctggggtggaggacaagaggaccaccagccggggccagagcgctgagcggcccctgcgggaccggcgggtggtgggcctggagcagccccggcgggagggcgcctttgagagcggccaggtggagccccggccccgggagccccagggctgctaccaggagggccagagaattcctcctgagcgggaggagctgatccagagcgtgctggcccaggtggccgagcagttcagccgggccttcaagatcaatgagctgaaggccgaggtggccaaccacctggccgtgctggagaagagggtggagctggagggcctgaaggtggtggagattgagaagtgcaagagtgacatcaagaagatgagggaggagctggccgcccggagcagcaggaccaactgcccctgcaagtacagcttcctggacaaccacaagaagctgacccccaggagagatgtgcccacctaccccaagtacctgctgagccctgagaccatcgaggccctgaggaagcccacctttgatgtgtggctgtgggagcccaatgagatgctgagctgcctggagcacatgtaccatgacctgggcctggtgcgggacttcagcatcaaccctgtgaccctgcggcgctggctgttctgtgtgcatgacaactacagaaacaaccccttccacaacttccgccactgcttctgtgtggcccagatgatgtacagcatggtgtggctgtgcagcctgcaggagaagttcagccagacagacatcctgatcctgatgacagctgccatctgccacgacctggaccaccctggctacaacaacacctaccagatcaatgccaggacagagctggccgtgcgctacaatgacatcagccccctggagaaccaccactgtgctgtggccttccagatcctggccgagcctgagtgcaacatcttcagcaacatccccccagatggcttcaagcagatccggcagggcatgatcaccctcatcctggccacagacatggcccggcatgctgagatcatggacagcttcaaggagaagatggagaactttgactacagcaatgaggagcacatgaccctgctgaagatgatcctgatcaagtgctgtgacatcagcaatgaggtgcggcccatggaggtggccgagccctgggtggactgcctgctggaggagtacttcatgcagagcgaccgggagaagtctgagggcctgcctgtggcccccttcatggaccgggacaaggtgaccaaggccacagcccagatcggcttcatcaagtttgtgctgatccccatgtttgagaccgtgaccaagctgttccccatggtggaggagatcatgctgcagcccctgtgggagagccgggacagatatgaggagctgaagagaattgatgatgccatgaaggagctgcagaagaagacagacagcctgaccagcggggccacagagaagagccgggagaggagcagagatgtgaagaacagcgagggggactgtgcctag

SEQ ID NO: 163981 - DNA, 1479 bp, synthetic construct
  misc_feature 1..1479: note = Description of Artificial Sequence: Synthetic coding sequence
  source 1..1479: mol_type = other DNA
atggatgccttcagaagaaacaccaccatcagcctgctgaccacagatgatgccatggtgtccattgaccccaccatgcctgccaacagcgagaggaccccctacaaggtgcggcctgtggccatcaagcagctgtctgagcgggaggagctgatccagagcgtgctggcccaggtggccgagcagttcagccgggccttcaagatcaatgagctgaaggccgaggtggccaaccacctggccgtgctggagaagagggtggagctggagggcctgaaggtggtggagattgagaagtgcaagagtgacatcaagaagatgagggaggagctggccgcccggagcagcaggaccaactgcccctgcaagtacagcttcctggacaaccacaagaagctgacccccaggagagatgtgcccacctaccccaagtacctgctgagccctgagaccatcgaggccctgaggaagcccacctttgatgtgtggctgtgggagcccaatgagatgctgagctgcctggagcacatgtaccatgacctgggcctggtgcgggacttcagcatcaaccctgtgaccctgcggcgctggctgttctgtgtgcatgacaactacagaaacaaccccttccacaacttccgccactgcttctgtgtggcccagatgatgtacagcatggtgtggctgtgcagcctgcaggagaagttcagccagacagacatcctgatcctgatgacagctgccatctgccacgacctggaccaccctggctacaacaacacctaccagatcaatgccaggacagagctggccgtgcgctacaatgacatcagccccctggagaaccaccactgtgctgtggccttccagatcctggccgagcctgagtgcaacatcttcagcaacatccccccagatggcttcaagcagatccggcagggcatgatcaccctcatcctggccacagacatggcccggcatgctgagatcatggacagcttcaaggagaagatggagaactttgactacagcaatgaggagcacatgaccctgctgaagatgatcctgatcaagtgctgtgacatcagcaatgaggtgcggcccatggaggtggccgagccctgggtggactgcctgctggaggagtacttcatgcagagcgaccgggagaagtctgagggcctgcctgtggcccccttcatggaccgggacaaggtgaccaaggccacagcccagatcggcttcatcaagtttgtgctgatccccatgtttgagaccgtgaccaagctgttccccatggtggaggagatcatgctgcagcccctgtgggagagccgggacagatatgaggagctgaagagaattgatgatgccatgaaggagctgcagaagaagacagacagcctgaccagcggggccacagagaagagccgggagaggagcagagatgtgaagaacagcgagggggactgtgcctag

SEQ ID NO: 163982 - DNA, 1524 bp, synthetic construct
  misc_feature 1..1524: note = Description of Artificial Sequence: Synthetic coding sequence
  source 1..1524: mol_type = other DNA
atgggcagcggcagcagcagctaccggcccaaggccatctacctggacattgatggccgcatccagaaggtgatcttcagcaagtactgcaacagcagtgacatcatggacctcttctgcatcgccaccggcctgcccaggaccccctacaaggtgcggcctgtggccatcaagcagctgtctgagcgggaggagctgatccagagcgtgctggcccaggtggccgagcagttcagccgggccttcaagatcaatgagctgaaggccgaggtggccaaccacctggccgtgctggagaagagggtggagctggagggcctgaaggtggtggagattgagaagtgcaagagtgacatcaagaagatgagggaggagctggccgcccggagcagcaggaccaactgcccctgcaagtacagcttcctggacaaccacaagaagctgaccccaagaagagatgtgcccacctaccccaagtacctgctgagccctgagaccatcgaggccctgaggaagcccacctttgatgtgtggctgtgggagcccaatgagatgctgagctgcctggagcacatgtaccatgacctgggcctggtgcgggacttcagcatcaaccctgtgaccctgcggcgctggctgttctgtgtgcatgacaactacagaaacaaccccttccacaacttccgccactgcttctgtgtggcccagatgatgtacagcatggtgtggctgtgcagcctgcaggagaagttcagccagacagacatcctgatcctgatgacagctgccatctgccacgacctggaccaccctggctacaacaacacctaccagatcaatgccaggacagagctggccgtgcgctacaatgacatcagccccctggagaaccaccactgtgctgtggccttccagatcctggccgagcctgagtgcaacatcttcagcaacatccccccagatggcttcaagcagatccggcagggcatgatcaccctcatcctggccacagacatggcccggcatgctgagatcatggacagcttcaaggagaagatggagaactttgactacagcaatgaggagcacatgaccctgctgaagatgatcctgatcaagtgctgtgacatcagcaatgaggtgcggcccatggaggtggccgagccctgggtggactgcctgctggaggagtacttcatgcagagcgaccgggagaagtctgagggcctgcctgtggcccccttcatggaccgggacaaggtgaccaaggccacagcccagatcggcttcatcaagtttgtgctgatccccatgtttgaaacagtgaccaagctgttccccatggtggaggagatcatgctgcagcccctgtgggagagccgggacagatatgaggagctgaagagaattgatgatgccatgaaggagctgcagaagaagacagacagcctgaccagcggggccacagagaagagccgggagaggagcagagatgtgaagaacagcgagggggactgtgcctag

SEQ ID NO: 163983 - DNA, 1398 bp, synthetic construct
  misc_feature 1..1398: note = Description of Artificial Sequence: Synthetic coding sequence
  source 1..1398: mol_type = other DNA
atggacctcttctgcatcgccaccggcctgcccaggaacaccaccatcagcctgctgaccacagatgatgccatggtgtccattgaccccaccatgcctgccaacagcgagcgggccttcaagatcaatgagctgaaggccgaggtggccaaccacctggccgtgctggagaagagggtggagctggagggcctgaaggtggtggagattgagaagtgcaagagtgacatcaagaagatgagggaggagctggccgcccggagcagcaggaccaactgcccctgcaagtacagcttcctggacaaccacaagaagctgaccccaagaagagatgtgcccacctaccccaagtacctgctgagccctgagaccatcgaggccctgaggaagcccacctttgatgtgtggctgtgggagcccaatgagatgctgagctgcctggagcacatgtaccatgacctgggcctggtgcgggacttcagcatcaaccctgtgaccctgcggcgctggctgttctgtgtgcatgacaactacagaaacaaccccttccacaacttccgccactgcttctgtgtggcccagatgatgtacagcatggtgtggctgtgcagcctgcaggagaagttcagccagacagacatcctgatcctgatgacagctgccatctgccacgacctggaccaccctggctacaacaacacctaccagatcaatgccaggacagagctggccgtgcgctacaatgacatcagccccctggagaaccaccactgtgctgtggccttccagatcctggccgagcctgagtgcaacatcttcagcaacatccccccagatggcttcaagcagatccggcagggcatgatcaccctcatcctggccacagacatggcccggcatgctgagatcatggacagcttcaaggagaagatggagaactttgactacagcaatgaggagcacatgaccctgctgaagatgatcctgatcaagtgctgtgacatcagcaatgaggtgcggcccatggaggtggccgagccctgggtggactgcctgctggaggagtacttcatgcagagcgaccgggagaagtctgagggcctgcctgtggcccccttcatggaccgggacaaggtgaccaaggccacagcccagatcggcttcatcaagtttgtgctgatccccatgtttgaaacagtgaccaagctgttccccatggtggaggagatcatgctgcagcccctgtgggagagccgggacagatatgaggagctgaagagaattgatgatgccatgaaggagctgcagaagaagacagacagcctgaccagcggggccacagagaagagccgggagaggagcagagatgtgaagaacagcgagggggactgtgcctag

SEQ ID NO: 163984 - DNA, 1869 bp, synthetic construct
  misc_feature 1..1869: note = Description of Artificial Sequence: Synthetic coding sequence
  source 1..1869: mol_type = other DNA
atgccaccccagctgcagaatggcctgaacctgagcgccaaggtggtgcagggcagcctggacagcctgccccaggccgtgcgggagttcctggagaacaatgctgagctgtgccagcctgaccacatccacatctgtgatggcagcgaggaggagaatggccgcctgctgggccagatggaggaggagggcatcctgcggcggctgaagaagtatgacaactgctggctggccctgacagaccccagagatgtggcccgcatcgagagcaagacagtcatcgtgacccaggagcagagggacacagtgcccatccccaagacaggcctgagccagctgggccgctggatgtctgaggaggactttgagaaggccttcaatgcccgcttccctggctgcatgaagggccgcaccatgtatgtgatccccttctccatgggccccctgggcagccccctgagcaagattggcatcgagctgacagacagcccctacgtggtggcctccatgaggatcatgaccaggatgggcacccctgtgctggaggccgtgggagatggagaatttgtgaagtgcctgcacagcgtgggctgccccctgcccctgcagaagcccctggtgaacaactggccctgcaaccctgagctgaccctgattgcccacctgcctgacagaagagagatcatcagctttggaagtggctatggaggcaacagcctgctgggcaagaagtgctttgccctgaggatggccagccggctggccaaggaggagggctggctggccgagcacatgctgatcctgggcatcaccaaccctgagggggagaagaagtacctggccgccgccttccccagcgcctgtgggaagaccaacctggccatgatgaaccccagcctgcccggctggaaggtggagtgtgtgggagatgacatcgcctggatgaagtttgatgcccagggccacctgcgggccatcaacccagaaaatggcttctttggagtggcccctggcacctctgtgaagaccaaccccaatgccatcaagaccatccagaagaacaccatcttcaccaacgtggccgagaccagtgatggaggagtgtactgggagggcattgatgagcccctggccagcggcgtgaccatcacctcctggaagaacaaggagtggagcagtgaagatggagagccctgtgcccaccccaacagccgcttctgcaccccagccagccagtgccccatcattgatgctgcctgggagagccctgagggcgtgcccatcgagggcatcatctttggaggccggcggcctgctggggtgcccctggtgtatgaggccctgtcctggcagcacggcgtgtttgtgggcgccgccatgaggtctgaggccacagctgctgctgagcacaagggcaagatcatcatgcatgacccctttgccatgaggcccttcttcggctacaactttgggaagtacctggcccactggctgtccatggcccagcaccctgctgccaagctgcccaagatcttccacgtgaactggttcaggaaggacaaggagggcaagttcctgtggccaggctttggagagaacagccgggtgctggagtggatgttcaacagaattgatggcaaggccagcaccaagctgacccccatcggctacatccccaaggaggatgccctgaacctgaagggcctgggccacatcaacatgatggagctgttcagcatcagcaaggagttctgggagaaggaggtggaggacatcgagaagtacctggaggaccaggtgaatgctgacctgccctgtgaaattgaaagagagatcctggccctgaagcagaggatcagccagatgtag

SEQ ID NO: 163985 - DNA, 942 bp, synthetic construct
  misc_feature 1..942: note = Description of Artificial Sequence: Synthetic coding sequence
  source 1..942: mol_type = other DNA
atgaccactggaagaaccatgtatgtgatccccttctccatgggccccctgggcagccccctgagcaagattggcatcgagctgacagacagcccctacgtggtggcctccatgaggatcatgaccaggatgggcacccctgtgctggaggccgtgggagatggagaatttgtgaagtgcctgcacagcgtgggctgccccctgcccctgcagaagcccctggtgaacaactggccctgcaaccctgagctgaccctgattgcccacctgcctgacagaagagagatcatcagctttggaagtggctatggaggcaacagcctgctgggcaagaagtgctttgccctgaggatggccagccggctggccaaggaggagggctggctggccgagcacatgctgatcctgggcatcaccaaccctgagggggagaagaagtacctggccgccgccttccccagcgcctgtgggaagaccaacctggccatgatgaaccccagcctgcccggctggaaggtggagtgtgtgggagatgacatcgcctggatgaagtttgatgcccagggccacctgcgggccatcaacccagaaaatggcttctttggagtggcccctggcacctctgtgaagaccaaccccaatgccatcaagaccatccagaagaacaccatcttcaccaacgtggccgagaccagtgatggaggagtgtactgggagggcattgatgagcccctggccagcggcgtgaccatcacctcctggaagaacaaggagtggagcagtgaagatggagtgtccctgcctgaggccctggtgtgcagagctgctggaacagcctgcctgagccaggccctgaccagcctgagcctgagctaccggggcaccctgtgccccccccagctggaggtgctgcacccctgccagcctgtgccccaccactag

SEQ ID NO: 163986 - DNA, 915 bp, synthetic construct
  misc_feature 1..915: note = Description of Artificial Sequence: Synthetic coding sequence
  source 1..915: mol_type = other DNA
accaccggccacctgcgggccatcaacccagaaaatggcttctttggagtggcccctggcacctctgtgaagaccaaccccaatgccatcaagaccatccagaagaacaccatcttcaccaacgtggccgagaccagtgatggaggagtgtactgggagggcattgatgagcccctggccagcggcgtgaccatcacctcctggaagaacaaggagtggagcagtgaagatggagagccctgtgcccaccccaacagccgcttctgcaccccagccagccagtgccccatcattgatgctgcctgggagagccctgagggcgtgcccatcgagggcatcatctttggaggccggcggcctgctggggtgcccctggtgtatgaggccctgtcctggcagcacggcgtgtttgtgggcgccgccatgaggtctgaggccacagctgctgctgagcacaagggcaagatcatcatgcatgacccctttgccatgaggcccttcttcggctacaactttgggaagtacctggcccactggctgtccatggcccagcaccctgctgccaagctgcccaagatcttccacgtgaactggttcaggaaggacaaggagggcaagttcctgtggccaggctttggagagaacagccgggtgctggagtggatgttcaacagaattgatggcaaggccagcaccaagctgacccccatcggctacatccccaaggaggatgccctgaacctgaagggcctgggccacatcaacatgatggagctgttcagcatcagcaaggagttctgggagaaggaggtggaggacatcgagaagtacctggaggaccaggtgaatgctgacctgccctgtgaaattgaaagagagatcctggccctgaagcagaggatcagccagatgtag

SEQ ID NO: 163987 - DNA, 918 bp, synthetic construct
  misc_feature 1..918: note = Description of Artificial Sequence: Synthetic coding sequence
  source 1..918: mol_type = other DNA
atgaccaccggccacctgcgggccatcaacccagaaaatggcttcttcggcgtggcccctggcacctctgtgaagaccaaccccaatgccatcaagaccatccagaagaacaccatcttcaccaacgtggccgagaccagtgatggcggcgtgtactgggagggcattgatgagcccctggccagcggcgtgaccatcacctcctggaagaacaaggagtggagcagtgaagatggagagccctgtgcccaccccaacagccgcttctgcaccccagccagccagtgccccatcattgatgctgcctgggagagccctgagggcgtgcccatcgagggcatcatctttggaggaagaagacctgctggggtgcccctggtgtatgaggccctgtcctggcagcacggcgtgtttgtgggcgccgccatgaggtctgaggccacagctgctgctgagcacaagggcaagatcatcatgcatgacccctttgccatgaggcccttcttcggctacaactttgggaagtacctggcccactggctgtccatggcccagcaccctgctgccaagctgcccaagatcttccacgtgaactggttcaggaaggacaaggagggcaagttcctgtggccaggctttggagagaacagccgggtgctggagtggatgttcaacagaattgatggcaaggccagcaccaagctgacccccatcggctacatccccaaggaggatgccctgaacctgaagggcctgggccacatcaacatgatggagctgttcagcatcagcaaggagttctgggagaaggaggtggaggacatcgagaagtacctggaggaccaggtgaatgctgacctgccctgtgaaattgagcgggagatcctggccctgaagcagaggatcagccagatgtag

SEQ ID NO: 163988 - DNA, 1674 bp, synthetic construct; identical to SEQ ID NO: 148425
  misc_feature 1..1674: note = Description of Artificial Sequence: Synthetic coding sequence
  source 1..1674: mol_type = other DNA

SEQ ID NO: 163989 - DNA, 1326 bp, synthetic construct
  misc_feature 1..1326: note = Description of Artificial Sequence: Synthetic coding sequence
  source 1..1326: mol_type = other DNA
atggccgccctgtacagacctggcctgcggctgaactggcacggcctgagccccctgggctggcccagctgccgcagcatccagaccctgcgggtgctgagcggggacctgggccagctgcccaccggcatccgggactttgtggagcacagcgcccggctgtgccagcctgagggcatccacatctgtgatggaacagaagcagaaaatacagccaccctgaccctgctggagcagcagggcctcatcaggaagctgcccaagtacaacaactgctggctggccaggacagaccccaaggatgtggcccgggtggagagcaagacagtgattgtgacccccagccagagggacacagtgcagctgcccccaggaggagcccggggccagctgggcaactggatgagccctgctgacttccagagagctgtggatgagcgcttccctggctgcatgcagggccgcaccatgtatgtgctgcccttctccatgggccctgtgggcagccccctgagccgcatcggcgtgcagctgacagattctgcctacgtggtggcctccatgaggatcatgacccggctgggcacccctgtgctgcaggccctgggagatggagactttgtgaagtgcctgcacagcgtgggccagcccctgaccggccagggcgagcctgtgtcccagtggccctgcaaccctgagaagaccctgattggacatgtgcctgaccagcgggagatcatcagctttggaagtggctatggaggcaacagcctgctgggcaagaagtgctttgccctgcgcatcgccagccggctggccagagatgagggctggctggccgagcacatgctgatcctgggcatcaccagccctgctgggaagaagagatatgtggccgccgccttccccagcgcctgtgggaagaccaacctggccatgatgaggcctgccctgcccggctggaaggtggagtgtgtgggagatgacatcgcctggatgagatttgattctgagggccgcctgcgggccatcaacccagaaaatggcttctttggagtggcccctggcaccagcgccaccaccaaccccaatgccatggccaccatccagagcaacaccatcttcaccaacgtggccgagaccagtgatggaggagtgtactgggagggcatcgaccagcccctgcccccaggagtgacagtgacctcctggctgggcaagccctggaagccaggcatgtgtggcggggagggcgtggcccagcccccaggcctgagcaccctgatggtggagaagctgagcccccagccccccaccatcttctag

SEQ ID NO: 163990 - DNA, 1521 bp, synthetic construct
  misc_feature 1..1521: note = Description of Artificial Sequence: Synthetic coding sequence
  source 1..1521: mol_type = other DNA
atgagccctgctgacttccagagagctgtggatgagcgcttccctggctgcatgcagggccgcaccatgtatgtgctgcccttctccatgggccctgtgggcagccccctgagccgcatcggcgtgcagctgacagattctgcctacgtggtggcctccatgaggatcatgacccggctgggcacccctgtgctgcaggccctgggagatggagactttgtgaagtgcctgcacagcgtgggccagcccctgaccggccagggcgagcctgtgtcccagtggccctgcaaccctgagaagaccctgattggacatgtgcctgaccagcgggagatcatcagctttggaagtggctatggaggcaacagcctgctgggcaagaagtgctttgccctgcgcatcgccagccggctggccagagatgagggctggctggccgagcacatgctgatcctgggcatcaccagccctgctgggaagaagagatatgtggccgccgccttccccagcgcctgtgggaagaccaacctggccatgatgaggcctgccctgcccggctggaaggtggagtgtgtgggagatgacatcgcctggatgagatttgattctgagggccgcctgcgggccatcaacccagaaaatggcttctttggagtggcccctggcaccagcgccaccaccaaccccaatgccatggccaccatccagagcaacaccatcttcaccaacgtggccgagaccagtgatggaggagtgtactgggagggcatcgaccagcccctgcccccaggagtgacagtgacctcctggctgggcaagccctggaagccaggggacaaggagccctgtgcccaccccaacagccgcttctgtgccccagcccggcagtgccccatcatggaccctgcctgggaggcccctgagggcgtgcccattgatgccatcatctttggaggccggcggcccaagggcgtgcccctggtgtatgaggccttcaactggaggcatggagtgtttgtgggcagcgccatgaggtctgagagcacagctgctgctgagcacaagggcaagatcatcatgcatgacccctttgccatgaggcccttcttcggctacaactttggccactacctggagcactggctgtccatggagggcaggaagggggcccagctgccccgcatcttccacgtgaactggttcagaagagatgaggccggccacttcctgtggccaggctttggagaaaatgcccgggtgctggactggatctgccggcggctggagggagaagattctgcccgggagacccccatcggcctggtgcccaaggagggcgccctggacctgagcggcctgcgggccatcgacaccacccagctgttcagcctgcccaaggacttctgggagcaggaggtgcgggacatccgcagctacctgacagagcaggtgaaccaggacctgcccaaggaggtgctggccgagctggaggccctggagaggagagtgcacaagatgtag

SEQ ID NO: 163991 - DNA, 1521 bp, synthetic construct; identical to SEQ ID NO: 163990
  misc_feature 1..1521: note = Description of Artificial Sequence: Synthetic coding sequence
  source 1..1521: mol_type = other DNA

SEQ ID NO: 163992 - DNA, 2343 bp, synthetic construct
  misc_feature 1..2343: note = Description of Artificial Sequence: Synthetic coding sequence
  source 1..2343: mol_type = other DNA
atggctgctgtggacctggagaagctgcgggccagcggggccggcaaggccatcggcgtgctgaccagcggaggagatgcccagggcatgaatgctgctgtgcgggctgtgaccaggatgggcatctacgtgggcgccaaggtgttcctgatctatgagggctatgagggcctggtggagggcggggagaacatcaagcaggccaactggctgtctgtgagcaacatcatccagctgggcggcaccatcatcggcagcgcccgctgcaaggccttcaccacccgggagggccggcgggctgctgcctacaacctggtgcagcacggcatcaccaacctgtgtgtgattggaggagatggcagcctgactggagccaacatcttccgctctgagtggggcagcctgctggaggagctggtggccgagggcaagatcagcgagaccacagcccggacctacagccacctgaacattgctggcctggtgggcagcattgacaatgacttctgtggcacagacatgaccatcggcacagacagcgccctgcaccgcatcatggaggtgattgatgccatcaccaccacagcccagagccaccagaggacctttgtgctggaggtgatgggccgccactgcggctacctggccctggtgtctgccctggccagcggggctgactggctgttcatccctgaggcccccccagaagatggctgggagaacttcatgtgtgagcggctgggggagaccaggagccggggcagccggctgaacatcatcatcatcgccgagggcgccatcgacagaaatggcaagcccatcagcagcagctatgtgaaggacctggtggtgcagaggctgggctttgacaccagggtgacagtgctgggccacgtgcagaggggcggcacccccagcgcctttgaccgcatcctgagcagcaagatgggcatggaggccgtgatggccctgctggaggccaccccagacaccccagcctgtgtggtgaccctgagcggcaaccagagcgtgcggctgcccctgatggagtgtgtgcagatgaccaaggaggtgcagaaggccatggatgacaagagatttgatgaggccacccagctgcggggcggcagctttgagaacaactggaacatctacaagctgctggcccaccagaagccacccaaggagaagagcaacttcagcctggccatcctgaatgtgggcgccccagctgctggcatgaatgctgctgtgcgctctgctgtgaggacaggcatcagccacggccacacagtgtatgtggtgcatgatggctttgagggcctggccaagggccaggtgcaggaggtgggctggcatgatgtggccggctggctgggccggggcggctccatgctgggcaccaagaggaccctgcccaagggccagctggagagcatcgtggagaacatccgcatctacggcatccacgccctgctggtggtgggcggctttgaggcctatgaaggagtgctgcagctggtggaggcccggggccgctatgaggagctgtgcatcgtgatgtgtgtgatcccagccaccatcagcaacaacgtgcctggaacagacttcagcctgggcagtgacacagctgtgaatgctgccatggagagctgtgaccgcatcaagcagagcgccagcggcaccaagagaagagtcttcatcgtggagaccatgggcggctactgcggctacctggccaccgtgactggaattgctgtgggcgcagatgctgcctacgtgtttgaggaccccttcaacatccatgacctgaaggtgaatgtggagcacatgacagagaagatgaagacagacatccagaggggcctggtgctgagaaatgaaaaatgtcatgactactacaccacagagttcctgtacaacctgtacagcagcgagggcaagggcgtgtttgactgcaggaccaacgtgctgggccacctgcagcagggcggggcccccaccccatttgacaggaactacggcaccaagctgggcgtgaaggccatgctgtggctgtctgagaagctgcgggaggtgtacaggaagggccgggtgtttgccaatgccccagacagcgcctgcgtcatcggcctgaagaagaaggctgtggccttcagccctgtgacagagctgaagaaggacacagactttgagcacaggatgccccgggagcagtggtggctgagcctgcggctgatgctgaagatgctggcccagtaccgcatctccatggccgcctacgtgtctggagagctggagcacgtgaccaggaggaccctgtccatggacaagggcttctag

SEQ ID NO: 163993 - DNA, 762 bp, synthetic construct
  misc_feature 1..762: note = Description of Artificial Sequence: Synthetic coding sequence
  source 1..762: mol_type = other DNA
atgaggtccatgtgcaaccagggccggggccgggagagcagccggggcggcctgcacgtgcagggcagctgccggggcctgagccgcagcccccagcaggagactggatttgccaaggccccagctggaacagactgcttcttccactgcagccctggcagccggggccagggcgacaggaaggaggaggtgaccagcgagcccggcggcaccagcatcatgagccggctgggcggcatgaatgctgctgtgcgggctgtgaccaggatgggcatctacgtgggcgccaaggtgttcctgatctatgagggctatgagggcctggtggagggcggggagaacatcaagcaggccaactggctgtctgtgagcaacatcatccagctgggcggcaccatcatcggcagcgcccgctgcaaggccttcaccacccgggagggccggcgggctgctgcctacaacctggtgcagcacggcatcaccaacctgtgtgtgattggaggagatggcagcctgactggagccaacatcttccgctctgagtggggcagcctgctggaggagctggtggccgagggcaagatcagcgagaccacagcccggacctacagccacctgaacattgctggcctggtgggcagcattgacaatgacttctgtggcacagacatgaccatcggcacagacagcgccctgcaccgcatcatggaggtgattgatgccatcaccacccggggccgcctgggggagctgcacgtgtag

SEQ ID NO: 163994 - DNA, 2484 bp, synthetic construct
  misc_feature 1..2484: note = Description of Artificial Sequence: Synthetic coding sequence
  source 1..2484: mol_type = other DNA
atgtgcaaccagggccggggccgggagagcagcagaggaggcctgcacgtgcagggcagctgccggggcctgagccgcagcccccagcaggagaccggctttgccaaggccccagctggaacagactgcttcttccactgcagccctggcagccggggccagggcgacaggaaggaggaggtgaccagcgagcccggcggcaccagcatcatgagccggctgggcggcatgaatgctgctgtgcgggctgtgaccaggatgggcatctacgtgggcgccaaggtgttcctgatctatgagggctatgagggcctggtggagggcggggagaacatcaagcaggccaactggctgtctgtgagcaacatcatccagctgggcggcaccatcatcggcagcgcccgctgcaaggccttcaccacccgggagggcagaagagctgctgcctacaacctggtgcagcacggcatcaccaacctgtgtgtgattggaggagatggcagcctgaccggggccaacatcttccgctctgagtggggcagcctgctggaggagctggtggccgagggcaagatcagcgagaccacagcccggacctacagccacctgaacattgctggcctggtgggcagcattgacaatgacttctgtggcacagacatgaccatcggcacagattctgccctgcaccgcatcatggaggtgattgatgccatcaccaccacagcccagagccaccagaggacctttgtgctggaggtgatgggccgccactgcggctacctggccctggtgtctgccctggccagcggggctgactggctgttcatccctgaggcccccccagaagatggctgggagaacttcatgtgtgagcggctgggggagaccaggagccggggcagccggctgaacatcatcatcatcgccgagggcgccatcgacagaaatggcaagcccatcagcagcagctatgtgaaggacctggtggtgcagaggctgggctttgacaccagggtgacagtgctgggccacgtgcagagaggaggcaccccatctgcctttgaccgcatcctgagcagcaagatgggcatggaggccgtgatggccctgctggaggccaccccagacaccccagcctgtgtggtgaccctgagcggcaaccagagcgtgcggctgcccctgatggagtgtgtgcagatgaccaaggaggtgcagaaggccatggatgacaagagatttgatgaggccacccagctgcggggcggcagctttgagaacaactggaacatctacaagctgctggcccaccagaagccacccaaggagaagagcaacttcagcctggccatcctgaatgtgggcgccccagctgctggcatgaatgctgctgtgcgctctgctgtgaggacaggcatcagccacggccacacagtgtatgtggtgcatgatggctttgagggcctggccaagggccaggtgcaggaggtgggctggcatgatgtggccggctggctgggccggggcggctccatgctgggcaccaagaggaccctgcccaagggccagctggagagcatcgtggagaacatccgcatctacggcatccacgccctgctggtggtgggcggctttgaggcctatgagggcgtgctgcagctggtggaggcccggggccgctatgaggagctgtgcatcgtgatgtgtgtgatcccagccaccatcagcaacaacgtgcccggcacagacttcagcctgggcagtgacacagctgtgaatgctgccatggagagctgtgaccgcatcaagcagagcgccagcggcaccaagagaagagtcttcatcgtggagaccatgggcggctactgcggctacctggccaccgtgactggaattgctgtgggcgcagatgctgcctacgtgtttgaggaccccttcaacatccatgacctgaaggtgaatgtggagcacatgacagagaagatgaagacagacatccagaggggcctggtgctgagaaatgagaagtgccacgactactacaccacagagttcctgtacaacctgtacagcagcgagggcaaaggagtgtttgactgcaggaccaacgtgctgggccacctgcagcagggcggggcccccaccccatttgacagaaattatggcaccaagctgggcgtgaaggccatgctgtggctgtctgagaagctgcgggaggtgtacaggaagggccgggtgtttgccaatgccccagattctgcctgtgtgattggcctgaagaagaaggctgtggccttcagccctgtgacagagctgaagaaggacacagactttgagcacaggatgccccgggagcagtggtggctgagcctgcggctgatgctgaagatgctggcccagtaccgcatctccatggccgcctacgtgtctggagagctggagcacgtgaccaggaggaccctgtccatggacaagggcttctag

SEQ ID NO: 163995 - DNA, 1722 bp, synthetic construct
  misc_feature 1..1722: note = Description of Artificial Sequence: Synthetic coding sequence
  source 1..1722: mol_type = other DNA
atgggccgccactgcggctacctggccctggtgtctgccctggccagcggggctgactggctgttcatccctgaggcccccccagaagatggctgggagaacttcatgtgtgagcggctgggggagaccaggagccggggcagccggctgaacatcatcatcatcgccgagggcgccatcgacagaaatggcaagcccatcagcagcagctatgtgaaggacctggtggtgcagaggctgggctttgacaccagggtgacagtgctgggccacgtgcagagaggaggcaccccatctgcctttgaccgcatcctgagcagcaagatgggcatggaggccgtgatggccctgctggaggccaccccagacaccccagcctgtgtggtgaccctgagcggcaaccagagcgtgcggctgcccctgatggagtgtgtgcagatgaccaaggaggtgcagaaggccatggatgacaagagatttgatgaggccacccagctgcggggcggcagctttgagaacaactggaacatctacaagctgctggcccaccagaagccacccaaggagaagagcaacttcagcctggccatcctgaatgtgggcgccccagctgctggcatgaatgctgctgtgcgctctgctgtgaggacaggcatcagccacggccacacagtgtatgtggtgcatgatggctttgagggcctggccaagggccaggtgcaggaggtgggctggcatgatgtggccggctggctgggccggggcggctccatgctgggcaccaagaggaccctgcccaagggccagctggagagcatcgtggagaacatccgcatctacggcatccacgccctgctggtggtgggcggctttgaggcctatgagggcgtgctgcagctggtggaggcccggggccgctatgaggagctgtgcatcgtgatgtgtgtgatcccagccaccatcagcaacaacgtgcccggcacagacttcagcctgggcagtgacacagctgtgaatgctgccatggagagctgtgaccgcatcaagcagagcgccagcggcaccaagagaagagtcttcatcgtggagaccatgggcggctactgcggctacctggccaccgtgactggaattgctgtgggcgcagatgctgcctacgtgtttgaggaccccttcaacatccatgacctgaaggtgaatgtggagcacatgacagagaagatgaagacagacatccagaggggcctggtgctgagaaatgagaagtgccacgactactacaccacagagttcctgtacaacctgtacagcagcgagggcaaaggagtgtttgactgcaggaccaacgtgctgggccacctgcagcagggcggggcccccaccccatttgacagaaattatggcaccaagctgggcgtgaaggccatgctgtggctgtctgagaagctgcgggaggtgtacaggaagggccgggtgtttgccaatgccccagattctgcctgtgtgattggcctgaagaagaaggctgtggccttcagccctgtgacagagctgaagaaggacacagactttgagcacaggatgccccgggagcagtggtggctgagcctgcggctgatgctgaagatgctggcccagtaccgcatctccatggccgcctacgtgtctggagagctggagcacgtgaccaggaggaccctgtccatggacaagggcttctag

SEQ ID NO: 163996 - DNA, 2343 bp, synthetic construct
  misc_feature 1..2343: note = Description of Artificial Sequence: Synthetic coding sequence
  source 1..2343: mol_type = other DNA
atgacccatgaggagcaccacgccgccaagaccctgggcatcggcaaggccatcgctgtgctgaccagcggaggagatgcccagggcatgaatgctgctgtgcgggctgtggtgcgggtgggcatcttcaccggggcccgggtcttctttgtgcatgagggctaccagggcctggtggatggaggagaccacatcaaggaggccacctgggagagcgtgtccatgatgctgcagctgggcggcaccgtcatcggcagcgcccgctgcaaggacttccgggagcgggagggccgcctgcgggccgcctacaacctggtgaagaggggcatcaccaacctgtgtgtgattggaggagatggcagcctgactggagctgacaccttccgctctgagtggagcgacctgctgagtgacctgcagaaggccggcaagatcacagatgaggaggccaccaagagcagctacctgaacatcgtgggcctggtgggcagcattgacaatgacttctgtggcacagacatgaccatcggcacagacagcgccctgcaccgcatcatggagatcgtggatgccatcaccaccacagcccagagccaccagaggacctttgtgctggaggtgatgggccgccactgcggctacctggccctggtgaccagcctgagctgtggggctgactgggtgttcatccctgagtgccccccagatgatgactgggaggagcacctgtgccggcggctgtctgagaccaggacccggggcagccggctgaacatcatcatcgtggccgagggcgccatcgacaagaatggcaagcccatcaccagcgaggacatcaagaacctggtggtgaagaggctgggctatgacaccagggtgacagtgctgggccacgtgcagaggggcggcacccccagcgcctttgaccgcatcctgggcagcaggatgggcgtggaggccgtgatggccctgctggagggcaccccagacaccccagcctgtgtggtgtccctgagcggcaaccaggccgtgcggctgcccctgatggagtgtgtgcaggtgaccaaggatgtgaccaaggccatggatgagaagaagtttgatgaggccctgaagctgcggggccgctccttcatgaacaactgggaggtgtacaagctgctggcccacgtgcggccccctgtgtccaagagcggcagccacacagtggccgtgatgaatgtgggcgccccagctgctggcatgaatgctgctgtgcgcagcacagtgagaattggcctcatccagggcaacagagtgctggtggtgcatgatggctttgagggcctggccaagggccagatcgaggaggccggctggagctatgtgggcggctggacaggccagggcggcagcaagctgggcaccaagaggaccctgcccaagaagagctttgagcagatcagcgccaacatcaccaagttcaacatccagggcctggtgatcatcggcggctttgaggcctacacaggaggcctggagctgatggagggcaggaagcagtttgatgagctgtgcatcccctttgtggtgatcccagccaccgtgagcaacaacgtgcccggcagtgacttctctgtgggcgctgacacagccctgaacaccatctgcaccacctgtgaccgcatcaagcagagcgctgctggcaccaagagaagagtcttcatcatcgagaccatgggcggctactgcggctacctggccaccatggccggcctggccgccggggctgatgctgcctacatctttgaggagcccttcaccatccgggacctgcaggccaacgtggagcacctggtgcagaagatgaagaccaccgtgaagaggggcctggtgctgagaaatgagaagtgcaatgaaaactacaccacagacttcatcttcaacctgtacagcgaggagggcaagggcatctttgacagcaggaagaatgtgctgggccacatgcagcagggcggcagccccaccccatttgacaggaactttgccaccaagatgggcgccaaggccatgaactggatgtctgggaagatcaaggagagctacagaaatggccgcatctttgccaacaccccagattctggctgtgtgctgggcatgaggaagagggccctggtgttccagcctgtggccgagctgaaggaccagacagactttgagcaccgcatccccaaggagcagtggtggctgaagctgcggcccatcctgaagatcctggccaagtatgaaattgacctggacaccagtgaccacgcccacctggagcacatcaccaggaagaggtctggagaggccgctgtgtag

SEQ ID NO: 163997 - DNA, 2556 bp, synthetic construct
  misc_feature 1..2556: note = Description of Artificial Sequence: Synthetic coding sequence
  source 1..2556: mol_type = other DNA
atgcacaaggatgagttccacctgaagttcttcatgtgtgtgatccagagccggcagctggtgaggaccccccagaggacagctggggaggccagcaccagctccatgctgatccccaagcccccacccaagacagacatcctgaagagcctggacaccatggatgatcctgacacagtgggcagcatccctgtgttcaagacagagtggatcatgacccatgaggagcaccacgccgccaagaccctgggcatcggcaaggccatcgctgtgctgaccagcggaggagatgcccagggcatgaatgctgctgtgcgggctgtggtgcgggtgggcatcttcaccggggcccgggtcttctttgtgcatgagggctaccagggcctggtggatggaggagaccacatcaaggaggccacctgggagagcgtgtccatgatgctgcagctgggcggcaccgtgattggcagcgcccgctgcaaggacttccgggagcgggagggccgcctgcgggccgcctacaacctggtgaagaggggcatcaccaacctgtgtgtgattggaggagatggcagcctgaccggggctgacaccttccgctctgagtggagcgacctgctgagtgacctgcagaaggccggcaagatcacagatgaggaggccaccaagagcagctacctgaacatcgtgggcctggtgggcagcattgacaatgacttctgtggcacagacatgaccatcggcacagattctgccctgcaccgcatcatggagatcgtggatgccatcaccaccacagcccagagccaccagaggacctttgtgctggaggtgatgggccgccactgcggctacctggccctggtgaccagcctgagctgtggggctgactgggtgttcatcccagaatgtcctccagatgatgactgggaggagcacctgtgccggcggctgtctgagaccaggacccggggcagccggctgaacatcatcatcgtggccgagggcgccatcgacaagaatggcaagcccatcaccagcgaggacatcaagaacctggtggtgaagaggctgggctatgacaccagggtgacagtgctgggccacgtgcagagaggaggcaccccatctgcctttgaccgcatcctgggcagcaggatgggcgtggaggccgtgatggccctgctggagggcaccccagacaccccagcctgtgtggtgtccctgagcggcaaccaggccgtgcggctgcccctgatggagtgtgtgcaggtgaccaaggatgtgaccaaggccatggatgagaagaagtttgatgaggccctgaagctgcggggccgctccttcatgaacaactgggaggtgtacaagctgctggcccacgtgcggccccctgtgtccaagagcggcagccacacagtggccgtgatgaatgtgggcgccccagctgctggcatgaatgctgctgtgcgcagcacagtgcgcatcggcctcatccagggcaacagagtgctggtggtgcatgatggctttgagggcctggccaagggccagatcgaggaggccggctggagctatgtgggcggctggacaggccagggcggcagcaagctgggcaccaagaggaccctgcccaagaagagctttgagcagatcagcgccaacatcaccaagttcaacatccagggcctggtgatcattggaggctttgaggcctacacaggaggcctggagctgatggagggcaggaagcagtttgatgagctgtgcatcccctttgtggtgatcccagccaccgtgagcaacaacgtgcccggcagtgacttctctgtgggcgctgacacagccctgaacaccatctgcaccacctgtgaccgcatcaagcagagcgctgctggcaccaagagaagagtcttcatcatcgagaccatgggcggctactgcggctacctggccaccatggccggcctggccgccggggctgatgctgcctacatctttgaggagcccttcaccatccgggacctgcaggccaacgtggagcacctggtgcagaagatgaagaccaccgtgaagaggggcctggtgctgagaaatgaaaaatgtaatgaaaactacaccacagacttcatcttcaacctgtacagcgaggagggcaagggcatctttgacagcaggaagaatgtgctgggccacatgcagcagggcggcagccccaccccatttgacaggaactttgccaccaagatgggcgccaaggccatgaactggatgtctgggaagatcaaggagagctacagaaatggccgcatctttgccaacaccccagacagcggctgtgtgctgggcatgaggaagagggccctggtgttccagcctgtggccgagctgaaggaccagacagactttgagcaccgcatccccaaggagcagtggtggctgaagctgcggcccatcctgaagatcctggccaagtatgaaattgacctggacaccagtgaccacgcccacctggagcacatcaccaggaagaggtctggagaggccgctgtgtag

SEQ ID NO: 163998 - DNA, 2343 bp, synthetic construct; identical to SEQ ID NO: 163996
  misc_feature 1..2343: note = Description of Artificial Sequence: Synthetic coding sequence
  source 1..2343: mol_type = other DNA

SEQ ID NO: 163999 - DNA, 2250 bp, synthetic construct
  misc_feature 1..2250: note = Description of Artificial Sequence: Synthetic coding sequence
  source 1..2250: mol_type = other DNA
atgacccatgaggagcaccacgccgccaagaccctgggcatcggcaaggccatcgctgtgctgaccagcggaggagatgcccagggcatgaatgctgctgtgcgggctgtggtgcgggtgggcatcttcaccggggcccgggtcttctttgtgcatgagggctaccagggcctggtggatggaggagaccacatcaaggaggccacctgggagagcgtgtccatgatgctgcagctgggcggcaccgtcatcggcagcgcccgctgcaaggacttccgggagcgggagggccgcctgcgggccgcctacaacctggtgaagaggggcatcaccaacctgtgtgtgattggaggagatggcagcctgactggagctgacaccttccgctctgagtggagcgacctgctgagtgacctgcagaaggccggcaagatcacagatgaggaggccaccaagagcagctacctgaacatcgtgggcctggtgggcagcattgacaatgacttctgtggcacagacatgaccatcggcacagacagcgccctgcaccgcatcatggagatcgtggatgccatcaccaccacagcccagagccaccagaggacctttgtgctggaggtgatgggccgccactgcggctacctggccctggtgaccagcctgagctgtggggctgactgggtgttcatccctgagtgccccccagatgatgactgggaggagcacctgtgccggcggctgtctgagaccaggacccggggcagccggctgaacatcatcatcgtggccgagggcgccatcgacaagaatggcaagcccatcaccagcgaggacatcaagaatggcagcaggatgggcgtggaggccgtgatggccctgctggagggcaccccagacaccccagcctgtgtggtgtccctgagcggcaaccaggccgtgcggctgcccctgatggagtgtgtgcaggtgaccaaggatgtgaccaaggccatggatgagaagaagtttgatgaggccctgaagctgcggggccgctccttcatgaacaactgggaggtgtacaagctgctggcccacgtgcggccccctgtgtccaagagcggcagccacacagtggccgtgatgaatgtgggcgccccagctgctggcatgaatgctgctgtgcgcagcacagtgcgcatcggcctcatccagggcaacagagtgctggtggtgcatgatggctttgagggcctggccaagggccagatcgaggaggccggctggagctatgtgggcggctggacaggccagggcggcagcaagctgggcaccaagaggaccctgcccaagaagagctttgagcagatcagcgccaacatcaccaagttcaacatccagggcctggtgatcattggaggctttgaggcctacacaggaggcctggagctgatggagggcaggaagcagtttgatgagctgtgcatcccctttgtggtgatcccagccaccgtgagcaacaacgtgcccggcagtgacttctctgtgggcgctgacacagccctgaacaccatctgcaccacctgtgaccgcatcaagcagagcgctgctggcaccaagagaagagtcttcatcatcgagaccatgggcggctactgcggctacctggccaccatggccggcctggccgccggggctgatgctgcctacatctttgaggagcccttcaccatccgggacctgcaggccaacgtggagcacctggtgcagaagatgaagaccaccgtgaagaggggcctggtgctgagaaatgaaaaatgtaatgaaaactacaccacagacttcatcttcaacctgtacagcgaggagggcaagggcatctttgacagcaggaagaatgtgctgggccacatgcagcagggcggcagccccaccccatttgacaggaactttgccaccaagatgggcgccaaggccatgaactggatgtctgggaagatcaaggagagctacagaaatggccgcatctttgccaacaccccagacagcggctgtgtgctgggcatgaggaagagggccctggtgttccagcctgtggccgagctgaaggaccagacagactttgagcaccgcatccccaaggagcagtggtggctgaagctgcggcccatcctgaagatcctggccaagtatgaaattgacctggacaccagtgaccacgcccacctggagcacatcaccaggaagaggtctggagaggccgctgtgtag

SEQ ID NO: 164000 - DNA, 534 bp, synthetic construct
  misc_feature 1..534: note = Description of Artificial Sequence: Synthetic coding sequence
  source 1..534: mol_type = other DNA
atgacccatgaggagcaccacgccgccaagaccctgggcatcggcaaggccatcgctgtgctgaccagcggaggagatgcccagggcatgaatgctgctgtgcgcagcacagtgcgcatcggcctcatccagggcaacagagtgctggtggtgcatgatggctttgagggcctggccaagggccagatcgaggaggccggctggagctatgtgggcggctggacaggccagggcggcagcaagctgggcaccaagaggaccctgcccaagaagagctttgagcagatcagcgccaacatcaccaagttcaacatccagggcctggtgatcattggaggctttgaggcctacacaggaggcctggagctgatggagggcaggaagcagtttgatgagctgtgcatcccctttgtggtgatcccagccaccgtgagcaacaacgtgcccggcagtgacttctctgtgggcgctgacacagccctgaacaccatctgcaccacctgtgaccgcatcaagcagagcgctgctggatag

SEQ ID NO: 164001 - DNA, 2343 bp, synthetic construct; identical to SEQ ID NO: 163996
  misc_feature 1..2343: note = Description of Artificial Sequence: Synthetic coding sequence
  source 1..2343: mol_type = other DNA

SEQ ID NO: 164002 - DNA, 354 bp, synthetic construct
  misc_feature 1..354: note = Description of Artificial Sequence: Synthetic coding sequence
  source 1..354: mol_type = other DNA
atgacccatgaggagcaccacgccgccaagaccctgggcatcggcaaggccatcgctgtgctgaccagcggaggagatgcccagggcatgaatgctgctgtgcgggctgtggtgcgggtgggcatcttcaccggggcccgggtcttctttgtgcatgagggctaccagggcctggtggatggaggagaccacatcaaggaggccacctgggagagcgtgtccatgatgctgcagctgggcggcaccgtcatcggcagcgcccgctgcaaggacttccgggagcgggagggccgcctgcgggccgcctacaacctggtgaagaggggcatcaccaacctgtgtgtgattggatag

SEQ ID NO: 164003 - DNA, 486 bp, synthetic construct
  misc_feature 1..486: note = Description of Artificial Sequence: Synthetic coding sequence
  source 1..486: mol_type = other DNA
atgacccatgaggagcaccacgccgccaagaccctgggcatcggcaaggccatcgctgtgctgaccagcggaggagatgcccagggcatgaatgctgctgtgcgggctgtggtgcgggtgggcatcttcaccggggcccgggtcttctttgtgcatgagggctaccagggcctggtggatggaggagaccacatcaaggaggccacctgggagagcgtgtccatgatgctgcagctgggcggcaccgtcatcggcagcgcccgctgcaaggacttccgggagcgggagggccgcctgcgggccgcctacaacctggtgaagaggggcatcaccaacctgtgtgtgattggaggagatggcagcctgactggagctgacaccttccgctctgagtggagcgacctgctgagtgacctgcagaaggccggcaagatcacagatgaggaggccaccaagagcagctacctgaacatcgtgggcctgtag

SEQ ID NO: 164004 - DNA, 474 bp, synthetic construct
  misc_feature 1..474: note = Description of Artificial Sequence: Synthetic coding sequence
  source 1..474: mol_type = other DNA
atgacccatgaggagcaccacgccgccaagaccctgggcatcggcaaggccatcgctgtgctgaccagcggaggagatgcccagggcatgaatgctgctgtgcgggctgtggtgcgggtgggcatcttcaccggggcccgggtcttctttgtgcatgagggctaccagggcctggtggatggaggagaccacatcaaggaggccacctgggagagcgtgtccatgatgctgcagctgggcggcaccgtcatcggcagcgcccgctgcaaggacttccgggagcgggagggccgcctgcgggccgcctacaacctggtgaagaggggcatcaccaacctgtgtgtgattggaggagatggcagcctgactggagctgacaccttccgctctgagtggagcgacctgctgagtgacctgcagaaggccggcaagatcacagatgaggaggccaccaagagcagctacctgaactag

SEQ ID NO: 164005 - DNA, 258 bp, synthetic construct
  misc_feature 1..258: note = Description of Artificial Sequence: Synthetic coding sequence
  source 1..258: mol_type = other DNA
atgacccatgaggagcaccacgccgccaagaccctgggcatcggcaaggccatcgctgtgctgaccagcggaggagatgcccagggcatgaatgctgctgtgcgggctgtggtgcgggtgggcatcttcaccggggcccgggtcttctttgtgcatgagggctaccagggcctggtggatggaggagaccacatcaaggaggccacctgggagagcgtgtccatgatgctgcagctgggcggcaccgtcatcggctag

SEQ ID NO: 164006 - DNA, 420 bp, synthetic construct
  misc_feature 1..420: note = Description of Artificial Sequence: Synthetic coding sequence
  source 1..420: mol_type = other DNA
atgacccatgaggagcaccacgccgccaagaccctgggcatcggcaaggccatcgctgtgctgaccagcggaggagatgcccagggcatgaatgctgctgtgcgggctgtggtgcgggtgggcatcttcaccggggcccgggtcttctttgtgcatgagggctaccagggcctggtggatggaggagaccacatcaaggaggccacctgggagagcgtgtccatgatgctgcagctgggcggcaccgtcatcggcagcgcccgctgcaaggacttccgggagcgggagggccgcctgcgggccgcctacaacctggtgaagaggggcatcaccaacctgtgtgtgattggaggagatggcagcctgactggagctgacaccttccgctctgagtggagcgacctgctgagtgacctgtag

SEQ ID NO: 164007 - DNA, 2250 bp, synthetic construct; identical to SEQ ID NO: 163999
  misc_feature 1..2250: note = Description of Artificial Sequence: Synthetic coding sequence
  source 1..2250: mol_type = other DNA

SEQ ID NO: 164008 - DNA, 609 bp, synthetic construct
  misc_feature 1..609: note = Description of Artificial Sequence: Synthetic coding sequence
  source 1..609: mol_type = other DNA
atgggcggctactgcggctacctggccaacatgggcggcctggccgccggggctgatgctgcctacatctttgaggagccctttgacatccgggacctgcagagcaatgtggagcacctgacagagaagatgaagaccaccatccagaggggcctggtgctgagaaatgaaagctgcagcgagaactacaccacagacttcatctaccagctgtacagcgaggagggcaaaggagtgtttgactgcaggaagaatgtgctgggccacatgcagcagggcggggcccccagcccctttgacaggaactttggcaccaagatcagcgcccgggccatggagtggatcacagccaagctgaaggaggcccggggccggggcaagaagttcaccacagatgacagcatctgtgtgctgggcatcagcaagagaaatgtcatcttccagcctgtggccgagctgaagaagcagacagactttgagcaccgcatccccaaggagcagtggtggctgaagctgcggcccctgatgaagatcctggccaagtacaaggccagctatgatgtgtctgattctggccagctggagcacgtgcagccctggagcgtgtag

SEQ ID NO: 164009 - DNA, 2331 bp, synthetic construct
  misc_feature 1..2331: note = Description of Artificial Sequence: Synthetic coding sequence
  source 1..2331: mol_type = other DNA
atgtgtggctatgagcgctgccggccctgccgcggggcccacggctacctgcggggcggccagggcgtgctgcacctgcggggcctgcccggccacggcggccgccgcctgaagcaccggcggggccgcctgggggagtgcctgcagcacccagccagcggggctgtgcggggggactggagggagaagccaggctgctggagccaccgcttcccctgccccggcagacatgccctggtgggcggcaccatcatcggcagcgcccgctgccaggccttccgcacccgggagggccgcctgaaggccgcctgcaacctgctgcagaggggcatcaccaacctgtgtgtgattggaggagatggcagcctgaccggggccaacctcttcaggaaggagtggagcggcctgctggaggagctggccagaaatggccagattgacaaggaggccgtgcagaagtatgcctacctgaatgtggtgggcatggtgggcagcattgacaatgacttctgtggcacagacatgaccatcggcacagattctgccctgcaccgcatcatcgaggtggtggatgccatcatgaccacagcccagagccaccagaggacctttgtgctggaggtgatgggccgccactgcggctacctggccctggtgtctgccctggcctgtggggctgactgggtgttcctgcctgagagccccccagaggagggctgggaggagcagatgtgtgtgaagctgtctgagaacagagccaggaagaagaggctgaacatcatcatcgtggccgagggcgccatcgacacccagaacaagcccatcaccagcgagaagatcaaggagctggtggtgacccagctgggctatgacaccagggtgaccatcctgggccacgtgcagagaggaggcaccccatctgcctttgaccgcatcctggccagcaggatgggcgtggaggccgtgattgccctgctggaggccaccccagacaccccagcctgtgtggtgtccctgaatggaaatcatgctgtgcggctgcccctgatggagtgtgtgcagatgacccaggatgtgcagaaggccatggatgagcggcgcttccaggatgctgtgcggctgcggggccgcagctttgctggcaacctgaacacctacaagaggctggccatcaagctgcctgatgaccagatccccaagaccaactgcaatgtggccgtcatcaacgtgggcgccccagctgctggcatgaatgctgctgtgcgctctgctgtgcgggtgggcattgctgatggccacaggatgctggccatctatgatggctttgatggctttgccaagggccagatcaaggagatcggctggacagatgtgggcggctggacaggccagggcggcagcatcctgggcaccaagagggtgctgcccgggaagtacctggaggagatcgccacccagatgaggacccacagcatcaatgccctgctgatcatcggcggctttgaggcctacctgggcctgctggagctgtctgctgcccgggagaagcatgaggagttctgtgtgcccatggtgatggtgcctgccaccgtgagcaacaacgtgcccggcagtgacttcagcatcggggctgacacagccctgaacaccatcacagacacctgtgaccgcatcaagcagagcgccagcggcaccaagagaagagtcttcatcatcgagaccatgggcggctactgcggctacctggccaacatgggcggcctggccgccggggctgatgctgcctacatctttgaggagccctttgacatccgggacctgcagagcaatgtggagcacctgacagagaagatgaagaccaccatccagaggggcctggtgctgagaaatgaaagctgcagcgagaactacaccacagacttcatctaccagctgtacagcgaggagggcaaaggagtgtttgactgcaggaagaatgtgctgggccacatgcagcagggcggggcccccagcccctttgacaggaactttggcaccaagatcagcgcccgggccatggagtggatcacagccaagctgaaggaggcccggggccggggcaagaagttcaccacagatgacagcatctgtgtgctgggcatcagcaagagaaatgtcatcttccagcctgtggccgagctgaagaagcagacagactttgagcaccgcatccccaaggagcagtggtggctgaagctgcggcccctgatgaagatcctggccaagtacaaggccagctatgatgtgtctgattctggccagctggagcacgtgcagccctggagcgtgtag

SEQ ID NO: 164010 - DNA, 2355 bp, synthetic construct
  misc_feature 1..2355: note = Description of Artificial Sequence: Synthetic coding sequence
  source 1..2355: mol_type = other DNA
atggatgctgatgacagccgggcccccaagggcagcctgaggaagttcctggagcacctgtctggagctgggaaggccatcggcgtgctgaccagcggaggagatgcccagggcatgaatgctgctgtgcgggctgtggtgaggatgggcatctacgtgggcgccaaggtgtacttcatctatgagggctaccagggcatggtggatggcggcagcaacattgctgaggccgactgggagagcgtgagcagcatcctgcaggtgggcggcaccatcatcggcagcgcccgctgccaggccttccgcacccgggagggccgcctgaaggccgcctgcaacctgctgcagaggggcatcaccaacctgtgtgtgattggaggagatggcagcctgaccggggccaacctcttcaggaaggagtggagcggcctgctggaggagctggccagaaatggccagattgacaaggaggccgtgcagaagtatgcctacctgaatgtggtgggcatggtgggcagcattgacaatgacttctgtggcacagacatgaccatcggcacagattctgccctgcaccgcatcatcgaggtggtggatgccatcatgaccacagcccagagccaccagaggacctttgtgctggaggtgatgggccgccactgcggctacctggccctggtgtctgccctggcctgtggggctgactgggtgttcctgcctgagagccccccagaggagggctgggaggagcagatgtgtgtgaagctgtctgagaacagagccaggaagaagaggctgaacatcatcatcgtggccgagggcgccatcgacacccagaacaagcccatcaccagcgagaagatcaaggagctggtggtgacccagctgggctatgacaccagggtgaccatcctgggccacgtgcagagaggaggcaccccatctgcctttgaccgcatcctggccagcaggatgggcgtggaggccgtgattgccctgctggaggccaccccagacaccccagcctgtgtggtgtccctgaatggaaatcatgctgtgcggctgcccctgatggagtgtgtgcagatgacccaggatgtgcagaaggccatggatgagcggcgcttccaggatgctgtgcggctgcggggccgcagctttgctggcaacctgaacacctacaagaggctggccatcaagctgcctgatgaccagatccccaagaccaactgcaatgtggccgtcatcaacgtgggcgccccagctgctggcatgaatgctgctgtgcgctctgctgtgcgggtgggcattgctgatggccacaggatgctggccatctatgatggctttgatggctttgccaagggccagatcaaggagatcggctggacagatgtgggcggctggacaggccagggcggcagcatcctgggcaccaagagggtgctgcccgggaagtacctggaggagatcgccacccagatgaggacccacagcatcaatgccctgctgatcatcggcggctttgaggcctacctgggcctgctggagctgtctgctgcccgggagaagcatgaggagttctgtgtgcccatggtgatggtgcctgccaccgtgagcaacaacgtgcccggcagtgacttcagcatcggggctgacacagccctgaacaccatcacagacacctgtgaccgcatcaagcagagcgccagcggcaccaagagaagagtcttcatcatcgagaccatgggcggctactgcggctacctggccaacatgggcggcctggccgccggggctgatgctgcctacatctttgaggagccctttgacatccgggacctgcagagcaatgtggagcacctgacagagaagatgaagaccaccatccagaggggcctggtgctgagaaatgaaagctgcagcgagaactacaccacagacttcatctaccagctgtacagcgaggagggcaaaggagtgtttgactgcaggaagaatgtgctgggccacatgcagcagggcggggcccccagcccctttgacaggaactttggcaccaagatcagcgcccgggccatggagtggatcacagccaagctgaaggaggcccggggccggggcaagaagttcaccacagatgacagcatctgtgtgctgggcatcagcaagagaaatgtcatcttccagcctgtggccgagctgaagaagcagacagactttgagcaccgcatccccaaggagcagtggtggctgaagctgcggcccctgatgaagatcctggccaagtacaaggccagctatgatgtgtctgattctggccagctggagcacgtgcagccctggagcgtgtag

SEQ ID NO: 164011 - DNA, 2322 bp, synthetic construct
  misc_feature 1..2322: note = Description of Artificial Sequence: Synthetic coding sequence
  source 1..2322: mol_type = other DNA
tatgagcgctgccggccctgccgcggggcccacggctacctgcggggcggccagggcgtgctgcacctgcggggcctgcccggccatggaggccggcggctgaagcacagaagaggccgcctgggagaatgtctgcagcacccagccagcggggctgtgcggggggactggagggagaagccaggctgctggagccaccgcttcccctgccccggcagacatgccctggtgggcggcaccatcatcggcagcgcccgctgccaggccttccgcacccgggagggccgcctgaaggccgcctgcaacctgctgcagaggggcatcaccaacctgtgtgtgattggaggagatggcagcctgactggagccaacctcttcaggaaggagtggagcggcctgctggaggagctggccagaaatggccagattgacaaggaggccgtgcagaagtatgcctacctgaatgtggtgggcatggtgggcagcattgacaatgacttctgtggcacagacatgaccatcggcacagacagcgccctgcaccgcatcatcgaggtggtggatgccatcatgaccacagcccagagccaccagaggacctttgtgctggaggtgatgggccgccactgcggctacctggccctggtgtctgccctggcctgtggggctgactgggtgttcctgcctgagagccccccagaggagggctgggaggagcagatgtgtgtgaagctgtctgaaaatagagccaggaagaagaggctgaacatcatcatcgtggccgagggcgccatcgacacccagaacaagcccatcaccagcgagaagatcaaggagctggtggtgacccagctgggctatgacaccagggtgaccatcctgggccacgtgcagaggggcggcacccccagcgcctttgaccgcatcctggccagcaggatgggcgtggaggccgtcatcgccctgctggaggccaccccagacaccccagcctgtgtggtgtccctgaatggaaaccacgctgtgcggctgcccctgatggagtgtgtgcagatgacccaggatgtgcagaaggccatggatgaaagacgcttccaggatgctgtgcggctgcggggccgcagctttgctggcaacctgaacacctacaagaggctggccatcaagctgcctgatgaccagatccccaagaccaactgcaatgtggccgtcatcaacgtgggcgccccagctgctggcatgaatgctgctgtgcgctctgctgtgcgggtgggcattgctgatggccacaggatgctggccatctatgatggctttgatggctttgccaagggccagatcaaggagatcggctggacagatgtgggcggctggacaggccagggcggcagcatcctgggcaccaagagggtgctgcccgggaagtacctggaggagatcgccacccagatgaggacccacagcatcaatgccctgctgatcattggaggctttgaggcctacctgggcctgctggagctgtctgctgcccgggagaagcatgaggagttctgtgtgcccatggtgatggtgcctgccaccgtgagcaacaacgtgcccggcagtgacttcagcattggagctgacacagccctgaacaccatcacagacacctgtgaccgcatcaagcagagcgccagcggcaccaagagaagagtcttcatcatcgagaccatgggcggctactgcggctacctggccaacatgggcggcctggccgccggggctgatgctgcctacatctttgaggagccctttgacatccgggacctgcagagcaatgtggagcacctgacagagaagatgaagaccaccatccagaggggcctggtgctgagaaatgaaagctgcagcgagaactacaccacagacttcatctaccagctgtacagcgaggagggcaagggcgtgtttgactgcaggaagaatgtgctgggccacatgcagcagggcggggcccccagcccctttgacaggaactttggcaccaagatcagcgcccgggccatggagtggatcacagccaagctgaaggaggcccggggccggggcaagaagttcaccacagatgacagcatctgtgtgctgggcatcagcaagagaaatgtcatcttccagcctgtggccgagctgaagaagcagacagactttgagcaccgcatccccaaggagcagtggtggctgaagctgcggcccctgatgaagatcctggccaagtacaaggccagctatgatgtgtctgacagcggccagctggagcacgtgcagccctggagcgtgtag

SEQ ID NO: 164012 - DNA, 633 bp, synthetic construct
  misc_feature 1..633: note = Description of Artificial Sequence: Synthetic coding sequence
  source 1..633: mol_type = other DNA
atgaatgctgctgtgcgggctgtggtgaggatgggcatctacgtgggcgccaaggtgtacttcatctatgagggctaccagggcatggtggatggcggcagcaacattgctgaggccgactgggagagcgtgagcagcatcctgcaggtgggcggcaccatcatcggcagcgcccgctgccaggccttccgcacccgggagggccgcctgaaggccgcctgcaacctgctgcagaggggcatcaccaacctgtgtgtgattggaggagatggcagcctgaccggggccaacctcttcaggaaggagtggagcggcctgctggaggagctggccagaaatggccagattgacaaggaggccgtgcagaagtatgcctacctgaatgtggtgggcatggtgggcagcattgacaatgacttctgtggcacagacatgaccatcggcacagattctgccctgcaccgcatcatcgaggtggtggatgccatcatgaccacagcccagagccaccagaggacctttgtgctggaggtgatgggccgccactgcggctacctggccctggtgtctgccctggcctgtggggctgactgggtgttcctgcctgagagccccccagaggagggctggtag

SEQ ID NO: 164013 - DNA, 501 bp, synthetic construct
  misc_feature 1..501: note = Description of Artificial Sequence: Synthetic coding sequence
  source 1..501: mol_type = other DNA
tgagctgatggccacaggatgctggccatctatgatggctttgatggctttgccaagggccagatcaaggagatcggctggacagatgtgggcggctggacaggccagggcggcagcatcctgggcaccaagagggtgctgcccgggaagtacctggaggagatcgccacccagatgaggacccacagcatcaatgccctgctgatcatcggcggctttgaggcctacaagagcgcctgtgacatggccgaggcccggggccgccaccaggagctgtgcatccccctgtgtgtggtgcctgccaccatcagcaacaacgtgcccggcacagagatcagcctgggcagtgacaccggcctgaatgctgtggtggagacctgtgaccgcatcaagcagagcgccagcggcaccaagagaagagtcttcatcatcgagaccatgggcggctactgcggctacctggccaacatgggcggcctggccgccggggctgatgcctag

SEQ ID NO: 164014 - DNA, 723 bp, synthetic construct
  misc_feature 1..723: note = Description of Artificial Sequence: Synthetic coding sequence
  source 1..723: mol_type = other DNA
atgggccgccactgcggctacctggccctggtgtctgccctggcctgtggggctgactgggtgttcctgcctgagagccccccagaggagggctgggaggagcagatgtgtgtgaagctgtctgagaacagagccaggaagaagaggctgaacatcatcatcgtggccgagggcgccatcgacacccagaacaagcccatcaccagcgagaagatcaaggagctggtggtgacccagctgggctatgacaccagggtgaccatcctgggccacgtgcagagaggaggcaccccatctgcctttgaccgcatcctggccagcaggatgggcgtggaggccgtgattgccctgctggaggccaccccagacaccccagcctgtgtggtgtccctgaatggaaatcatgctgtgcggctgcccctgatggagtgtgtgcagatgacccaggatgtgcagaaggccatggatgagcggcgcttccaggatgctgtgcggctgcggggccgcagctttgctggcaacctgaacacctacaagaggctggccatcaagctgcctgatgaccagatccccaagaccaactgcaatgtggccgtcatcaacgtgggcgccccagctgctggcatgaatgctgctgtgcgctctgctgtgcgggtgggcattgctgatggccacaggatgctggccatctatgatggctttgatggctttgccaagggctag

SEQ ID NO: 164015 - DNA, 501 bp, synthetic construct
  misc_feature 1..501: note = Description of Artificial Sequence: Synthetic coding sequence
  source 1..501: mol_type = other DNA
atgaatgctgctgtgcgggctgtggtgaggatgggcatctacgtgggcgccaaggtgtacttcatctatgagggctaccagggcatggtggatggcggcagcaacattgctgaggccgactgggagagcgtgagcagcatcctgcaggtgggcggcaccatcatcggcagcgcccgctgccaggccttccgcacccgggagggccgcctgaaggccgcctgcaacctgctgcagaggggcatcaccaacctgtgtgtgattggaggagatggcagcctgaccggggccaacctcttcaggaaggagtggagcggcctgctggaggagctggccagaaatggccagattgacaaggaggccgtgcagaagtatgcctacctgaatgtggtgggcatggtgggcagcattgacaatgacttctgtggcacagacatgaccatcggcacagattctgccctgcaccgcatcatcgaggtggtggatgccatcatgaccacctag

SEQ ID NO: 164016 - DNA, 312 bp, synthetic construct
  misc_feature 1..312: note = Description of Artificial Sequence: Synthetic coding sequence
  source 1..312: mol_type = other DNA
tgattcatctaccagctgtacagcgaggagggcaagggcgtgtttgactgcaggaagaatgtgctgggccacatgcagcagggcggggcccccagcccctttgacaggaactttggcaccaagatcagcgcccgggccatggagtggatcacagccaagctgaaggaggcccggggccggggcaagaagttcaccacagatgacagcatctgtgtgctgggcatcagcaagagaaatgtcatcttccagcctgtggccgagctgaagaagcagacagactttgagaccgtgtccatgcagcccccaagatag

SEQ ID NO: 164017 - DNA, 1743 bp, synthetic construct
  misc_feature 1..1743: note = Description of Artificial Sequence: Synthetic coding sequence
  source 1..1743: mol_type = other DNA
atgtctgactttgaggagtggatcagcggcacctacaggaagatggaggagggccccctgcccctgctgacctttgccacagccccctaccatgaccagaagccaggcaccagcggcctgaggaagaagacctactactttgaggagaagccctgctacctggagaacttcatccagagcatcttcttcagcattgacctgaaggaccggcagggcagcagcctggtggtgggcggagatggccgctacttcaacaagagcgccatcgagaccatcgtgcagatggctgctgccaatggaattggccgcctggtgattggccagaatggcatcctgagcaccccagctgtgtcctgcatcatcaggaagatcaaggccatcggcggcatcatcctgacagccagccacaaccctgggggccccaacggggactttggcatcaagttcaacatcagcaatggaggccctgcccctgaggccatcacagacaagatcttccagatcagcaagaccatcgaggagtatgctgtgtgcccagacctgaaggtggacctgggcgtgctgggcaagcagcagtttgacctggagaacaagttcaagcccttcaccgtggagatcgtggacagcgtggaggcctatgccaccatgctgcggagcatctttgacttcagcgccctgaaggagctgctgagcggccccaaccggctgaagatcagaattgatgccatgcacggcgtggtgggcccctacgtgaagaagatcctgtgtgaggagctgggcgccccagccaacagcgctgtgaactgtgtgcccctggaggactttggaggccaccacccagaccccaacctgacctatgctgctgacctggtggagaccatgaagagcggggagcatgactttggagctgcctttgatggagatggagacaggaacatgatcctgggcaagcacggcttctttgtgaaccccagcgacagcgtggccgtgattgctgccaacatcttcagcatcccctacttccagcagacaggagtgcggggctttgcccgctccatgcccaccagcggggccctggacagagtggccagcgccaccaagatcgccctgtatgagacccccaccggctggaagttcttcggcaacctgatggatgccagcaagctgagcctgtgtggggaggagagctttggaactggaagtgaccacatccgggagaaggatggcctgtgggccgtgctggcctggctgagcatcctggccaccaggaagcagagcgtggaggacatcctgaaggaccactggcagaagtatggcaggaacttcttcaccaggtatgactatgaggaggtggaggccgagggcgccaacaagatgatgaaggacctggaggccctgatgtttgacaggagctttgtgggcaagcagttcagcgccaatgacaaggtgtacacagtggagaaggctgacaactttgagtacagcgaccctgtggatggcagcatcagcaggaaccagggcctgcggctcatcttcacagatggcagccgcatcgtgttccggctgtctggaactggatctgctggggccaccatccggctgtacatcgacagctatgagaaggatgtggccaagatcaaccaggacccccaggtgatgctggcccccctcatcagcatcgccctgaaggtgtcccagctgcaggagaggactggaagaacagcccccaccgtcatcacctag

SEQ ID NO: 164018 - DNA, 1689 bp, synthetic construct
  misc_feature 1..1689: note = Description of Artificial Sequence: Synthetic coding sequence
  source 1..1689: mol_type = other DNA
atggtgaagatcgtgacagtgaagacccaggcctaccaggaccagaagccaggcaccagcggcctgaggaagagggtgaaggtgttccagagcagcgccaactatgcagagaacttcatccagagcatcatcagcacagtggagcccgcccagaggcaggaggccaccctggtggtgggcggagatggccgcttctacatgaaggaggccatccagctgattgccagaattgctgctgccaatggaattggccgcctggtgattggccagaatggcatcctgagcaccccagctgtgtcctgcatcatcaggaagatcaaggccatcggcggcatcatcctgacagccagccacaaccctgggggccccaacggggactttggcatcaagttcaacatcagcaatggaggccctgcccctgaggccatcacagacaagatcttccagatcagcaagaccatcgaggagtatgctgtgtgcccagacctgaaggtggacctgggcgtgctgggcaagcagcagtttgacctggagaacaagttcaagcccttcaccgtggagatcgtggacagcgtggaggcctatgccaccatgctgcggagcatctttgacttcagcgccctgaaggagctgctgagcggccccaaccggctgaagatcagaattgatgccatgcacggcgtggtgggcccctacgtgaagaagatcctgtgtgaggagctgggcgccccagccaacagcgctgtgaactgtgtgcccctggaggactttggaggccaccacccagaccccaacctgacctatgctgctgacctggtggagaccatgaagagcggggagcatgactttggagctgcctttgatggagatggagacaggaacatgatcctgggcaagcacggcttctttgtgaaccccagcgacagcgtggccgtgattgctgccaacatcttcagcatcccctacttccagcagacaggagtgcggggctttgcccgctccatgcccaccagcggggccctggacagagtggccagcgccaccaagatcgccctgtatgagacccccaccggctggaagttcttcggcaacctgatggatgccagcaagctgagcctgtgtggggaggagagctttggaactggaagtgaccacatccgggagaaggatggcctgtgggccgtgctggcctggctgagcatcctggccaccaggaagcagagcgtggaggacatcctgaaggaccactggcagaagtatggcaggaacttcttcaccaggtatgactatgaggaggtggaggccgagggcgccaacaagatgatgaaggacctggaggccctgatgtttgacaggagctttgtgggcaagcagttcagcgccaatgacaaggtgtacacagtggagaaggctgacaactttgagtacagcgaccctgtggatggcagcatcagcaggaaccagggcctgcggctcatcttcacagatggcagccgcatcgtgttccggctgtctggaactggatctgctggggccaccatccggctgtacatcgacagctatgagaaggatgtggccaagatcaaccaggacccccaggtgatgctggcccccctcatcagcatcgccctgaaggtgtcccagctgcaggagaggactggaagaacagcccccaccgtcatcacctag

SEQ ID NO: 164019 - DNA, 1617 bp, synthetic construct
  misc_feature 1..1617: note = Description of Artificial Sequence: Synthetic coding sequence
  source 1..1617: mol_type = other DNA
atggtgaaggtgttccagagcagcgccaactatgcagagaacttcatccagagcatcatcagcacagtggagcccgcccagaggcaggaggccaccctggtggtgggcggagatggccgcttctacatgaaggaggccatccagctgattgccagaattgctgctgccaatggaattggccgcctggtgattggccagaatggcatcctgagcaccccagctgtgtcctgcatcatcaggaagatcaaggccatcggcggcatcatcctgacagccagccacaaccctgggggccccaacggggactttggcatcaagttcaacatcagcaatggaggccctgcccctgaggccatcacagacaagatcttccagatcagcaagaccatcgaggagtatgctgtgtgcccagacctgaaggtggacctgggcgtgctgggcaagcagcagtttgacctggagaacaagttcaagcccttcaccgtggagatcgtggacagcgtggaggcctatgccaccatgctgcggagcatctttgacttcagcgccctgaaggagctgctgagcggccccaaccggctgaagatcagaattgatgccatgcacggcgtggtgggcccctacgtgaagaagatcctgtgtgaggagctgggcgccccagccaacagcgctgtgaactgtgtgcccctggaggactttggaggccaccacccagaccccaacctgacctatgctgctgacctggtggagaccatgaagagcggggagcatgactttggagctgcctttgatggagatggagacaggaacatgatcctgggcaagcacggcttctttgtgaaccccagcgacagcgtggccgtgattgctgccaacatcttcagcatcccctacttccagcagacaggagtgcggggctttgcccgctccatgcccaccagcggggccctggacagagtggccagcgccaccaagatcgccctgtatgagacccccaccggctggaagttcttcggcaacctgatggatgccagcaagctgagcctgtgtggggaggagagctttggaactggaagtgaccacatccgggagaaggatggcctgtgggccgtgctggcctggctgagcatcctggccaccaggaagcagagcgtggaggacatcctgaaggaccactggcagaagtatggcaggaacttcttcaccaggtatgactatgaggaggtggaggccgagggcgccaacaagatgatgaaggacctggaggccctgatgtttgacaggagctttgtgggcaagcagttcagcgccaatgacaaggtgtacacagtggagaaggctgacaactttgagtacagcgaccctgtggatggcagcatcagcaggaaccagggcctgcggctcatcttcacagatggcagccgcatcgtgttccggctgtctggaactggatctgctggggccaccatccggctgtacatcgacagctatgagaaggatgtggccaagatcaaccaggacccccaggtgatgctggcccccctcatcagcatcgccctgaaggtgtcccagctgcaggagaggactggaagaacagcccccaccgtcatcacctag

SEQ ID NO: 164020 - DNA, 1098 bp, synthetic construct
  misc_feature 1..1098: note = Description of Artificial Sequence: Synthetic coding sequence
  source 1..1098: mol_type = other DNA
atgctgcggagcatctttgacttcagcgccctgaaggagctgctgagcggccccaaccggctgaagatcagaattgatgccatgcatggagtggtgggcccctacgtgaagaagatcctgtgtgaggagctgggcgccccagccaacagcgctgtgaactgtgtgcccctggaggactttggaggccaccacccagaccccaacctgacctacgccgctgacctggtggagaccatgaagtctggagaacatgactttggagctgcctttgatggagatggagacaggaacatgatcctgggcaagcacggcttctttgtgaaccccagcgacagcgtggccgtgattgctgccaacatcttcagcatcccctacttccagcagacaggagtgcggggctttgcccgctccatgcccaccagcggggccctggacagagtggccagcgccaccaagatcgccctgtatgagacccccaccggctggaagttctttggaaacctgatggatgccagcaagctgagcctgtgtggggaggagagctttggcaccggcagtgaccacatccgggagaaggatggcctgtgggccgtgctggcctggctgagcatcctggccaccaggaagcagagcgtggaggacatcctgaaggaccactggcagaagtatggaagaaacttcttcaccaggtatgactatgaggaggtggaggccgagggcgccaacaagatgatgaaggacctggaggccctgatgtttgacaggagctttgtgggcaagcagttcagcgccaatgacaaggtgtacacagtggagaaggctgacaactttgagtacagcgaccctgtggatggcagcatcagcaggaaccagggcctgcggctcatcttcacagatggcagcagaattgtgttccggctgagcggcaccggcagcgctggggccaccatccggctgtacatcgacagctatgagaaggatgtggccaagatcaaccaggacccccaggtgatgctggcccccctcatcagcatcgccctgaaggtgtcccagctgcaggagaggacaggccgcacagcccccaccgtcatcacctag

SEQ ID NO: 164021 - DNA, 1839 bp, synthetic construct
  misc_feature 1..1839: note = Description of Artificial Sequence: Synthetic coding sequence
  source 1..1839: mol_type = other DNA
atggccgcccctgagggcagcggcctgggagaagatgcccggctggaccaggagacagcccagtggctgcgctgggacaagaacagcctgaccctggaggccgtgaagaggctgattgctgagggcaacaaggaggagctgaggaaatgttttggagccaggatggagtttggaacagctggcctgcgggccgccatgggccctggcatcagcaggatgaatgacctgaccatcatccagaccacccagggcttctgccgctacctggagaagcagttcagtgacctgaagcagaagggcatcgtcatcagctttgatgcccgggcccaccccagcagcggcggcagcagccgccgctttgcccggctggccgccaccaccttcatcagccagggcatccctgtgtacctgttcagtgacatcacccccaccccatttgtgcccttcaccgtgagccacctgaagctgtgtgccggcatcatgatcacagccagccacaaccccaagcaggacaatggctacaaggtgtactgggacaacggggcccagatcatcagcccccatgacaagggcatcagccaggccatcgaggagaacctggagccctggccccaggcctgggatgacagcctgattgacagcagccccctgctgcacaaccccagcgccagcatcaacaatgactactttgaggacctgaagaagtactgcttccacaggtctgtgaaccgggagaccaaggtgaagtttgtgcacacctctgtgcacggcgtgggccacagctttgtgcagagcgccttcaaggcctttgacctggtgcccccagaggccgtgcctgagcagaaggaccctgaccctgagttccccaccgtgaagtaccccaaccctgaggagggcaagggcgtgctgaccctgagctttgccctggccgacaagaccaaggccagaattgtgctggccaatgaccctgatgctgaccggctggccgtggccgagaagcaggacagcggggagtggagggtcttctctggaaatgagctgggcgccctgctgggctggtggctgttcacctcctggaaggagaagaaccaggacagaagtgccctgaaggacacctacatgctgagcagcacagtgagcagcaagatcctgcgggccatcgccctgaaggagggcttccactttgaggagaccctgaccggcttcaagtggatgggcaacagagccaagcagctgattgaccagggcaagacagtgctgtttgcctttgaggaggccatcggctacatgtgctgcccctttgtgctggacaaggatggagtgtctgctgctgtgatctctgctgagctggccagcttcctggccaccaagaacctgagcctgagccagcagctgaaggccatctacgtggagtatggctaccacatcaccaaggccagctacttcatctgccacgaccaggagaccatcaagaagctgtttgagaacctgaggaactatgatggcaagaacaactaccccaaggcctgtgggaagtttgagatcagcgccatccgggacctgaccaccggctatgatgacagccagcctgacaagaaggctgtgctgcccaccagcaagagcagccagatgatcaccttcacctttgccaatggaggagtggccaccatgaggaccagcggcacagagcccaagatcaagtactatgcagagctgtgtgcccctcctggcaacagcgaccctgagcagctgaagaaggagctgaatgagctggtgtctgccatcgaggagcacttcttccagccccagaagtacaacctgcagcccaaggctgactag

SEQ ID NO: 164022 - DNA, 1359 bp, synthetic construct
  misc_feature 1..1359: note = Description of Artificial Sequence: Synthetic coding sequence
  source 1..1359: mol_type = other DNA
atgatcacagccagccacaaccccaagcaggacaatggctacaaggtgtactgggacaacggggcccagatcatcagcccccatgacaagggcatcagccaggccatcgaggagaacctggagccctggccccaggcctgggatgacagcctgattgacagcagccccctgctgcacaaccccagcgccagcatcaacaatgactactttgaggacctgaagaagtactgcttccacaggtctgtgaaccgggagaccaaggtgaagtttgtgcacacctctgtgcacggcgtgggccacagctttgtgcagagcgccttcaaggcctttgacctggtgcccccagaggccgtgcctgagcagaaggaccctgaccctgagttccccaccgtgaagtaccccaaccctgaggagggcaagggcgtgctgaccctgagctttgccctggccgacaagaccaaggccagaattgtgctggccaatgaccctgatgctgaccggctggccgtggccgagaagcaggacagcggggagtggagggtcttctctggaaatgagctgggcgccctgctgggctggtggctgttcacctcctggaaggagaagaaccaggacagaagtgccctgaaggacacctacatgctgagcagcacagtgagcagcaagatcctgcgggccatcgccctgaaggagggcttccactttgaggagaccctgaccggcttcaagtggatgggcaacagagccaagcagctgattgaccagggcaagacagtgctgtttgcctttgaggaggccatcggctacatgtgctgcccctttgtgctggacaaggatggagtgtctgctgctgtgatctctgctgagctggccagcttcctggccaccaagaacctgagcctgagccagcagctgaaggccatctacgtggagtatggctaccacatcaccaaggccagctacttcatctgccacgaccaggagaccatcaagaagctgtttgagaacctgaggaactatgatggcaagaacaactaccccaaggcctgtgggaagtttgagatcagcgccatccgggacctgaccaccggctatgatgacagccagcctgacaagaaggctgtgctgcccaccagcaagagcagccagatgatcaccttcacctttgccaatggaggagtggccaccatgaggaccagcggcacagagcccaagatcaagtactatgcagagctgtgtgcccctcctggcaacagcgaccctgagcagctgaagaaggagctgaatgagctggtgtctgccatcgaggagcacttcttccagccccagaagtacaacctgcagcccaaggctgactag

SEQ ID NO: 164023 - DNA, 876 bp, synthetic construct
  misc_feature 1..876: note = Description of Artificial Sequence: Synthetic coding sequence
  source 1..876: mol_type = other DNA
atgagcagccagctgatcctgcggcccttcaccgtgagccacctgaagctgtgtgccggcatcatgatcacagccagccacaaccccaagcaggacaatggctacaaggtgtactgggacaatggagcccagatcatcagcccccatgacaagggcatcagccaggccatcgaggagaacctggagccctggccccaggcctgggatgacagcctgattgacagcagccccctgctgcacaaccccagcgccagcatcaacaatgactactttgaggacctgaagaagtactgcttccacaggtctgtgaaccgggagaccaaggtgaagtttgtgcacacctctgtgcatggagtgggccacagctttgtgcagagcgccttcaaggcctttgacctggtgcccccagaggccgtgcctgagcagaaggaccctgaccctgagttccccaccgtgaagtaccccaaccctgaggagggcaaaggagtgctgaccctgagctttgccctggccgacaagaccaaggcccgcatcgtgctggccaatgaccctgatgctgaccggctggccgtggccgagaagcaggacagcggggagtggagggtcttctctggaaatgagctgggcgccctgctgggctggtggctgttcacctcctggaaggagaagaaccaggacagaagtgccctgaaggacacctacatgctgagcagcacagtgagcagcaagatcctgcgggccatcgccctgaaggagggcttccactttgaggagaccctgaccggcttcaagtggatgggcaacagagccaagcagctgattgaccagggcaagacagtgctgtttgcctttgaggaggccatcggcaagaagtag

SEQ ID NO: 164024 - DNA, 1869 bp, synthetic construct
  misc_feature 1..1869: note = Description of Artificial Sequence: Synthetic coding sequence
  source 1..1869: mol_type = other DNA
atggctgaaaatacagaaggagacctgaacagcaacctgctgcacgccccctaccacactggagacccccagctggacacagccatcggccagtggctgcgctgggacaagaaccccaagaccaaggagcagatcgagaacctgctgagaaatggcatgaacaaggagctgcgggaccggctgtgctgcaggatgacctttggaacagctggcctgcggagcgccatgggcgccggcttctgctacatcaatgacctgaccgtcatccagagcacccagggcatgtacaagtacctggagcgctgcttcagtgacttcaagcagaggggctttgtggtgggctatgacacccggggccaggtgaccagcagctgcagcagccagaggctggccaagctgacagctgctgtgctgctggccaaggatgtgcctgtgtacctgttcagccgctacgtgcccaccccatttgtgccctatgctgtgcagaagctgaaggctgtggccggcgtgatgatcacagccagccacaacaggaaggaggacaatggctacaaggtgtactgggagaccggggcccagatcaccagcccccatgacaaggagatcctgaagtgcatcgaggagtgtgtggagccctggaatggctcctggaatgacaacctggtggacaccagccccctgaagagggaccccctgcaggacatctgccgccgctacatggaggacctgaagaagatctgcttctaccgggagctgaacagcaagaccaccctgaagtttgtgcacaccagcttccacggcgtgggccatgactatgtgcagctggccttcaaggtgtttggcttcaagccacccatccctgtgcctgagcagaaggaccctgaccctgacttcagcacagtgaagtgccccaaccctgaggagggggagagcgtgctggagctgagcctgcggctggccgagaaggaaaatgcccgggtggtgctggccacagatcctgatgctgaccggctggccgctgctgagctgcaggagaatggctgctggaaggtgttcaccggaaatgagctggccgccctgtttggctggtggatgtttgactgctggaagaagaacaagagcagaaatgctgatgtgaagaatgtgtacatgctggccaccaccgtgagcagcaagatcctgaaggccatcgccctgaaggagggcttccactttgaggagaccctgcccggcttcaagtggattggcagccgcatcatcgacctgctggagaatggcaaggaggtgctgtttgcctttgaggagagcatcggcttcctgtgtggcacctctgtgctggacaaggatggagtgtctgctgctgtggtggtggccgagatggccagctacctggagaccatgaacatcaccctgaagcagcagctggtgaaggtgtatgagaagtatggctaccacatcagcaagaccagctacttcctgtgctatgagccccccaccatcaagagcatctttgagcggctgaggaactttgacagccccaaggagtaccccaagttctgtggcacctttgccatcctgcacgtgagagatgtgaccaccggctatgacagcagccagcccaacaagaagtctgtgctgcctgtgtccaagaacagccagatgatcaccttcaccttccagaatggctgtgtggccaccctgcggaccagcggcacagagcccaagatcaagtactatgcagagatgtgtgccagcccagaccagagcgacacagccctgctggaggaggagctgaagaagctgattgatgccctgattgagaacttcctgcagcccagcaagaatggcctcatctggaggtctgtgtag

SEQ ID NO: 164025 - DNA, 1713 bp, synthetic construct
  misc_feature 1..1713: note = Description of Artificial Sequence: Synthetic coding sequence
  source 1..1713: mol_type = other DNA
atgggcggggagtggggccagagcgccatctgcccagagagcgcccaggagtggacctaccaggtgggccagcacctggtggacatggacctgggcgccatcaccaagtacagcgccctgcacgccaagcccaacggcctcatcctgcagtatggaacagctggcttccgcaccaaggccgagcacctggaccacgtgatgttcaggatgggcctgctggccgtgctgcggagcaagcagaccaagagcaccatcggcgtgatggtgacagccagccacaacccagaagaagataatggagtgaagctggtggaccccctgggggagatgctggcccccagctgggaggagcacgccacctgcctggccaatgctgaggagcaggacatgcagagggtgctgattgacatcagcgagaaggaggccgtgaacctgcagcaggatgcctttgtggtgattggccgggacacccggcccagcagcgagaagctgagccagagcgtgattgatggagtgacagtgctgggcggccagttccatgactatggcctgctgaccaccccccagctgcactacatggtgtactgcagaaatactggaggccgctatggcaaggccaccatcgagggctactaccagaagctgagcaaggcctttgtggagctgaccaagcaggccagctgcagcggagatgagtaccgcagcctgaaggtggactgtgccaacggcatcggggccctgaagctgcgggagatggagcactacttcagccagggcctgtctgtgcagctgttcaatgatggcagcaagggcaagctgaaccacctgtgtggggctgactttgtgaagagccaccagaagccaccccagggcatggagatcaagagcaatgaacgctgctgcagctttgatggagatgctgaccgcatcgtgtactactaccatgatgctgatggccacttccacctgattgatggagacaagatcgccaccctcatcagcagcttcctgaaggagctgctggtggagatcggggagagcctgaacatcggcgtggtgcagacagcctatgccaacggcagcagcacccgctacctggaggaggtgatgaaggtgcctgtgtactgcaccaagacaggagtgaagcacctgcaccacaaggcccaggagtttgatattggagtgtactttgaggccaacggccacggcacagccctcttcagcacagctgtggagatgaagatcaagcagagcgctgagcagctggaggacaagaagaggaaggccgccaagatgctggagaacatcatcgacctcttcaaccaggccgctggagatgccatcagtgacatgctggtgattgaggccatcctggccctgaagggcctgactgtgcagcagtgggatgccctgtacacagacctgcccaaccggcagctgaaggtgcaggtggccgacagaagagtcatcagcaccacagatgctgagcggcaggccgtgaccccacctggcctgcaggaggccatcaatgacctggtgaagaagtacaagctgagccgggcctttgtgcggcccagcggcacagaagatgtggtgcgggtgtatgcagaggccgacagccaggagagcgctgaccacctggcccacgaggtgtccctggccgtgttccagctggccggcggcatcggggagcggccccagcccggcttctag

SEQ ID NO: 164026 - DNA, 444 bp, synthetic construct
  misc_feature 1..444: note = Description of Artificial Sequence: Synthetic coding sequence
  source 1..444: mol_type = other DNA
atggacctgggcgccatcaccaagtacagcgccctgcacgccaagcccaacggcctcatcctgcagtatggaacagctggcttccgcaccaaggccgagcacctggaccacgtgatgttcaggatgggcctgctggccgtgctgcggagcaagcagaccaagagcaccatcggcgtgatggtgacagccagccacaacccagaagaagataatggagtgaagctggtggaccccctgggggagatgctggcccccagctgggaggagcacgccacctgcctggccaatgctgaggagcaggacatgcagagggtgctgattgacatcagcgagaaggaggccgtgaacctgcagcaggatgcctttgtggtgattggccgggacacccggcccagcagcgagaagctgagccagagcgtgattgatggagtgacagtgctgtag

SEQ ID NO: 164027 - DNA, 1629 bp, synthetic construct
  misc_feature 1..1629: note = Description of Artificial Sequence: Synthetic coding sequence
  source 1..1629: mol_type = other DNA
atggacctgggcgccatcaccaagtacagcgccctgcacgccaagcccaacggcctcatcctgcagtatggaacagctggcttccgcaccaaggccgagcacctggaccacgtgatgttcaggatgggcctgctggccgtgctgcggagcaagcagaccaagagcaccatcggcgtgatggtgacagccagccacaacccagaagaagataatggagtgaagctggtggaccccctgggggagatgctggcccccagctgggaggagcacgccacctgcctggccaatgctgaggagcaggacatgcagagggtgctgattgacatcagcgagaaggaggccgtgaacctgcagcaggatgcctttgtggtgattggccgggacacccggcccagcagcgagaagctgagccagagcgtgattgatggagtgacagtgctgggcggccagttccatgactatggcctgctgaccaccccccagctgcactacatggtgtactgcagaaatactggaggccgctatggcaaggccaccatcgagggctactaccagaagctgagcaaggcctttgtggagctgaccaagcaggccagctgcagcggagatgagtaccgcagcctgaaggtggactgtgccaacggcatcggggccctgaagctgcgggagatggagcactacttcagccagggcctgtctgtgcagctgttcaatgatggcagcaagggcaagctgaaccacctgtgtggggctgactttgtgaagagccaccagaagccaccccagggcatggagatcaagagcaatgaacgctgctgcagctttgatggagatgctgaccgcatcgtgtactactaccatgatgctgatggccacttccacctgattgatggagacaagatcgccaccctcatcagcagcttcctgaaggagctgctggtggagatcggggagagcctgaacatcggcgtggtgcagacagcctatgccaacggcagcagcacccgctacctggaggaggtgatgaaggtgcctgtgtactgcaccaagacaggagtgaagcacctgcaccacaaggcccaggagtttgatattggagtgtactttgaggccaacggccacggcacagccctcttcagcacagctgtggagatgaagatcaagcagagcgctgagcagctggaggacaagaagaggaaggccgccaagatgctggagaacatcatcgacctcttcaaccaggccgctggagatgccatcagtgacatgctggtgattgaggccatcctggccctgaagggcctgactgtgcagcagtgggatgccctgtacacagacctgcccaaccggcagctgaaggtgcaggtggccgacagaagagtcatcagcaccacagatgctgagcggcaggccgtgaccccacctggcctgcaggaggccatcaatgacctggtgaagaagtacaagctgagccgggcctttgtgcggcccagcggcacagaagatgtggtgcgggtgtatgcagaggccgacagccaggagagcgctgaccacctggcccacgaggtgtccctggccgtgttccagctggccggcggcatcggggagcggccccagcccggcttctag

SEQ ID NO: 164028 - DNA, 1701 bp, synthetic construct
  misc_feature 1..1701: note = Description of Artificial Sequence: Synthetic coding sequence
  source 1..1701: mol_type = other DNA
atggacctgggcgccatcaccaagtacagcgccctgcacgccaagcccaacggcctcatcctgcagtatggaacagctggcttccgcaccaaggccgagcacctggaccacgtgatgttcaggatgggcctgctggccgtgctgcggagcaagcagaccaagagcaccatcggcgtgatggtgacagccagccacaacccagaagaagataatggagtgaagctggtggaccccctgggggagatgctggcccccagctgggaggagcacgccacctgcctggccaatgctgaggagcaggacatgcagagggtgctgattgacatcagcgagaaggaggccgtgaacctgcagcaggatgcctttgtggtgattggccgggacacccggcccagcagcgagaagctgagccagagcgtgattgatggagtgacagtgctgggcggccagttccatgactatggcctgctgaccaccccccagctgcactacatggtgtactgcagaaatactggaggccgctatggcaaggccaccatcgagggctactaccagaagctgagcaaggcctttgtggagctgaccaagcaggccagctgcagcggagatgagtaccgcagcctgaaggtggactgtgccaacggcatcggggccctgaagctgcgggagatggagcactacttcagccagggcctgtctgtgcagctgttcaatgatggcagcaagggcaagctgaaccacctgtgtggggctgactttgtgaagagccaccagaagccaccccagggcatggagatcaagagcaatgaacgctgctgcagctttgatggagatgctgaccgcatcgtgtactactaccatgatgctgatggccacttccacctgattgatggagacaagatcgccaccctcatcagcagcttcctgaaggagctgctggtggagatcggggagagcctgaacatcggcgtggtgcagacagcctatgccaacggcagcagcacccgctacctggaggaggtgatgaaggtgcctgtgtactgcaccaagacaggagtgaagcacctgcaccacaaggcccaggagtttgatattggagtgtactttgaggccaacggccacggcacagccctcttcagcacagctgtggagatgaagatcaagcagagcgctgagcagctggaggacaagaagaggaaggccgccaagatgctggagaacatcatcgacctcttcaaccaggccgctggagatgccatcagtgacatgctggtgattgaggccatcctggccctgaagggcctgactgtgcagcagtgggatgccctgtacacagacctgcccaaccggcagctgaaggtgcaggtggccgacagaagagtcatcagcaccacagatgctgagcggcaggccgtgaccccacctggcctgcaggaggccatcaatgacctggtgaagaagtacaagctgagccgggcctttgtgcggcccagcggcacagaagatgtggtgcgggtgtatgcagaggccgacagccaggagagcgctgaccacctggcccacgaggtgtccctggccgtgttccagctggccggcggcatcggggagcggccccagcccggctacaaggctgctgagaccacccacaacatcaacaatgcctttggacctggaacagccaatgagcacacagtgccctag

SEQ ID NO: 164029 - DNA, 720 bp, synthetic construct
  misc_feature 1..720: note = Description of Artificial Sequence: Synthetic coding sequence
  source 1..720: mol_type = other DNA
atggagggcagccccatccctgtgctgactgtgcccacagccccctatgaggaccagaggcctgctgggggcggcggcctgcggcggcccaccggcctgtttgagggccagaggaactacctgcccaacttcatccagagcgtgctgagcagcattgacctgcgggaccggcagggctgcaccatggtggtgggcagtgatggccgctacttcagcaggacagccatcgagatcgtggtgcagatggccgccgccaacggcatcggccgcctcatcatcggccagaatggcatcctgagcaccccagctgtgtcctgcatcatcaggaagatcaaggccgccggcggcatcatcctgacagccagccactgccctgggggccctggaggagaatttggagtgaagttcaacgtggccaacggggtggagatcgtggaccctgtggacatctacctgaacctgctgcggaccatctttgacttccacgccatcaagggcctgctgaccggccccagccagctgaagatcagaattgatgccatgcacggcgtgatgggcccctacgtgaggaaggtgctgtgtgatgagctgggcgccccagccaacagcgccatcaactgtgtgcccctggaggactttggaggccagcacccagaccccaacctgacctacgccaccaccctgctggaggccatgaagggcggggagtatggcttctag

SEQ ID NO: 164030 - DNA, 1704 bp, synthetic construct
  misc_feature 1..1704: note = Description of Artificial Sequence: Synthetic coding sequence
  source 1..1704: mol_type = other DNA
atggagggcagccccatccctgtgctgactgtgcccacagccccctatgaggaccagaggcctgctgggggcggcggcctgcggcggcccaccggcctgtttgagggccagaggaactacctgcccaacttcatccagagcgtgctgagcagcattgacctgcgggaccggcagggctgcaccatggtggtgggcagtgatggccgctacttcagcaggacagccatcgagatcgtggtgcagatggccgccgccaacggcatcggccgcctcatcatcggccagaatggcatcctgagcaccccagctgtgtcctgcatcatcaggaagatcaaggccgccggcggcatcatcctgacagccagccactgccctgggggccctggaggagaatttggagtgaagttcaacgtggccaacggcggccctgccccagatgtggtgtctgacaagatctaccagatcagcaagaccatcgaggagtatgccatctgcccagacctgagaattgacctgagccggctgggccggcaggagtttgacctggagaacaagttcaagcccttccgggtggagatcgtggaccctgtggacatctacctgaacctgctgcggaccatctttgacttccacgccatcaagggcctgctgaccggccccagccagctgaagatcagaattgatgccatgcatggagtgatgggcccctacgtgaggaaggtgctgtgtgatgagctgggcgccccagccaacagcgccatcaactgtgtgcccctggaggactttggaggccagcacccagaccccaacctgacctacgccaccaccctgctggaggccatgaagggcggggagtatggctttggagctgcctttgatgctgatggagaccgctacatgatcctgggccagaatggcttctttgtgagccccagcgacagcctggccatcatcgccgccaacctgagctgcatcccctacttccggcagatgggcgtgcggggcttcggccgctccatgcccacctccatggccctggacagagtggccaagtccatgaaggtgcctgtgtatgagaccccagctggctggaggttcttcagcaacctgatggattctggccgctgcaacctgtgtggggaggagagctttggcaccggcagtgaccacctgcgggagaaggatggcctgtgggccgtgctggtgtggctgagcatcatcgccgccaggaagcagagcgtggaggagatcgtgcgggaccactgggccaagtttggccgccactactactgccgctttgattatgagggcctggaccccaagaccacctactacatcatgagggacctggaggccctggtgacagacaagagcttcatcggccagcagtttgctgtgggcagccacgtgtacagcgtggccaagacagacagctttgaatatgtggaccctgtggatggcaccgtgaccaagaagcagggcctgcgcatcatcttcagtgatgccagccgcctcatcttccggctgagcagcagcagtggagtgcgggccaccctgcggctgtatgcagagagctatgaaagagaccccagcggccatgaccaggagccccaggccgtgctgagccccctgattgccatcgccctgaagatcagccagatccacgagaggacaggccggcggggccccaccgtcatcacctag

SEQ ID NO: 164031 - DNA, 1452 bp, synthetic construct
  misc_feature 1..1452: note = Description of Artificial Sequence: Synthetic coding sequence
  source 1..1452: mol_type = other DNA
atggcccaggccgacatcgccctgattggcctggccgtgatgggccagaacctgatcctgaacatgaatgaccacggctttgtggtgtgtgccttcaacagaacagtgtccaaggtggatgacttcctggccaatgaggccaagggcaccaaggtggtgggcgcccagagcctgaaggagatggtgtccaagctgaagaagccccggcgcatcatcctgctggtgaaggccggccaggccgtggatgacttcatcgagaagctggtgcccctgctggacaccggggacatcatcattgatggcggcaacagcgagtacagagacaccacccggcgctgccgggacctgaaggccaagggcatcctgtttgtgggcagcggcgtgtctggaggagaggagggcgcccgctatggccccagcctgatgcctgggggcaacaaggaggcctggccccacatcaagaccatcttccagggcattgctgccaaggtgggcaccggggagccctgctgtgactgggtgggagatgagggcgccggccactttgtgaagatggtgcacaacggcatcgagtatggagacatgcagctgatctgtgaggcctaccacctgatgaaggatgtgctgggcatggcccaggatgagatggcccaggcctttgaggactggaacaagacagagctggacagcttcctgattgagatcacagccaacatcctgaagttccaggacacagatggcaagcacctgctgcccaagatccgggacagcgctggccagaagggcaccgggaagtggacagccatcagcgccctggagtatggagtgcctgtgaccctgattggagaggccgtgtttgcccgctgcctgagcagcctgaaggatgagcgcatccaggccagcaagaagctgaagggcccccagaagttccagtttgatggagacaagaagagcttcctggaggacatcaggaaggccctgtatgccagcaagatcatctcctatgcccagggcttcatgctgctgcggcaggccgccacagaatttggctggaccctgaactatggaggcatcgccctgatgtggaggggcggctgcatcatccgcagcgtcttcctgggcaagatcaaggatgcctttgacaggaaccctgagctgcagaacctgctgctggatgacttcttcaagtctgctgtggagaactgccaggacagctggaggagagctgtgtccactggagtgcaggccggcatccccatgccctgcttcaccacagccctgtccttctatgatggctacagacatgagatgctgcctgccagcctcatccaggcccagagggactactttggagcccacacctatgagctgctggccaagccaggccagttcatccacaccaactggacaggccacggcggcaccgtgagcagcagcagctacaatgcctag

SEQ ID NO: 164032 - DNA, 1413 bp, synthetic construct
  misc_feature 1..1413: note = Description of Artificial Sequence: Synthetic coding sequence
  source 1..1413: mol_type = other DNA
atgggccagaacctgatcctgaacatgaatgaccacggctttgtggtgtgtgccttcaacagaacagtgtccaaggtggatgacttcctggccaatgaggccaagggcaccaaggtggtgggcgcccagagcctgaaggagatggtgtccaagctgaagaagccccggcgcatcatcctgctggtgaaggccggccaggccgtggatgacttcatcgagaagctggtgcccctgctggacacaggagacatcatcattgatggcggcaacagcgagtacagagacaccacccggcgctgccgggacctgaaggccaagggcatcctgtttgtgggcagcggcgtgtctggaggagaggagggcgcccgctatggccccagcctgatgcctgggggcaacaaggaggcctggccccacatcaagaccatcttccagggcattgctgccaaggtgggcactggagagccctgctgtgactgggtgggagatgaaggagctggccactttgtgaagatggtgcacaatggaattgaatatggagacatgcagctgatctgtgaggcctaccacctgatgaaggatgtgctgggcatggcccaggatgagatggcccaggcctttgaggactggaacaagacagagctggacagcttcctgattgagatcacagccaacatcctgaagttccaggacacagatggcaagcacctgctgcccaagatccgggacagcgctggccagaagggcaccgggaagtggacagccatcagcgccctggagtatggagtgcctgtgaccctcatcggggaggccgtgtttgcccgctgcctgagcagcctgaaggatgagcgcatccaggccagcaagaagctgaagggcccccagaagttccagtttgatggagacaagaagagcttcctggaggacatcaggaaggccctgtatgccagcaagatcatctcctatgcccagggcttcatgctgctgcggcaggccgccacagaatttggctggaccctgaactacggcggcatcgccctgatgtggaggggcggctgcatcatccgctctgtgttcctgggcaagatcaaggatgcctttgacagaaatcctgagctgcagaacctgctgctggatgacttcttcaagtctgctgtggagaactgccaggacagctggaggagagctgtgtccactggagtgcaggccggcatccccatgccctgcttcaccacagccctgtccttctatgatggctacagacatgagatgctgcctgccagcctcatccaggcccagagggactactttggagcccacacctatgagctgctggccaagccaggccagttcatccacaccaactggacaggccatggaggcaccgtgagcagcagcagctacaatgcctag

SEQ ID NO: 164033 - DNA, 1386 bp, synthetic construct
  misc_feature 1..1386: note = Description of Artificial Sequence: Synthetic coding sequence
  source 1..1386: mol_type = other DNA
atggcccaggccgacatcgccctgattggcctggccgtgatgggccagaacctgatcctgaacatgaatgaccacggctttgtggtgtgtgccttcaacagaacagtgtccaaggtggatgacttcctggccaatgaggccaagggcaccaaggtggtgggcgcccagagcctgaaggagatggtgtccaagctgaagaagccccggcgcatcatcctgctggtgaaggccggccaggccgtggatgacttcatcgagaagctgcggcgctgccgggacctgaaggccaagggcatcctgtttgtgggcagcggcgtgtctggaggagaggagggcgcccgctatggccccagcctgatgcctgggggcaacaaggaggcctggccccacatcaagaccatcttccagggcattgctgccaaggtgggcaccggggagccctgctgtgactgggtgggagatgagggcgccggccactttgtgaagatggtgcacaacggcatcgagtatggagacatgcagctgatctgtgaggcctaccacctgatgaaggatgtgctgggcatggcccaggatgagatggcccaggcctttgaggactggaacaagacagagctggacagcttcctgattgagatcacagccaacatcctgaagttccaggacacagatggcaagcacctgctgcccaagatccgggacagcgctggccagaagggcaccgggaagtggacagccatcagcgccctggagtatggagtgcctgtgaccctgattggagaggccgtgtttgcccgctgcctgagcagcctgaaggatgagcgcatccaggccagcaagaagctgaagggcccccagaagttccagtttgatggagacaagaagagcttcctggaggacatcaggaaggccctgtatgccagcaagatcatctcctatgcccagggcttcatgctgctgcggcaggccgccacagaatttggctggaccctgaactatggaggcatcgccctgatgtggaggggcggctgcatcatccgcagcgtcttcctgggcaagatcaaggatgcctttgacaggaaccctgagctgcagaacctgctgctggatgacttcttcaagtctgctgtggagaactgccaggacagctggaggagagctgtgtccactggagtgcaggccggcatccccatgccctgcttcaccacagccctgtccttctatgatggctacagacatgagatgctgcctgccagcctcatccaggcccagagggactactttggagcccacacctatgagctgctggccaagccaggccagttcatccacaccaactggacaggccacggcggcaccgtgagcagcagcagctacaatgcctag

SEQ ID NO: 164034 - DNA, 1290 bp, synthetic construct
  misc_feature 1..1290: note = Description of Artificial Sequence: Synthetic coding sequence
  source 1..1290: mol_type = other DNA
atgaccacagccctgtggagcgtgctgctgattggcctgagccccaagctgatgatctcctggcccatgaggcaggccgtggatgacttcatcgagaagctggtgcccctgctggacaccggggacatcatcattgatggcggcaacagcgagtacagagacaccacccggcgctgccgggacctgaaggccaagggcatcctgtttgtgggcagcggcgtgtctggaggagaggagggcgcccgctatggccccagcctgatgcctgggggcaacaaggaggcctggccccacatcaagaccatcttccagggcattgctgccaaggtgggcaccggggagccctgctgtgactgggtgggagatgagggcgccggccactttgtgaagatggtgcacaacggcatcgagtatggagacatgcagctgatctgtgaggcctaccacctgatgaaggatgtgctgggcatggcccaggatgagatggcccaggcctttgaggactggaacaagacagagctggacagcttcctgattgagatcacagccaacatcctgaagttccaggacacagatggcaagcacctgctgcccaagatccgggacagcgctggccagaagggcaccgggaagtggacagccatcagcgccctggagtatggagtgcctgtgaccctgattggagaggccgtgtttgcccgctgcctgagcagcctgaaggatgagcgcatccaggccagcaagaagctgaagggcccccagaagttccagtttgatggagacaagaagagcttcctggaggacatcaggaaggccctgtatgccagcaagatcatctcctatgcccagggcttcatgctgctgcggcaggccgccacagaatttggctggaccctgaactatggaggcatcgccctgatgtggaggggcggctgcatcatccgcagcgtcttcctgggcaagatcaaggatgcctttgacaggaaccctgagctgcagaacctgctgctggatgacttcttcaagtctgctgtggagaactgccaggacagctggaggagagctgtgtccactggagtgcaggccggcatccccatgccctgcttcaccacagccctgtccttctatgatggctacagacatgagatgctgcctgccagcctcatccaggcccagagggactactttggagcccacacctatgagctgctggccaagccaggccagttcatccacaccaactggacaggccacggcggcaccgtgagcagcagcagctacaatgcctag

SEQ ID NO: 164035 - DNA, 1500 bp, synthetic construct
  misc_feature 1..1500: note = Description of Artificial Sequence: Synthetic coding sequence
  source 1..1500: mol_type = other DNA
atgaccttctggacccagatgttcttcctgctgcaggactgtgagggcctcatcgtgcgcagcgccaccaaggtgacagcagatgtgatcaatgctgctgagaagctgcaggtggtgggccgggccggcaccggggtggacaacgtggacctggaggccgccaccaggaagggcatcctggtgatgaacacccccaacggcaacagcctgtctgctgctgagctgacctgtggcatgatcatgtgcctggcccggcagatcccccaggccacagcctccatgaaggatggcaagtgggagaggaagaagttcatgggcacagagctgaatggcaagaccctgggcatcctgggcctgggccgcatcggccgggaggtggccaccaggatgcagagctttggcatgaagaccatcggctatgaccccatcatcagccctgaggtgtctgccagctttggagtgcagcagctgcccctggaggagatctggcccctgtgtgacttcatcaccgtgcacacccccctgctgcccagcaccaccggcctgctgaatgacaacacctttgcccagtgcaagaagggcgtgcgggtggtgaactgtgcccggggcggcatcgtggatgaaggagccctgctgcgggccctgcagagcggccagtgtgccggggccgccctggatgtgttcacagaggagcccccccgggaccgggccctggtggaccatgaaaatgtcatcagctgcccccacctgggcgccagcaccaaggaggcccagagccgctgtggggaggagattgctgtgcagtttgtggacatggtgaagggcaagagcctgactggagtggtgaatgcccaggccctgaccagcgccttcagcccccacaccaagccctggattggcctggccgaggccctgggcaccctgatgagggcctgggccggcagccccaagggcaccatccaggtgatcacccagggcaccagcctgaagaatgccggcaactgcctgagccctgctgtgattgtgggcctgctgaaggaggccagcaagcaggctgatgtgaacctggtgaatgccaagctgctggtgaaggaggccggcctgaatgtgaccaccagccacagccctgctgcccctggagagcagggctttggagagtgcctgctggccgtggccctggccggggccccctaccaggccgtgggcctggtgcagggcaccacccctgtgctgcagggcctgaatggagctgtgttccggcctgaggtgcccctgcggcgggacctgcccctgctgctcttccgcacccagaccagtgaccctgccatgctgcccaccatgattggcctgctggccgaggccggcgtgcggctgctgagctaccagaccagcctggtgtctgatggagagacctggcacgtgatgggcatcagcagcctgctgcccagcctggaggcctggaagcagcacgtgacagaggccttccagttccacttctag

SEQ ID NO: 164036 - DNA, 1602 bp, synthetic construct
  misc_feature 1..1602: note = Description of Artificial Sequence: Synthetic coding sequence
  source 1..1602: mol_type = other DNA
atggcctttgccaacctgaggaaggtgctgatcagtgacagcctggacccctgctgcaggaagatcctgcaggacggcggcctgcaggtggtggagaagcagaacctgagcaaggaggagctgattgctgagctgcaggactgtgagggcctcatcgtgcgcagcgccaccaaggtgacagcagatgtgatcaatgctgctgagaagctgcaggtggtgggccgggccggcaccggggtggacaacgtggacctggaggccgccaccaggaagggcatcctggtgatgaacacccccaacggcaacagcctgtctgctgctgagctgacctgtggcatgatcatgtgcctggcccggcagatcccccaggccacagcctccatgaaggatggcaagtgggagaggaagaagttcatgggcacagagctgaatggcaagaccctgggcatcctgggcctgggccgcatcggccgggaggtggccaccaggatgcagagctttggcatgaagaccatcggctatgaccccatcatcagccctgaggtgtctgccagctttggagtgcagcagctgcccctggaggagatctggcccctgtgtgacttcatcaccgtgcacacccccctgctgcccagcaccaccggcctgctgaatgacaacacctttgcccagtgcaagaagggcgtgcgggtggtgaactgtgcccggggcggcatcgtggatgaaggagccctgctgcgggccctgcagagcggccagtgtgccggggccgccctggatgtgttcacagaggagcccccccgggaccgggccctggtggaccatgaaaatgtcatcagctgcccccacctgggcgccagcaccaaggaggcccagagccgctgtggggaggagattgctgtgcagtttgtggacatggtgaagggcaagagcctgactggagtggtgaatgcccaggccctgaccagcgccttcagcccccacaccaagccctggattggcctggccgaggccctgggcaccctgatgagggcctgggccggcagccccaagggcaccatccaggtgatcacccagggcaccagcctgaagaatgccggcaactgcctgagccctgctgtgattgtgggcctgctgaaggaggccagcaagcaggctgatgtgaacctggtgaatgccaagctgctggtgaaggaggccggcctgaatgtgaccaccagccacagccctgctgcccctggagagcagggctttggagagtgcctgctggccgtggccctggccggggccccctaccaggccgtgggcctggtgcagggcaccacccctgtgctgcagggcctgaatggagctgtgttccggcctgaggtgcccctgcggcgggacctgcccctgctgctcttccgcacccagaccagtgaccctgccatgctgcccaccatgattggcctgctggccgaggccggcgtgcggctgctgagctaccagaccagcctggtgtctgatggagagacctggcacgtgatgggcatcagcagcctgctgcccagcctggaggcctggaagcagcacgtgacagaggccttccagttccacttctag

SEQ ID NO: 164037 - DNA, 291 bp, synthetic construct
  misc_feature 1..291: note = Description of Artificial Sequence: Synthetic coding sequence
  source 1..291: mol_type = other DNA
atgaagaccatcggctatgaccccatcatcagccctgaggtgtctgccagctttggagtgcagcagctgcccctggaggagatctggcccctgtgtgacttcatcaccgtgcacacccccctgctgcccagcaccaccggcctgctgaatgacaacacctttgcccagtgcaagaagggcgtgcgggtggtgaactgtgcccggggcggcatcgtggatgaaggagccctgctgcgggccctgcagagcggccagtgtgccggggccgccctggatgtgttcacagaatag

SEQ ID NO: 164038 - DNA, 1221 bp, synthetic construct
  misc_feature 1..1221: note = Description of Artificial Sequence: Synthetic coding sequence
  source 1..1221: mol_type = other DNA
atgaaggatggcaagtgggagaggaagaagttcatgggcacagagctgaatggcaagaccctgggcatcctgggcctgggcagaattggccgggaggtggccaccaggatgcagagctttggcatgaagaccatcggctatgaccccatcatcagccctgaggtgtctgccagctttggagtgcagcagctgcccctggaggagatctggcccctgtgtgacttcatcaccgtgcacacccccctgctgcccagcaccaccggcctgctgaatgacaacacctttgcccagtgcaagaagggcgtgcgggtggtgaactgtgcccggggcggcatcgtggatgagggcgccctgctgcgggccctgcagagcggccagtgtgccggggccgccctggatgtgttcacagaggagcccccccgggaccgggccctggtggaccatgaaaatgtcatcagctgcccccacctgggcgccagcaccaaggaggcccagagccgctgtggggaggagattgctgtgcagtttgtggacatggtgaagggcaagagcctgactggagtggtgaatgcccaggccctgaccagcgccttcagcccccacaccaagccctggattggcctggccgaggccctgggcaccctgatgagggcctgggccggcagccccaagggcaccatccaggtgatcacccagggcaccagcctgaagaatgccggcaactgcctgagccctgctgtgattgtgggcctgctgaaggaggccagcaagcaggctgatgtgaacctggtgaatgccaagctgctggtgaaggaggccggcctgaatgtgaccaccagccacagccctgctgcccctggagagcagggctttggagaatgtctgctggccgtggccctggccggggccccctaccaggccgtgggcctggtgcagggcaccacccctgtgctgcagggcctgaatggagctgtgttccggcctgaggtgcccctgcggcgggacctgcccctgctgctcttccgcacccagaccagtgaccctgccatgctgcccaccatgattggcctgctggccgaggccggcgtgcggctgctgagctaccagaccagcctggtgtctgatggagagacctggcacgtgatgggcatcagcagcctgctgcccagcctggaggcctggaagcagcacgtgacagaggccttccagttccacttctag

SEQ ID NO: 164039 - DNA, 1254 bp, synthetic construct
  misc_feature 1..1254: note = Description of Artificial Sequence: Synthetic coding sequence
  source 1..1254: mol_type = other DNA
atgagcctgagcaacaagctgaccctggacaagctggatgtgaagggcaagagggtggtgatgagggtggacttcaacgtgcccatgaagaacaaccagatcaccaacaaccagaggatcaaggctgctgtgcccagcatcaagttctgcctggacaatggagccaagtctgtggtgctgatgagccacctgggccgcccagatggagtgcccatgccagacaagtacagcctggagcctgtggccgtggagctgaagagcctgctgggcaaggatgtgctcttcctgaaggactgtgtgggccctgaggtggagaaggcctgtgccaacccagctgctggcagcgtcatcctgctggagaacctgcgcttccacgtggaggaggagggcaagggcaaggatgccagcggcaacaaggtgaaggccgagcccgccaagattgaggccttccgggccagcctgagcaagctgggagatgtgtatgtgaatgatgccttcggcacagcccaccgggcccacagctccatggtgggcgtgaacctgccccagaaggccggcggcttcctgatgaagaaggagctgaactactttgccaaggccctggagagccctgagcggcccttcctggccatcctgggcggggccaaggtggccgacaagatccagctgatcaacaacatgctggacaaggtgaatgagatgatcatcggcggcggcatggccttcaccttcctgaaggtgctgaacaacatggagatcggcaccagcctgtttgatgaggagggcgccaagatcgtgaaggacctgatgagcaaggccgagaagaatggagtgaagatcaccctgcctgtggactttgtgacagctgacaagtttgatgaaaatgccaagacaggccaggccaccgtggccagcggcatcccagctggctggatgggcctggactgtggccctgagagcagcaagaagtatgcagaggccgtgacccgggccaagcagatcgtgtggaatggacctgtgggcgtgtttgagtgggaggcctttgcccggggcaccaaggccctgatggatgaggtggtgaaggccaccagccggggctgcatcaccatcattggaggaggagacacagccacctgctgtgccaagtggaacacagaggacaaggtgagccacgtgtccactggaggaggagccagcctggagctgctggagggcaaggtgctgcccggggtggatgccctgagcaacatctag

SEQ ID NO: 164040 - DNA, 846 bp, synthetic construct
  misc_feature 1..846: note = Description of Artificial Sequence: Synthetic coding sequence
  source 1..846: mol_type = other DNA
atgagcctgagcaacaagctgaccctggacaagctggatgtgaagggcaagagggtggtgatgagggtggacttcaacgtgcccatgaagaacaaccagatcaccaacaaccagaggatcaaggctgctgtgcccagcatcaagttctgcctggacaatggagccaagtctgtggtgctgatgagccacctgggccgcccagatggccggcccttcctggccatcctgggcggggccaaggtggccgacaagatccagctgatcaacaacatgctggacaaggtgaatgagatgatcatcggcggcggcatggccttcaccttcctgaaggtgctgaacaacatggagatcggcaccagcctgtttgatgaggagggcgccaagatcgtgaaggacctgatgagcaaggccgagaagaatggagtgaagatcaccctgcctgtggactttgtgacagctgacaagtttgatgaaaatgccaagacaggccaggccaccgtggccagcggcatcccagctggctggatgggcctggactgtggccctgagagcagcaagaagtatgcagaggccgtgacccgggccaagcagatcgtgtggaatggacctgtgggcgtgtttgagtgggaggcctttgcccggggcaccaaggccctgatggatgaggtggtgaaggccaccagccggggctgcatcaccatcattggaggaggagacacagccacctgctgtgccaagtggaacacagaggacaaggtgagccacgtgtccactggaggaggagccagcctggagctgctggagggcaaggtgctgcccggggtggatgccctgagcaacatctag

SEQ ID NO: 164041 - DNA, 729 bp, synthetic construct
  misc_feature 1..729: note = Description of Artificial Sequence: Synthetic coding sequence
  source 1..729: mol_type = other DNA
atggtgggcgtgaacctgccccagaaggccggcggcttcctgatgaagaaggagctgaactactttgccaaggccctggagagccctgagcggcccttcctggccatcctgggcggggccaaggtggccgacaagatccagctgatcaacaacatgctggacaaggtgaatgagatgatcattggaggcggcatggccttcaccttcctgaaggtgctgaacaacatggagatcggcaccagcctgtttgatgaggagggcgccaagatcgtgaaggacctgatgagcaaggccgagaagaatggagtgaagatcaccctgcctgtggactttgtgacagctgacaagtttgatgaaaatgccaagacaggccaggccaccgtggccagcggcatcccagctggctggatgggcctggactgtggccctgagagcagcaagaagtatgcagaggccgtgacccgggccaagcagatcgtgtggaatggacctgtgggcgtgtttgagtgggaggcctttgcccggggcaccaaggccctgatggatgaggtggtgaaggccaccagccggggctgcatcaccatcatcggcggcggggacacagccacctgctgtgccaagtggaacacagaggacaaggtgagccacgtgtccactggaggaggagccagcctggagctgctggagggcaaggtgctgcccggggtggatgccctgagcaacatctag

SEQ ID NO: 164042 - DNA, 1170 bp, synthetic construct
  misc_feature 1..1170: note = Description of Artificial Sequence: Synthetic coding sequence
  source 1..1170: mol_type = other DNA
atgaagaacaaccagatcaccaacaaccagaggatcaaggctgctgtgcccagcatcaagttctgcctggacaatggagccaagtctgtggtgctgatgagccacctgggccgcccagatggagtgcccatgccagacaagtacagcctggagcctgtggccgtggagctgaagagcctgctgggcaaggatgtgctcttcctgaaggactgtgtgggccctgaggtggagaaggcctgtgccaacccagctgctggcagcgtcatcctgctggagaacctgcgcttccacgtggaggaggagggcaagggcaaggatgccagcggcaacaaggtgaaggccgagcccgccaagattgaggccttccgggccagcctgagcaagctgggagatgtgtatgtgaatgatgccttcggcacagcccaccgggcccacagctccatggtgggcgtgaacctgccccagaaggccggcggcttcctgatgaagaaggagctgaactactttgccaaggccctggagagccctgagcggcccttcctggccatcctgggcggggccaaggtggccgacaagatccagctgatcaacaacatgctggacaaggtgaatgagatgatcatcggcggcggcatggccttcaccttcctgaaggtgctgaacaacatggagatcggcaccagcctgtttgatgaggagggcgccaagatcgtgaaggacctgatgagcaaggccgagaagaatggagtgaagatcaccctgcctgtggactttgtgacagctgacaagtttgatgaaaatgccaagacaggccaggccaccgtggccagcggcatcccagctggctggatgggcctggactgtggccctgagagcagcaagaagtatgcagaggccgtgacccgggccaagcagatcgtgtggaatggacctgtgggcgtgtttgagtgggaggcctttgcccggggcaccaaggccctgatggatgaggtggtgaaggccaccagccggggctgcatcaccatcattggaggaggagacacagccacctgctgtgccaagtggaacacagaggacaaggtgagccacgtgtccactggaggaggagccagcctggagctgctggagggcaaggtgctgcccggggtggatgccctgagcaacatctag

SEQ ID NO: 164043 - DNA, 1254 bp, synthetic construct
  misc_feature 1..1254: note = Description of Artificial Sequence: Synthetic coding sequence
  source 1..1254: mol_type = other DNA
atgagcctgagcaagaagctgaccctggacaagctggatgtgcggggcaagagggtcatcatgagggtggacttcaacgtgcccatgaagaagaaccagatcaccaacaaccagaggatcaaggccagcatccccagcatcaagtactgcctggacaatggagccaaggctgtggtgctgatgagccacctgggccgcccagatggagtgcccatgccagacaagtacagcctggcccctgtggccgtggagctgaagagcctgctgggcaaggatgtgctcttcctgaaggactgtgtgggcgctgaggtggagaaggcctgtgccaacccagcccctggcagcgtcatcctgctggagaacctgcgcttccacgtggaggaggagggcaagggccaggaccccagcggcaagaagatcaaggccgagccagacaagattgaggccttccgggccagcctgagcaagctgggagatgtgtatgtgaatgatgccttcggcacagcccaccgggcccacagctccatggtgggcgtgaacctgccccacaaggccagcggcttcctgatgaagaaggagctggactactttgccaaggccctggagaaccctgtgcggcccttcctggccatcctgggcggggccaaggtggccgacaagatccagctgatcaagaacatgctggacaaggtgaatgagatgatcatcggcggcggcatggcctacaccttcctgaaggtgctgaacaacatggagattggagccagcctgtttgatgaggagggcgccaagatcgtgaaggacatcatggccaaggcccagaagaatggagtgcgcatcaccttccctgtggactttgtgactggagacaagtttgatgaaaatgcccaggtgggcaaggccaccgtggccagcggcatcagccctggctggatgggcctggactgtggccctgagagcaacaagaaccacgcccaggtggtggcccaggcccggctcatcgtgtggaatggccccctgggcgtgtttgagtgggatgcctttgccaagggcaccaaggccctgatggatgaaattgtgaaggccaccagcaagggctgcatcaccgtgattggaggaggagacacagccacctgctgtgccaagtggaacacagaggacaaggtgagccacgtgtccactggaggaggagccagcctggagctgctggagggcaagatcctgcccggggtggaggccctgagcaacatgtag

SEQ ID NO: 164044 - DNA, 765 bp, synthetic construct
  misc_feature 1..765: note = Description of Artificial Sequence: Synthetic coding sequence
  source 1..765: mol_type = other DNA
atggccgcctacaagctggtgctgatcagacatggagagagcgcctggaacctggagaaccgcttcagcggctggtatgatgctgacctgagccctgctggccacgaggaggccaagagaggaggccaggccctgagagatgctggctatgaatttgacatctgcttcacctctgtgcagaagagggccatccgcaccctgtggacagtgctggatgccatcgaccagatgtggctgcctgtggtgaggacctggaggctgaatgaaagacactacggcggcctgaccggcctgaacaaggccgagacagctgccaagcatggagaggcccaggtgaagatctggaggaggagctatgatgtgcccccaccacccatggagccagaccaccccttctacagcaacatcagcaaggaccggcgctatgctgacctgacagaggaccagctgcccagctgtgagagcctgaaggacaccatcgcccgggccctgcccttctggaatgaggagatcgtgccccagatcaaggagggcaagagggtgctgattgctgcccacggcaacagcctgcggggcatcgtgaagcacctggagggcctgtctgaggaggccatcatggagctgaacctgcccaccggcatccccatcgtgtatgagctggacaagaacctgaagcccatcaagcccatgcagttcctgggagatgaggagaccgtgaggaaggccatggaggccgtggccgcccagggcaaggccaagaagtag

SEQ ID NO: 164045 - DNA, 435 bp, synthetic construct
  misc_feature 1..435: note = Description of Artificial Sequence: Synthetic coding sequence
  source 1..435: mol_type = other DNA
atgcccctcatccgctgtggctgccatgatgtgcccccaccacccatggagccagaccaccccttctacagcaacatcagcaaggaccggcgctatgctgacctgacagaggaccagctgcccagctgtgagagcctgaaggacaccatcgcccgggccctgcccttctggaatgaggagatcgtgccccagatcaaggagggcaagagggtgctgattgctgcccacggcaacagcctgcggggcatcgtgaagcacctggagggcctgtctgaggaggccatcatggagctgaacctgcccaccggcatccccatcgtgtatgagctggacaagaacctgaagcccatcaagcccatgcagttcctgggagatgaggagaccgtgaggaaggccatggaggccgtggccgcccagggcaaggccaagaagtag

SEQ ID NO: 164046 - DNA, 762 bp, synthetic construct
  misc_feature 1..762: note = Description of Artificial Sequence: Synthetic coding sequence
  source 1..762: mol_type = other DNA
atggccacccaccggctggtgatggtgagacatggagagagcacctggaaccaggagaaccgcttctgtggctggtttgatgctgagctgtctgagaagggcacagaggaggccaagagaggagccaaggccatcaaggatgccaagatggagtttgacatctgctacacctctgtgctgaagagggccatccgcaccctgtgggccatcctggatggaacagaccagatgtggctgcctgtggtgaggacctggaggctgaatgaaagacactacggcggcctgaccggcctgaacaaggccgagacagctgccaagcatggagaggagcaggtgaagatctggaggaggagctttgacatccccccaccacccatggatgagaagcacccctactacaacagcatcagcaaggagcggcgctatgccggcctgaagccaggagagctgcccacctgtgagagcctgaaggacaccatcgcccgggccctgcccttctggaatgaggagatcgtgccccagatcaaggccggcaagagggtgctgattgctgcccacggcaacagcctgcggggcatcgtgaagcacctggagggcatgtctgaccaggccatcatggagctgaacctgcccaccggcatccccatcgtgtatgagctgaacaaggagctgaagcccaccaagcccatgcagttcctgggagatgaggagaccgtgaggaaggccatggaggccgtggccgcccagggcaaggccaagtag

SEQ ID NO: 164047 - DNA, 765 bp, synthetic construct
  misc_feature 1..765: note = Description of Artificial Sequence: Synthetic coding sequence
  source 1..765: mol_type = other DNA
atggccgcctacaagctggtgctgatcagacatggagagagcacctggaacctggagaaccgcttcagctgctggtatgatgctgacctgagccctgctggccacgaggaggccaagagaggaggccaggccctgagagatgctggctatgaatttgacatctgcctgacctctgtgcagaagagggtcatccgcaccctgtggacagtgctggatgccatcgaccagatgtggctgcctgtggtgaggacctggaggctgaatgaaagacactacggcggcctgaccggcctgaacaaggccgagacagctgccaagcatggagaggcccaggtgaagatctggaggaggagctatgatgtgcccccaccacccatggagccagaccaccccttctacagcaacatcagcaaggaccggcgctatgctgacctgacagaggaccagctgcccagctatgagagccccaaggacaccatcgcccgggccctgcccttctggaatgaggagatcgtgccccagatcaaggagggcaagagggtgctgattgctgcccacggcaacagcctgcagggcatcgccaagcacgtggagggcctgtctgaggaggccatcatggagctgaacctgcccaccggcatccccatcgtgtatgagctggacaagaacctgaagcccatcaagcccatgcagttcctgggagatgaggagaccgtgtgcaaggccattgaagctgtggccgcccagggcaaggccaagaagtag

SEQ ID NO: 164048 - DNA, 966 bp, synthetic construct
  misc_feature 1..966: note = Description of Artificial Sequence: Synthetic coding sequence
  source 1..966: mol_type = other DNA
atggctgctgctgaggccggaggagatgatgcccgctgtgtgcggctgtctgctgagcgggcccaggccctgctggctgatgtggacaccctgctgtttgactgtgatggagtgctgtggagaggagaaacagctgtgcctggggcccctgaggccctgcgggccctgcgggcccggggcaagaggctgggcttcatcaccaacaacagcagcaagaccagggctgcctatgcagagaagctgcggcggctgggctttggaggccctgctggccctggggccagcctggaggtgtttggaacagcctactgcacagccctgtacctgcggcagaggctggccggggccccagcccccaaggcctacgtgctgggcagccctgccctggccgctgagctggaggccgtgggcgtggcctctgtgggcgtgggccctgagcccctgcagggcgagggccctggggactggctgcacgcccccctggagccagatgtgcgggctgtggtggtgggctttgacccccacttctcctacatgaagctgaccaaggccctgcgctacctgcagcagcccggctgcctgctggtgggcaccaacatggacaaccggctgcccctggagaatggccgcttcatcgccggcaccggctgcctggtgcgggctgtggagatggccgcccagaggcaggccgacatcatcggcaagcccagccgcttcatctttgactgtgtgtcccaggagtatggcatcaaccctgagaggacagtgatggtgggggaccggctggacacagacatcctgctgggcgccacctgtggcctgaagaccatcctgaccctgactggagtgtccaccctgggagatgtgaagaacaaccaggagagtgactgtgtgtccaagaagaagatggtgcctgacttctacgtggacagcattgctgacctgctgcctgccctgcagggctag

SEQ ID NO: 164049 - DNA, 378 bp, synthetic construct
  misc_feature 1..378: note = Description of Artificial Sequence: Synthetic coding sequence
  source 1..378: mol_type = other DNA
atggctgtggccgacctggccctgatcccagatgtggacatcgacagtgatggagtcttcaagtatgtgctgatccgggtgcacagcgcccccaggtctggggccccagctgctgagagcaaggagatcgtgcggggctacaagtgggccgagtaccacgccgacatctatgacaaggtgtctggggacatgcagaagcagggctgtgactgtgagtgcctgggcggcggccgcatcagccaccagagccaggacaagaagatccacgtgtatggctacagcatggcctacggccctgcccagcacgccatcagcacagagaagatcaaggccaagtacccagactatgaggtgacctgggccaatgatggctactag

SEQ ID NO: 164050 - DNA, 375 bp, synthetic construct
  misc_feature 1..375: note = Description of Artificial Sequence: Synthetic coding sequence
  source 1..375: mol_type = other DNA
atggctgtggccgacctggccctgatcccagatgtggacatcgacagtgatggagtcttcaagtatgtgctgatccgggtgcacagcgcccccaggtctggggccccagctgctgagagcaaggagatcgtgcggggctacaagtgggccgagtaccacgccgacatctatgacaaggtgtctggggacatgcagaagcagggctgtgactgtgagtgcctgggcggcggccgcatcagccaccagagccaggacaagaagatccacgtgtatggctacagcatgatgaggcccacctgtgtgcccctgggcgccagcggcccccgcatccaccaccagggcctgtggagctgcccagcccggcacttcaactag

SEQ ID NO: 164051 - DNA, 375 bp, synthetic construct; identical to SEQ ID NO: 164050
  misc_feature 1..375: note = Description of Artificial Sequence: Synthetic coding sequence
  source 1..375: mol_type = other DNA

SEQ ID NO: 164052 - DNA, 1356 bp, synthetic construct
  misc_feature 1..1356: note = Description of Artificial Sequence: Synthetic coding sequence
  source 1..1356: mol_type = other DNA
atggccacagatgacaagaccagccccaccctggacagcgccaatgacctgcccaggagccccaccagccccagccacctgacccacttcaagcccctgaccccagaccaggatgagccccccttcaagagcgcctacagcagctttgtgaacctcttccgcttcaacaaggagcgggcagagggcggccagggcgagcagcagcccctgagcggctcctggaccagcccccagctgcccagcaggacccagagcgtgcgcagccccaccccctacaagaagcagctgaatgaggagctgcagaggaggagcagcgccctgggggacctgcgggcctgcacctactgcaggaagatcgccctgtcctatgcccacagcacagacagcaacagcatcggggaggacctgaatgccctgagtgacagcgcctgcagcgtgtctgtgctggaccccagcgagcccaggacccctgtgggcagcaggaaggccagcaggaacatcttcctggaggatgacctggcctggcagagcctcatccacccagacagcagcaacacccccctgagcacccggctggtgtctgtgcaggaggatgctgggaagagccctgccaggaacagaagtgccagcatcaccaacctgagcctggacagaagtggcagccccatggtgcccagctatgagacctctgtgagcccccaggccaacagaacctacgtgaggacagagaccacagaagatgagaggaagatcctgctggacagcgtgcagctgaaggacctgtggaagaagatctgccaccacagcagcggcatggagttccaggaccaccgctactggctgcggacccaccccaactgcatcgtgggcaaggagctggtgaactggctgatcagaaatggccacatcgccacccgggcccaggccatcgccatcggccaggccatggtggatggccgctggctggactgtgtgagccaccacgaccagctgttcagagatgaatatgccctgtaccggcccctgcagagcacagagttcagcgagacccccagcccagacagcgacagcgtgaacagcgtggagggccacagcgagcccagctggttcaaggacatcaagtttgatgacagcgacacagagcagattgctgaggagggagatgacaacctggccaacagcgccagccccagcaagaggacctctgtgtcctccttccagagcacagtggacagcgacagcgctgccagcatcagcctgaatgtggagctggacaacgtgaacttccacatcaagaagcccagcaagtacccccacgtgcccccccaccctgctgaccagaagggcagaagatag

SEQ ID NO: 164053 - DNA, 1647 bp, synthetic construct
  misc_feature 1..1647: note = Description of Artificial Sequence: Synthetic coding sequence
  source 1..1647: mol_type = other DNA
atggccacagatgacaagaccagccccaccctggacagcgccaatgacctgcccaggagccccaccagccccagccacctgacccacttcaagcccctgaccccagaccaggatgagccccccttcaagagcgcctacagcagctttgtgaacctcttccgcttcaacaaggagcgggcagagggcggccagggcgagcagcagcccctgagcggctcctggaccagcccccagctgcccagcaggacccagagcgtgcgcagccccaccccctacaagaagcagctgaatgaggagctgcagaggaggagcagcgccctggacaccaggaggaaggccgagcccacctttggaggccatgaccccaggacagctgtgcagctgcggagcctgagcacagtgctgaagaggctgaaggagatcatggagggcaagagccaggacagcgacctgaagcagtactggatgccagacagccagtgcaaggaatgttatgactgcagcgagaagttcaccaccttcagaagaagacaccactgccgcctgtgtggccagatcttctgcagccgctgctgcaaccaggagatccctgggaagttcatgggctacaccggggacctgcgggcctgcacctactgcaggaagatcgccctgtcctatgcccacagcacagacagcaacagcattggagaggacctgaatgccctgagtgacagcgcctgcagcgtgtctgtgctggaccccagcgagcccaggacccctgtgggcagcaggaaggccagcaggaacatcttcctggaggatgacctggcctggcagagcctcatccacccagacagcagcaacacccccctgagcacccggctggtgtctgtgcaggaggatgctgggaagagccctgccaggaacagaagtgccagcatcaccaacctgagcctggacaggagcggcagccccatggtgcccagctatgagacctctgtgagcccccaggccaacagaacctacgtgaggacagagaccacagaagatgagaggaagatcctgctggacagcgtgcagctgaaggacctgtggaagaagatctgccaccacagcagcggcatggagttccaggaccaccgctactggctgcggacccaccccaactgcatcgtgggcaaggagctggtgaactggctgatcagaaatggccacatcgccacccgggcccaggccatcgccatcggccaggccatggtggatggccgctggctggactgtgtgagccaccacgaccagctgttcagagatgaatatgccctgtaccggcccctgcagagcacagagttcagcgagacccccagcccagacagcgacagcgtgaacagcgtggagggccacagcgagcccagctggttcaaggacatcaagtttgatgacagcgacacagagcagattgctgaggagggagatgacaacctggccaacagcgccagccccagcaagaggacctctgtgagcagcttccagagcacagtggacagcgacagcgctgccagcatcagcctgaatgtggagctggacaacgtgaacttccacatcaagaagcccagcaagtacccccacgtgcccccccaccctgctgaccagaagggcagaagatag

SEQ ID NO: 164054 - DNA, 6297 bp, synthetic construct
  misc_feature 1..6297: note = Description of Artificial Sequence: Synthetic coding sequence
  source 1..6297: mol_type = other DNA
atggccacagatgacaagaccagccccaccctggacagcgccaatgacctgcccaggagccccaccagccccagccacctgacccacttcaagcccctgaccccagaccaggatgagccccccttcaagagcgcctacagcagctttgtgaacctcttccgcttcaacaaggagcgggcagagggcggccagggcgagcagcagcccctgagcggctcctggaccagcccccagctgcccagcaggacccagagcgtgcgcagccccaccccctacaagaagcagctgaatgaggagctgcagaggaggagcagcgccctggacaccaggaggaaggccgagcccacctttggaggccatgaccccaggacagctgtgcagctgcggagcctgagcacagtgctgaagaggctgaaggagatcatggagggcaagagccaggacagcgacctgaagcagtactggatgccagacagccagtgcaaggaatgttatgactgcagcgagaagttcaccaccttcagaagaagacaccactgccgcctgtgtggccagatcttctgcagccgctgctgcaaccaggagatccctgggaagttcatgggctacaccggggacctgcgggcctgcacctactgcaggaagatcgccctgtcctatgcccacagcacagacagcaacagcattggagaggacctgaatgccctgagtgacagcgcctgcagcgtgtctgtgctggaccccagcgagcccaggacccctgtgggcagcaggaaggccagcaggaacatcttcctggaggatgacctggcctggcagagcctcatccacccagacagcagcaacacccccctgagcacccggctggtgtctgtgcaggaggatgctgggaagagccctgccaggaacagaagtgccagcatcaccaacctgagcctggacaggagcggcagccccatggtgcccagctatgagacctctgtgagcccccaggccaacagaacctacgtgaggacagagaccacagaagatgagaggaagatcctgctggacagcgtgcagctgaaggacctgtggaagaagatctgccaccacagcagcggcatggagttccaggaccaccgctactggctgcggacccaccccaactgcatcgtgggcaaggagctggtgaactggctgatcagaaatggccacatcgccacccgggcccaggccatcgccatcggccaggccatggtggatggccgctggctggactgtgtgagccaccacgaccagctgttcagagatgaatatgccctgtaccggcccctgcagagcacagagttcagcgagacccccagcccagacagcgacagcgtgaacagcgtggagggccacagcgagcccagctggttcaaggacatcaagtttgatgacagcgacacagagcagattgctgaggagggagatgacaacctggccaacagcgccagccccagcaagaggacctctgtgagcagcttccagagcacagtggacagcgacagcgctgccagcatcagcctgaatgtggagctggacaacgtgaacttccacatcaagaagcccagcaagtacccccacgtgcccccccaccctgctgaccagaaggagtacctgatcagtgacaccggcggccagcagctgagcatcagtgatgccttcatcaaggagagcctcttcaacagaagagtggaggagaagagcaaggagctgcccttcacccccctgggctggcaccacaacaacctggagctgctgcgggaggagaatggagagaagcaggccatggagcggctgctgagcgccaaccacaaccacatgatggccctgctgcagcagctgctgcacagcgacagcctgagcagctcctggagggacatcatcgtgtccctggtgtgccaggtggtgcagacagtgcggccagatgtgaagaaccaggatgatgacatggacatccggcagtttgtgcacatcaagaagatccctgggggcaagaagtttgacagcgtggtggtgaatggatttgtgtgcaccaagaacatcgcccacaagaagatgagcagctgcatcaagaaccccaagatcctgctgctgaagtgcagcattgagtacctgtaccgggaggagaccaagttcacctgcatcgaccccatcgtgctgcaggagcgggagttcctgaagaactacgtgcagagaattgtggatgtgcggcccaccctggtgctggtggagaagacagtgtccagaattgcccaggacatgctgctggagcacggcatcaccctggtgatcaacgtgaagagccaggtgctggagcgcatcagcaggatgacccagggcgacctggtgatgtccatggaccagctgctgaccaagccccacctgggcacctgccacaagttctacatgcagatcttccagctgcccaatgagcagaccaagaccctgatgttctttgagggctgcccccagcacctgggctgcaccatcaagctgcggggcggcagtgactatgagctggcccgggtgaaggagatcctgatcttcatgatctgtgtggcctaccacagccagctggagatctccttcctgatggatgaatttgccatgccacccaccctgatgcagaaccccagcttccacagcctgattgagggccggggccacgagggcgctgtgcaggagcagtatggaggcggcagcatcccctgggaccctgacatccccccagagagcctgccctgtgatgacagcagcctgctggagctgcgcatcgtgtttgagaagggggagcaggagaacaagaacctgccccaggccgtggcctctgtgaagcaccaggagcacagcaccacagcctgcccagctggcctgccctgtgccttctttgcccctgtgcctgagagcctgctgcccctgcctgtggatgaccagcaggatgccctgggcagcgagcagcctgagaccctgcagcagacagtggtgctgcaggaccccaagagccagatccgggccttccgggaccccctgcaggatgacaccggcctgtatgtgacagaggaggtgaccagcagcgaggacaagaggaagacctacagcctggccttcaagcaggagctgaaggatgtgatcctgtgcatcagccctgtgatcaccttccgggagcccttcctgctgacagagaagggcatgcgctgcagcacccgggactactttgctgagcaggtgtactggagccccctgctgaacaaggagttcaaggagatggagaacagaaggaagaagcagctgctgcgggacctgagcggcctgcagggcatgaatggcagcatccaggccaagagcatccaggtgctgcccagccatgagctggtgtccaccagaattgctgagcacctgggggacagccagagcctgggccgcatgctggccgactaccgggcccggggcggccgcatccagcccaagaacagcgacccctttgcccacagcaaggatgccagcagcaccagcagcggccagagcggcagcaagaatgaaggagatgaggagcggggcctcatcctgagtgatgctgtgtggagcaccaaggtggactgcctgaaccccatcaaccaccagaggctgtgtgtgctcttcagcagcagcagcgcccagagcagcaatgcccccagcgcctgtgtgagcccctggatcgtgaccatggagttctacggcaagaatgacctgaccctgggcatcttcctggagcgctactgcttccggcccagctaccagtgccccagcatgttctgtgacacccccatggtgcaccacatcagaagatttgtgcacggccagggctgtgtgcagatcatcctgaaggagctggacagccctgtgcccggctaccagcacaccatcctgacctacagctggtgccgcatctgcaagcaggtgacccctgtggtggccctgagcaatgaatcctggagcatgagctttgccaagtacctggagctgcgcttctacggccaccagtacacccggcgggccaatgctgagccctgtggccacagcatccaccacgactaccaccagtacttctcctacaaccagatggtggccagcttctcctacagccccatccggctgctggaggtgtgtgtgcccctgcccaagatcttcatcaagaggcaggcccccctgaaggtgtccctgctgcaggacctgaaggacttcttccagaaggtgtcccaggtgtatgtggccattgatgagcggctggccagcctgaagacagacaccttcagcaagacccgggaggagaagatggaggacatctttgcccagaaggagatggaggagggggagttcaagaactggattgagaagatgcaggcccggctgatgagcagctctgtggacaccccccagcagctgcagagcgtgtttgagagcctgattgccaagaagcagagcctgtgtgaggtgctgcaggcctggaacaaccggctgcaggacctcttccagcaggagaagggcaggaagaggcccagcgtgccccccagccctggccgcctgcggcagggcgaggagagcaagatcagcgccatggatgccagccccaggaacatcagccctggcctgcagaatggagagaaggaggaccgcttcctgaccaccctgagcagccagagcagcaccagcagcacccacctgcagctgcccaccccacctgaggtgatgtctgagcagagcgtgggcggccccccagagctggacacagccagcagcagtgaagatgtgtttgatggccacctgctgggcagcacagacagccaggtgaaggagaagagcaccatgaaggccatctttgccaacctgctgcccggcaacagctacaaccccatccccttcccctttgatcctgacaagcactacctgatgtatgaacatgagcgggtgcccatcgctgtgtgtgagaaggagcccagcagcatcatcgcctttgccctgagctgcaaggagtacagaaatgccctggaggagctgagcaaggccacccagtggaacagcgctgaggagggcctgcccaccaacagcaccagtgacagccggcccaagagcagcagccccatccggctgcctgagatgtctgggggccagaccaacagaaccacagaaacagagccccagcccaccaagaaggccagcggcatgctgtccttcttccggggcacagctgggaagagcccagacctgagcagccagaagcgggagaccctgcggggagctgacagcgcctactaccaggtgggccagacaggcaaggagggcacagagaaccagggcgtggagccccaggatgaggtggatggaggagacacccagaagaagcagctgatcaacccccacgtggagctgcagttcagtgatgccaatgccaagttctactgccgcctgtactatgctggggagttccacaagatgagggaggtgatcctggacagcagcgaggaggacttcatccgcagcctgagccacagcagcccctggcaggcccggggcggcaagagcggggccgccttctacgccacagaagatgaccgcttcatcctgaagcagatgccccggctggaggtgcagagcttcctggactttgccccccactacttcaactacatcaccaatgctgtgcagcagaagaggcccacagccctggccaagatcctgggcgtgtacagaattggctacaagaacagccagaacaacacagagaagaagctggacctgctggtgatggagaacctcttctacggcaggaagatggcccaggtgtttgacctgaagggcagcctgaggaacagaaatgtgaagacagacaccgggaaggagagctgtgatgtggtgctgctggatgagaacctgctgaagatggtgcgggacaaccccctgtacatccgcagccacagcaaggctgtgctgcggaccagcatccacagcgacagccacttcctgagcagccacctgatcatcgactacagcctgctggtgggcagagatgacaccagcaatgagctggtggtgggcatcatcgactacatccgcaccttcacctgggacaagaagctggagatggtggtgaagagcacaggcatcctgggcggccagggcaagatgcccaccgtggtgtccccagagctgtaccgcacccgcttctgtgaggccatggacaagtacttcctgatggtgcctgaccactggacaggcctgggcctgaactgctag

SEQ ID NO: 164055 - DNA, 3051 bp, synthetic construct
  misc_feature 1..3051: note = Description of Artificial Sequence: Synthetic coding sequence
  source 1..3051: mol_type = other DNA
atggagttccaggaccaccgctactggctgcggacccaccccaactgcatcgtgggcaaggagctggtgaactggctgatcagaaatggccacatcgccacccgggcccaggccatcgccatcggccaggccatggtggatggccgctggctggactgtgtgagccaccacgaccagctgttcagagatgaatatgccctgtaccggcccctgcagagcacagagttcagcgagacccccagcccagacagcgacagcgtgaacagcgtggagggccacagcgagcccagctggttcaaggacatcaagtttgatgacagcgacacagagcagattgctgaggagggagatgacaacctggccaagtacctgatcagtgacaccggcggccagcagctgagcatcagtgatgccttcatcaaggagagcctcttcaacagaagagtggaggagaagagcaaggagctgcccttcacccccctgggctggcaccacaacaacctggagctgctgcgggaggagaatggagagaagcaggccatggagcggctgctgagcgccaaccacaaccacatgatggccctgctgcagcagctgctgcacagcgacagcctgagcagctcctggagggacatcatcgtgtccctggtgtgccaggtggtgcagacagtgcggccagatgtgaagaaccaggatgatgacatggacatccggcagtttgtgcacatcaagaagatccctgggggcaagaagtttgacagcgtggtggtgaatggatttgtgtgcaccaagaacatcgcccacaagaagatgagcagctgcatcaagaaccccaagatcctgctgctgaagtgcagcattgagtacctgtaccgggaggagaccaagttcacctgcatcgaccccatcgtgctgcaggagcgggagttcctgaagaactacgtgcagagaattgtggatgtgcggcccaccctggtgctggtggagaagacagtgtccagaattgcccaggacatgctgctggagcacggcatcaccctggtgatcaacgtgaagagccaggtgctggagcgcatcagcaggatgacccagggcgacctggtgatgtccatggaccagctgctgaccaagccccacctgggcacctgccacaagttctacatgcagatcttccagctgcccaatgagcagaccaagaccctgatgttctttgagggctgcccccagcacctgggctgcaccatcaagctgcggggcggcagtgactatgagctggcccgggtgaaggagatcctgatcttcatgatctgtgtggcctaccacagccagctggagatctccttcctgatggatgaatttgccatgccacccaccctgatgcagaaccccagcttccacagcctgattgagggccggggccacgagggcgctgtgcaggagcagtatggaggcggcagcatcccctgggaccctgacatccccccagagagcctgccctgtgatgacagcagcctgctggagctgcgcatcgtgtttgagaagggggagcaggagaacaagaacctgccccaggccgtggcctctgtgaagcaccaggagcacagcaccacagcctgcccagctggcctgccctgtgccttctttgcccctgtgcctgagagcctgctgcccctgcctgtggatgaccagcaggatgccctgggcagcgagcagcctgagaccctgcagcagacagtggtgctgcaggaccccaagagccagatccgggccttccgggaccccctgcaggatgacaccggcctgtatgtgacagaggaggtgaccagcagcgaggacaagaggaagacctacagcctggccttcaagcaggagctgaaggatgtgatcctgtgcatcagccctgtgatcaccttccgggagcccttcctgctgacagagaagggcatgcgctgcagcacccgggactactttgctgagcaggtgtactggagccccctgctgaacaaggagttcaaggagatggagaacagaaggaagaagcagctgctgcgggacctgagcggcctgcagggcatgaatggcagcatccaggccaagagcatccaggtgctgcccagccatgagctggtgtccaccagaattgctgagcacctgggggacagccagagcctgggccgcatgctggccgactaccgggcccggggcggccgcatccagcccaagaacagcgacccctttgcccacagcaaggatgccagcagcaccagcagcggccagagcggcagcaagaatgaaggagatgaggagcggggcctcatcctgagtgatgctgtgtggagcaccaaggtggactgcctgaaccccatcaaccaccagaggctgtgtgtgctcttcagcagcagcagcgcccagagcagcaatgcccccagcgcctgtgtgagcccctggatcgtgaccatggagttctacggcaagaatgacctgaccctgggcatcttcctggagcgctactgcttccggcccagctaccagtgccccagcatgttctgtgacacccccatggtgcaccacatcagaagatttgtgcacggccagggctgtgtgcagatcatcctgaaggagctggacagccctgtgcccggctaccagcacaccatcctgacctacagctggtgccgcatctgcaagcaggtgacccctgtggtggccctgagcaatgaatcctggagcatgagctttgccaagtacctggagctgcgcttctacggccaccagtacacccggcgggccaatgctgagccctgtggccacagcatccaccacgactaccaccagtacttctcctacaaccagatggtggccagcttctcctacagccccatccggctgctggaggtgtgtgtgcccctgcccaagatcttcatcaagaggcaggcccccctgaaggtgtccctgctgcaggacctgaaggacttcttccagaaggtgtcccaggtgtatgtggccattgatgagcggctggccagcctgaagacagacaccttctcctag

SEQ ID NO: 164056 - DNA, 522 bp, synthetic construct
  misc_feature 1..522: note = Description of Artificial Sequence: Synthetic coding sequence
  source 1..522: mol_type = other DNA
atgaggccctggagcagccctgcccagctggtggccggggcccagcctgctggccgcggggaccccctgggcccccggcccatccccccaccccgcttccggcgggccagcagccagcgggagcccccctaccccaggcctgctgagcccgccctggagctggccggcagcaagtgccagcctgacaccccagctgccagcctgtgcccagctgacagccccagccagcaccgggtgatgcctcctggccctgcctcctgggccaacgtgggcagccggccccacacagtggccaatggacatgagctgtttgaggtgtctgaggagagagatgaggaggtggccgccttctgccacatgctggacatcctgcggagcggcagtgacatccaggactacttcctgaccggctacgtgtggagcgctgtgacccccagccctgagcacctgggagatgaggtgaacctgaaggtgacagtgctgtgtgaccggctgcaggaggccctgaccttcacctgctag

SEQ ID NO: 164057 - DNA, 4905 bp, synthetic construct
  misc_feature 1..4905: note = Description of Artificial Sequence: Synthetic coding sequence
  source 1..4905: mol_type = other DNA
atgagcagcacccagggcaatggagagcactggaagagcctggagagcgtgggcatcagcaggaaggagctggccatggccgaggccctgcagatggagtatgatgccctgagccggctgcggcatgacaaggaggagaacagagccaagcagaatgctgaccccagcctcatctcctgggatgagcccggggtggacttctacagcaagccagctggccgcaggacagacctgaagctgctgcggggcctgagcggcagtgaccccaccctgaactacaacagcctgagcccccaggagggcccccccaaccacagcaccagccagggcccccagcccggcagtgacccctggcccaagggcagcctgagcggggactacctgtacatctttgatggcagtgatggaggagtgagcagcagccctggccctggggacatcgagggcagctgcaagaagctgagccccccacccctgcccccccgggccagcatctgggacaccccacccctgccccccaggaagggcagccccagcagcagcaagatcagccagcccagcgacatcaacaccttcagcctggtggagcagctgcccgggaagctgctggagcaccgcatcctggaggaggaggaggtgctgggcggcggcggccagggccgcctgctgggctctgtggactatgatggcatcaatgatgccatcacccggctgaacctgaagagcacctatgatgctgagatgctgagagatgccacccggggctggaaggagggccggggccccctggacttcagcaaggacaccagcggcaagcctgtggcccggagcaagaccatgccaccccaggtgccccccaggacctacgccagccgctatggcaacaggaagaatgccaccccaggcaagaacagacgcatctctgctgcccctgtgggcagccggccccacacagtggccaatggacatgagctgtttgaggtgtctgaggagagagatgaggaggtggccgccttctgccacatgctggacatcctgcggagcggcagtgacatccaggactacttcctgaccggctacgtgtggagcgctgtgacccccagccctgagcacctgggagatgaggtgaacctgaaggtgacagtgctgtgtgaccggctgcaggaggccctgaccttcacctgcaactgcagcagcacagtggacctgctgatctaccagaccctgtgctacacccatgatgacctgagaaatgtggatgtgggggactttgtgctgaagccctgtggcctggaggagttcctgcagaacaagcacgccctgggcagccatgagtacatccagtactgcaggaagtttgatattgacatccggctgcagctgatggagcagaaggtggtgcggagtgacctggccaggacagtgaatgatgaccagagccccagcaccctgaactacctggtgcacctgcaggagaggcctgtgaagcagaccatcagccggcaggccctgagcctgctgtttgacacctaccacaatgaggtggatgccttcctgctggctgatggagacttccccctgaaggctgacagagtggtgcagagcgtgaaggccatctgcaatgccctggccgctgtggagaccccagagatcaccagcgccctgaaccagctgcccccctgccccagcaggatgcagcccaagatccagaaggaccccagcgtgctggccgtgcgggagaaccgggagaaggtggtggaggccctgacagctgccatcctggacctggtggagctgtactgcaacaccttcaatgctgacttccagacagctgtgcccggcagcaggaagcatgacctggtgcaggaggcctgccactttgcccggagcctggccttcaccgtgtatgccacccaccgcatccccatcatctgggccaccagctatgaggacttctacctgagctgcagcctgagccacggcggcaaggagctgtgcagccccctgcagacccggcgggcccacttcagcaagtacctgttccacctgattgtgtgggaccagcagatctgcttccctgtgcaggtgaaccggctgccccgggagaccctgctgtgtgccaccctgtatgccctgcccatccccccacctggcagcagcagcgaggccaacaagcagaggagagtgcctgaggccctgggctgggtgaccacccccctcttcaacttccggcaggtgctgacctgtggcaggaagctgctgggcctgtggccagccacccaggagaaccccagcgcccgctggagcgcccccaacttccaccagcctgacagcgtcatcctgcagattgacttccccaccagcgcctttgacatcaagttcaccagccccccaggggacaagttcagccccaggtatgaatttggcagcctgcgggaggaggaccagaggaagctgaaggacatcatgcagaaggagagcctgtactggctgacagatgctgacaagaagaggctgtgggagaagcgctactactgccacagcgaggtgagcagcctgcccctggtgctggccagcgcccccagctgggagtgggcctgcctgcctgacatctacgtgctgctgaagcagtggacccacatgaaccaccaggatgccctgggcctgctgcacgccaccttcccagaccaggaggtgcggaggatggctgtgcagtggattggcagcctgagtgatgctgagctgctggactacctgccccagctggtgcaggccctgaagtatgagtgctacctggacagccccctggtgcgcttcctgctgaagagagctgtgtctgacctgcgggtgacccactacttcttctggctgctgaaggatggcctgaaggacagccagttcagcatccgctaccagtacctgctggccgccctgctgtgctgctgcggcaagggcctgcgggaggagttcaaccggcagtgctggctggtgaatgccctggccaagctggcccagcaggtgcgggaggccgcccccagcgcccggcagggcatcctgaggacaggcctggaggaggtgaagcagttctttgccctgaatggcagctgccgcctgcccctgagccccagcctgctggtgaagggcatcgtgccccgggactgcagctacttcaacagcaatgctgtgcccctgaagctgtccttccagaatgtggaccccctgggggagaacatccgggtcatcttcaagtgtggagatgacctgcggcaggacatgctgaccctgcagatgatccgcatcatgagcaagatctgggtgcaggagggcctggacatgaggatggtgatcttccgctgcttcagcacaggccggggccggggcatggtggagatgatccccaatgctgagaccctgaggaagatccaggtggagcacggcgtgacaggcagcttcaaggaccggcccctggccgactggctgcagaagcacaaccctggagaagatgaatatgagaaggctgtggagaacttcatctacagctgtgccggctgctgcgtggccacctacgtgctgggcatctgtgacagacacaatgacaacatcatgctgaagaccaccggccacatgttccacatcgactttggccgcttcctgggccacgcccagatgtttggaaacatcaagagggaccgggccccctttgtgttcaccagtgacatggcctacgtgatcaatggaggagacaagcccagcagccgcttccatgactttgtggacctgtgctgccaggcctacaacctgatcaggaagcacacccacctgttcctgaacctgctgggcctgatgctgagctgtggcatccctgagctgagtgacctggaggacctgaagtatgtgtatgatgccctgcggccccaggacacagaggccaatgccaccacctacttcaccaggctcatcgagagcagcctgggctctgtggccaccaagctgaacttcttcatccacaacctggcccagatgaagttcaccggcagtgatgaccggctgaccctgagctttgccagcaggacccacaccctgaagagcagcggccgcatcagtgatgtgttcctgtgcagacatgagaagatcttccaccccaacaagggctacatctacgtggtgaaggtgatgagggagaacacccatgaggccacctacatccagaggacctttgaggagttccaggagctgcacaacaagctgcggctgctcttccccagcagccacctgcccagcttccccagccgcttcgtcatcggccgcagcagaggagaggccgtggccgagcggcggcgggaggagctgaatggctacatctggcacctgattcatgcccctcctgaggtggccgagtgtgacctggtgtacaccttcttccaccccctgcccagagatgagaaggccatgggcaccagccctgcccccaagagcagtgatggcacctgggcccggcctgtgggcaaggtgggcggggaggtgaagctgagcatctcctacaagaacaacaagctgttcatcatggtgatgcacatccggggcctgcagctgctgcaggatggaaatgaccctgacccctacgtgaagatctacctgctgcctgacccccagaagaccaccaagaggaagaccaaggtggccaggaagacctgcaaccccacctacaatgagatgctggtgtatgatggcatccccaagggggacctgcagcagcgggagctgcagctgtctgtgctgtctgagcagggcttctgggagaatgtgctgctgggggaggtgaacatccggctgcgggagctggacctggcccaggagaagacaggctggtttgccctgggcagccgcagccacggcaccctgtag

SEQ ID NO: 164058 - DNA, 360 bp, synthetic construct
  misc_feature 1..360: note = Description of Artificial Sequence: Synthetic coding sequence
  source 1..360: mol_type = other DNA
atgtttggaaacatcaagagggaccgggccccctttgtgttcaccagtgacatggcctacgtgatcaatggaggagacaagcccagcagccgcttccatgactttgtggacctgtgctgccaggcctacaacctgatcaggaagcacacccacctgttcctgaacctgctgggcctgatgctgagctgtggcatccctgagctgagtgacctggaggacctgaagtatgtgtatgatgccctgcggccccaggacacagaggccaatgccaccacctacttcaccagggtcatcctggcctctgtggtgggcggccgggagagcaagacctgcagcgctgtgagcagcagcggggactag

SEQ ID NO: 164059 - DNA, 396 bp, synthetic construct
  misc_feature 1..396: note = Description of Artificial Sequence: Synthetic coding sequence
  source 1..396: mol_type = other DNA
atgagcagcacccagggcaatggagagcactggaagagcctggagagcgtgggcatcagcaggaaggagctggccatggccgaggccctgcagatggagtatgatgccctgagccggctgcggcatgacaaggaggagaacagagccaagcagaatgctgaccccagcctcatctcctgggatgagcccggggtggacttctacagcaagccagctggccgcaggacagacctgaagctgctgcggggcctgagcggcagtgaccccaccctgaactacaacagcctgagcccccaggagggcccccccaaccacagcaccagccagggcccccagcccggcagtgacccctggcccaagggcagcctgagcggggactacctgtacatcttctag

SEQ ID NO: 164060 - DNA, 4821 bp, synthetic construct
  misc_feature 1..4821: note = Description of Artificial Sequence: Synthetic coding sequence
  source 1..4821: mol_type = other DNA
atgagcagcacccagggcaatggagagcactggaagagcctggagagcgtgggcatcagcaggaaggagctggccatggccgaggccctgcagatggagtatgatgccctgagccggctgcggcatgacaaggaggagaacagagccaagcagaatgctgaccccagcctcatctcctgggatgagcccggggtggacttctacagcaagccagctggccgcaggacagacctgaagctgctgcggggcctgagcggcagtgaccccaccctgaactacaacagcctgagcccccaggagggcccccccaaccacagcaccagccagggcccccagcccggcagtgacccctggcccaagggcagcctgagcggggactacctgtacatctttgatggcagtgatggaggagtgagcagcagccctggccctggggacatcgagggcagctgcaagaagctgagccccccacccctgcccccccgggccagcatctgggacaccccacccctgccccccaggaagggcagccccagcagcagcaagatcagccagcccagcgacatcaacaccttcagcctggtggagcagctgcccgggaagctgctggagcaccgcatcctggaggaggaggaggtgctgggcggcggcggccagggccgcctgctgggctctgtggactatgatggcatcaatgatgccatcacccggctgaacctgaagagcacctatgatgctgagatgctgagagatgccacccggggctggaaggagggccggggccccctggacttcagcaaggacaccagcggcaagcctgtggcccggagcaagaccatgccaccccaggtgccccccaggacctacgccagccgctatggcaacaggaagaatgccaccccaggcaagaacagacgcatctctgctgcccctgtgggcagccggccccacacagtggccaatggacatgagctgtttgaggtgtctgaggagagagatgaggaggtggccgccttctgccacatgctggacatcctgcggagcggcagtgacatccaggactacttcctgaccggctacgtgtggagcgctgtgacccccagccctgagcacctgggagatgaggtgaacctgaaggtgacagtgctgtgtgaccggctgcaggaggccctgaccttcacctgcaactgcagcagcacagtggacctgctgatctaccagaccctgtgctacacccatgatgacctgagaaatgtggatgtgggggactttgtgctgaagccctgtggcctggaggagttcctgcagaacaagcacgccctgggcagccatgagtacatccagtactgcaggaagtttgatattgacatccggctgcagctgatggagcagaaggtggtgcggagtgacctggccaggacagtgaatgatgaccagagccccagcaccctgaactacctggtgcacctgcaggagaggcctgtgaagcagaccatcagccggcaggccctgagcctgctgtttgacacctaccacaatgaggtggatgccttcctgctggctgatggagacttccccctgaaggctgacagagtggtgcagagcgtgaaggccatctgcaatgccctggccgctgtggagaccccagagatcaccagcgccctgaaccagctgcccccctgccccagcaggatgcagcccaagatccagaaggaccccagcgtgctggccgtgcgggagaaccgggagaaggtggtggaggccctgacagctgccatcctggacctggtggagctgtactgcaacaccttcaatgctgacttccagacagctgtgcccggcagcaggaagcatgacctggtgcaggaggcctgccactttgcccggagcctggccttcaccgtgtatgccacccaccgcatccccatcatctgggccaccagctatgaggacttctacctgagctgcagcctgagccacggcggcaaggagctgtgcagccccctgcagacccggcgggcccacttcagcaagtacctgttccacctgattgtgtgggaccagcagatctgcttccctgtgcaggtgaaccggctgccccgggagaccctgctgtgtgccaccctgtatgccctgcccatccccccacctggcagcagcagcgaggccaacaagcagaggagagtgcctgaggccctgggctgggtgaccacccccctcttcaacttccggcaggtgctgacctgtggcaggaagctgctgggcctgtggccagccacccaggagaaccccagcgcccgctggagcgcccccaacttccaccagcctgacagcgtcatcctgcagattgacttccccaccagcgcctttgacatcaagttcaccagccccccaggggacaagttcagccccaggtatgaatttggcagcctgcgggaggaggaccagaggaagctgaaggacatcatgcagaaggagagcctgtactggctgacagatgctgacaagaagaggctgtgggagaagcgctactactgccacagcgagtggacccacatgaaccaccaggatgccctgggcctgctgcacgccaccttcccagaccaggaggtgcggaggatggctgtgcagtggattggcagcctgagtgatgctgagctgctggactacctgccccagctggtgcaggccctgaagtatgagtgctacctggacagccccctggtgcgcttcctgctgaagagagctgtgtctgacctgcgggtgacccactacttcttctggctgctgaaggatggcctgaaggacagccagttcagcatccgctaccagtacctgctggccgccctgctgtgctgctgcggcaagggcctgcgggaggagttcaaccggcagtgctggctggtgaatgccctggccaagctggcccagcaggtgcgggaggccgcccccagcgcccggcagggcatcctgaggacaggcctggaggaggtgaagcagttctttgccctgaatggcagctgccgcctgcccctgagccccagcctgctggtgaagggcatcgtgccccgggactgcagctacttcaacagcaatgctgtgcccctgaagctgtccttccagaatgtggaccccctgggggagaacatccgggtcatcttcaagtgtggagatgacctgcggcaggacatgctgaccctgcagatgatccgcatcatgagcaagatctgggtgcaggagggcctggacatgaggatggtgatcttccgctgcttcagcacaggccggggccggggcatggtggagatgatccccaatgctgagaccctgaggaagatccaggtggagcacggcgtgacaggcagcttcaaggaccggcccctggccgactggctgcagaagcacaaccctggagaagatgaatatgagaaggctgtggagaacttcatctacagctgtgccggctgctgcgtggccacctacgtgctgggcatctgtgacagacacaatgacaacatcatgctgaagaccaccggccacatgttccacatcgactttggccgcttcctgggccacgcccagatgtttggaaacatcaagagggaccgggccccctttgtgttcaccagtgacatggcctacgtgatcaatggaggagacaagcccagcagccgcttccatgactttgtggacctgtgctgccaggcctacaacctgatcaggaagcacacccacctgttcctgaacctgctgggcctgatgctgagctgtggcatccctgagctgagtgacctggaggacctgaagtatgtgtatgatgccctgcggccccaggacacagaggccaatgccaccacctacttcaccaggctcatcgagagcagcctgggctctgtggccaccaagctgaacttcttcatccacaacctggcccagatgaagttcaccggcagtgatgaccggctgaccctgagctttgccagcaggacccacaccctgaagagcagcggccgcatcagtgatgtgttcctgtgcagacatgagaagatcttccaccccaacaagggctacatctacgtggtgaaggtgatgagggagaacacccatgaggccacctacatccagaggacctttgaggagttccaggagctgcacaacaagctgcggctgctcttccccagcagccacctgcccagcttccccagccgcttcgtcatcggccgcagcagaggagaggccgtggccgagcggcggcgggaggagctgaatggctacatctggcacctgattcatgcccctcctgaggtggccgagtgtgacctggtgtacaccttcttccaccccctgcccagagatgagaaggccatgggcaccagccctgcccccaagagcagtgatggcacctgggcccggcctgtgggcaaggtgggcggggaggtgaagctgagcatctcctacaagaacaacaagctgttcatcatggtgatgcacatccggggcctgcagctgctgcaggatggaaatgaccctgacccctacgtgaagatctacctgctgcctgacccccagaagaccaccaagaggaagaccaaggtggccaggaagacctgcaaccccacctacaatgagatgctggtgtatgatggcatccccaagggggacctgcagcagcgggagctgcagctgtctgtgctgtctgagcagggcttctgggagaatgtgctgctgggggaggtgaacatccggctgcgggagctggacctggcccaggagaagacaggctggtttgccctgggcagccgcagccacggcaccctgtag

SEQ ID NO: 164061 - DNA, 183 bp, synthetic construct
  misc_feature 1..183: note = Description of Artificial Sequence: Synthetic coding sequence
  source 1..183: mol_type = other DNA
atgagcagcacccagggcaatggagagcactggaagagcctggagagcgtgggcatcagcaggaaggagctggccatggccgaggccctgcagatggagtatgatgccctgagccggctgcggcatgacaaggaggagaacagagccaagcagaatgctgaccccagcctcatctcctggtag

SEQ ID NO: 164062 - DNA, 522 bp, synthetic construct; identical to SEQ ID NO: 164056
  misc_feature 1..522: note = Description of Artificial Sequence: Synthetic coding sequence
  source 1..522: mol_type = other DNA

SEQ ID NO: 164063 - DNA, 4338 bp, synthetic construct
  misc_feature 1..4338: note = Description of Artificial Sequence: Synthetic coding sequence
  source 1..4338: mol_type = other DNA
atggcctacagctggcagacagaccccaaccccaatgaaagccatgagaagcagtatgagcaccaggagttcctgtttgtgaaccagccccacagcagcagccaggtgtccctgggctttgaccagatcgtggatgagatcagcggcaagatcccccactatgagagcgagattgatgagaacaccttctttgtgcccacagcccccaagtgggacagcacaggccacagcctgaatgaggcccaccagatcagcctgaatgagttcaccagcaagagccgggagctgtcctggcaccaggtgtccaaggccccagccatcggcttcagccccagcgtgctgcccaagccccagaacaccaacaaggaatgttcctggggcagccccatcggcaagcaccacggggctgatgacagccgcttcagcatcctggcccccagcttcaccagcctggacaagatcaacctggagaaggagctggagaatgaaaaccacaactaccacatcggctttgagagcagcatcccccccaccaacagcagcttcagcagtgacttcatgcccaaggaggagaacaagaggagcggccacgtgaacatcgtggagcccagcctgatgctgctgaagggcagcctgcagcccggcatgtgggagagcacctggcagaagaacatcgagagcatcggctgcagcatccagctggtggaggtgccccagagcagcaacaccagcctggccagcttctgcaacaaggtgaagaagatccgggagcgctaccacgccgcagatgtgaacttcaacagcggcaagatctggagcaccaccacagccttcccctaccagctgttcagcaagaccaagttcaacatccacatcttcatcgacaacagcacccagcccctgcacttcatgccctgtgccaactacctggtgaaggacctgattgctgagatcctgcacttctgcaccaatgaccagctgctgcccaaggaccacatcctgtctgtgtgtggcagcgaggagttcctgcagaatgaccactgcctgggcagccacaagatgttccagaaggacaagagcgtcatccagctgcacctgcagaagagccgggaggcccctgggaagctgagcaggaagcatgaggaggaccacagccagttctacctgaaccagctgctggagttcatgcacatctggaaggtgtcccggcagtgcctgctgaccctcatcagaaaatatgacttccacctgaagtacctgctgaagacccaggagaatgtgtacaacatcatcgaggaggtgaagaagatctgcagcgtgctgggctgtgtggagaccaagcagatcacagatgctgtgaatgagctgagcctcatcctgcagaggaaaggagagaacttctaccagagcagcgagaccagcgccaagggcctgattgagaaggtgaccacagagctgagcaccagcatctaccagctgatcaacgtgtactgcaacagcttctatgctgacttccagcctgtgaatgtgccccgctgcaccagctacctgaaccctggcctgcccagccacctgtccttcaccgtgtatgctgcccacaacatccctgagacctgggtgcaccgcatcaacttccccctggagatcaagagcctgccccgggagagcatgctgactgtgaagctgtttggaattgcctgtgccaccaacaatgccaacctgctggcctggacctgcctgcccctcttccccaaggagaagagcatcctgggctccatgctgttctccatgaccctgcagagcgagccccctgtggagatgatcaccccaggagtgtgggatgtgtcccagcccagccctgtgaccctgcagattgacttccctgccaccggctgggagtacatgaagccagattctgaagaaaatagaagcaacctggaggagcccctgaaggagtgcatcaagcacatcgcccggctgagccagaagcagacccccctgctgctgtctgaggagaagaagcgctacctgtggttctaccgcttctactgcaacaatgaaaactgcagcctgcccctggtgctgggcagcgcccctggctgggatgagaggacagtgtctgagatgcacaccatcctgcggcgctggaccttcagccagcccctggaggccctgggcctgctgaccagcagcttcccagaccaggagatcaggaaggtggccgtgcagcagctggacaacctgctgaatgatgagctgctggagtacctgccccagctggtgcaggccgtgaagtttgagtggaacctggagagccccctggtgcagctgctgctgcacaggagcctgcagagcatccaggtggcccaccggctgtactggctgctgaagaatgcagaaaatgaggcctacttcaagtcctggtaccagaagctgctggccgccctgcagttctgtgccggcaaggccctgaatgatgagttcagcaaggagcagaagctgatcaagatcctgggggacattggagagcgggtgaagagcgccagtgaccaccagaggcaggaggtgctgaagaaggagatcggccgcctggaggagttcttccaggatgtgaacacctgccacctgcccctgaacccagccctgtgcatcaagggcatcgaccatgatgcctgcagctacttcaccagcaatgccctgcccctgaagatcaccttcatcaatgccaaccccatgggcaagaacatcagcatcatcttcaaggctggagatgacctgcggcaggacatgctggtgctgcagctgatccaggtgatggacaacatctggctgcaggagggcctggacatgcagatgatcatctaccgctgcctgagcacaggcaaggaccagggcctggtgcagatggtgcctgatgctgtgaccctggccaagatccaccgccacagcggcctcatcggccccctgaaggagaacaccatcaagaagtggttcagccagcacaaccacctgaaggctgactatgagaaggccctgaggaacttcttctacagctgtgccggctggtgtgtggtgaccttcatcctgggcgtgtgtgacagacacaatgacaacatcatgctgaccaagagcggccacatgttccacatcgactttgggaagttcctgggccacgcccagaccttcggcggcatcaagagggaccgggcccccttcatcttcaccagcgagatggagtacttcatcacagaaggaggcaagaacccccagcacttccaggactttgtggagctgtgctgccgggcctacaacatcatcaggaagcacagccagctgctgctgaacctgctggagatgatgctgtatgccggcctgcctgagctgagcggcatccaggacctgaagtatgtgtacaacaacctgcggccccaggacacagacctggaggccaccagccacttcaccaagaagatcaaggagagcctggagtgcttccctgtgaagctgaacaacctgatccacaccctggcccagatgtctgccatcagccctgccaagagcaccagccagaccttcccccaggagagctgcctgctgagcaccaccaggagcattgagcgggccaccatcctgggcttcagcaagaagagcagcaacctgtacctgatccaggtgacccacagcaacaatgagaccagcctgacagagaagagctttgagcagttcagcaagctgcacagccagctgcagaagcagtttgccagcctgaccctgcctgagttcccccactggtggcacctgcccttcaccaacagcgaccaccggcgcttccgggacctgaaccactacatggagcagatcctgaatgtgtcccatgaggtgaccaacagcgactgtgtgctgtccttcttcctgtctgaggccgtgcagcagacagtggaggagagcagccctgtgtacctgggggagaagttcccagacaagaagcccaaggtgcagctggtgatctcctatgaagatgtgaagctgaccatcctggtgaagcacatgaagaacatccacctgcctgatggcagcgcccccagcgcccacgtggagttctacctgctgccctaccccagcgaggtgagaagaaggaagaccaagtctgtgcccaagtgcacagaccccacctacaatgaaattgtggtgtatgatgaggtgacagagctgcagggccacgtgctgatgctgattgtgaagagcaagacagtgtttgtgggcgccatcaacatccggctgtgcagcgtgcccctggacaaggagaagtggtaccccctgggcaacagcatcatctag

SEQ ID NO: 164064 - DNA, 4338 bp, synthetic construct; identical to SEQ ID NO: 164063
  misc_feature 1..4338: note = Description of Artificial Sequence: Synthetic coding sequence
  source 1..4338: mol_type = other DNA

SEQ ID NO: 164065 - DNA, 4461 bp, synthetic construct
  misc_feature 1..4461: note = Description of Artificial Sequence: Synthetic coding sequence
  source 1..4461: mol_type = other DNA
atggcctacagctggcagacagaccccaaccccaatgaaagccatgagaagcagtatgagcaccaggagttcctgtttgtgaaccagccccacagcagcagccaggtgtccctgggctttgaccagatcgtggatgagatcagcggcaagatcccccactatgagagcgagattgatgagaacaccttctttgtgcccacagcccccaagtgggacagcacaggccacagcctgaatgaggcccaccagatcagcctgaatgagttcaccagcaagagccgggagctgtcctggcaccaggtgtccaaggccccagccatcggcttcagccccagcgtgctgcccaagccccagaacaccaacaaggaatgttcctggggcagccccatcggcaagcaccacggggctgatgacagccgcttcagcatcctggcccccagcttcaccagcctggacaagatcaacctggagaaggagctggagaatgaaaaccacaactaccacatcggctttgagagcagcatcccccccaccaacagcagcttcagcagtgacttcatgcccaaggaggagaacaagaggagcggccacgtgaacatcgtggagcccagcctgatgctgctgaagggcagcctgcagcccggcatgtgggagagcacctggcagaagaacatcgagagcatcggctgcagcatccagctggtggaggtgccccagagcagcaacaccagcctggccagcttctgcaacaaggtgaagaagatccgggagcgctaccacgccgcagatgtgaacttcaacagcggcaagatctggagcaccaccacagccttcccctaccagctgttcagcaagaccaagttcaacatccacatcttcatcgacaacagcacccagcccctgcacttcatgccctgtgccaactacctggtgaaggacctgattgctgagatcctgcacttctgcaccaatgaccagctgctgcccaaggaccacatcctgtctgtgtgtggcagcgaggagttcctgcagaatgaccactgcctgggcagccacaagatgttccagaaggacaagagcgtcatccagctgcacctgcagaagagccgggaggcccctgggaagctgagcaggaagcatgaggaggaccacagccagttctacctgaaccagctgctggagttcatgcacatctggaaggtgtcccggcagtgcctgctgaccctcatcagaaaatatgacttccacctgaagtacctgctgaagacccaggagaatgtgtacaacatcatcgaggaggtgaagaagatctgcagcgtgctgggctgtgtggagaccaagcagatcacagatgctgtgaatgagctgagcctcatcctgcagaggaaaggagagaacttctaccagagcagcgagaccagcgccaagggcctgattgagaaggtgaccacagagctgagcaccagcatctaccagctgatcaacgtgtactgcaacagcttctatgctgacttccagcctgtgaatgtgccccgctgcaccagctacctgaaccctggcctgcccagccacctgtccttcaccgtgtatgctgcccacaacatccctgagacctgggtgcacagctacaaggccttctccttcacctgctggctgacctacgccggcaagaagctgtgccaggtgaggaactacagaaacatcccagacaagaagctgttcttcttcctggtgaactggaatgagaccatcaacttccccctggagatcaagagcctgccccgggagagcatgctgactgtgaagctgtttggcatcgcctgtgccaccaacaatgccaacctgctggcctggacctgcctgcccctcttccccaaggagaagagcatcctgggctccatgctgttctccatgaccctgcagagcgagccccctgtggagatgatcaccccaggagtgtgggatgtgtcccagcccagccctgtgaccctgcagattgacttccctgccaccggctgggagtacatgaagccagacagcgaggagaacagaagcaacctggaggagcccctgaaggagtgcatcaagcacatcgcccggctgagccagaagcagacccccctgctgctgtctgaggagaagaagcgctacctgtggttctaccgcttctactgcaacaatgaaaactgcagcctgcccctggtgctgggcagcgcccctggctgggatgagaggacagtgtctgagatgcacaccatcctgcggcgctggaccttcagccagcccctggaggccctgggcctgctgaccagcagcttcccagaccaggagatcaggaaggtggccgtgcagcagctggacaacctgctgaatgatgagctgctggagtacctgccccagctggtgcaggccgtgaagtttgagtggaacctggagagccccctggtgcagctgctgctgcacaggagcctgcagagcatccaggtggcccaccggctgtactggctgctgaagaatgcagaaaatgaggcctacttcaagtcctggtaccagaagctgctggccgccctgcagttctgtgccggcaaggccctgaatgatgagttcagcaaggagcagaagctgatcaagatcctgggggacatcggggagcgggtgaagagcgccagtgaccaccagaggcaggaggtgctgaagaaggagatcggccgcctggaggagttcttccaggatgtgaacacctgccacctgcccctgaacccagccctgtgcatcaagggcatcgaccatgatgcctgcagctacttcaccagcaatgccctgcccctgaagatcaccttcatcaatgccaaccccatgggcaagaacatcagcatcatcttcaaggctggagatgacctgcggcaggacatgctggtgctgcagctgatccaggtgatggacaacatctggctgcaggagggcctggacatgcagatgatcatctaccgctgcctgagcacaggcaaggaccagggcctggtgcagatggtgcctgatgctgtgaccctggccaagatccaccgccacagcggcctgattggccccctgaaggagaacaccatcaagaagtggttcagccagcacaaccacctgaaggctgactatgagaaggccctgaggaacttcttctacagctgtgccggctggtgtgtggtgaccttcatcctgggcgtgtgtgacagacacaatgacaacatcatgctgaccaagagcggccacatgttccacatcgactttgggaagttcctgggccacgcccagacctttggaggcatcaagagggaccgggcccccttcatcttcaccagcgagatggagtacttcatcacagagggcggcaagaacccccagcacttccaggactttgtggagctgtgctgccgggcctacaacatcatcaggaagcacagccagctgctgctgaacctgctggagatgatgctgtatgccggcctgcctgagctgagcggcatccaggacctgaagtatgtgtacaacaacctgcggccccaggacacagacctggaggccaccagccacttcaccaagaagatcaaggagagcctggagtgcttccctgtgaagctgaacaacctgatccacaccctggcccagatgtctgccatcagccctgccaagagcaccagccagaccttcccccaggagagctgcctgctgagcaccaccaggagcattgaaagagccaccatcctgggcttcagcaagaagagcagcaacctgtacctgatccaggtgacccacagcaacaatgagaccagcctgacagagaagagctttgagcagttcagcaagctgcacagccagctgcagaagcagtttgccagcctgaccctgcctgagttcccccactggtggcacctgcccttcaccaacagcgaccaccggcgcttccgggacctgaaccactacatggagcagatcctgaatgtgtcccatgaggtgaccaacagcgactgtgtgctgtccttcttcctgtctgaggccgtgcagcagacagtggaggagagcagccctgtgtacctgggggagaagttcccagacaagaagcccaaggtgcagctggtgatctcctatgaagatgtgaagctgaccatcctggtgaagcacatgaagaacatccacctgcctgatggcagcgcccccagcgcccacgtggagttctacctgctgccctaccccagcgaggtgagaagaaggaagaccaagtctgtgcccaagtgcacagaccccacctacaatgagatcgtggtgtatgatgaggtgacagagctgcagggccacgtgctgatgctgattgtgaagagcaagacagtgtttgtgggcgccatcaacatccggctgtgcagcgtgcccctggacaaggagaagtggtaccccctgggcaacagcatcatctag

SEQ ID NO: 164066 - DNA, 414 bp, synthetic construct
  misc_feature 1..414: note = Description of Artificial Sequence: Synthetic coding sequence
  source 1..414: mol_type = other DNA
atgaccatggagaccctgcccaaggtgctggaggtggatgagaagagccctgaggccaaggacctgctgcccagccagacagccagcagcctgtgcatcagcagccgctctgagagcgtgtggaccaccacccccaggagcaactgggagatctacaggaagcccatcgtcatcatgtctgtgggcggggccatcctgctgtttggagtggtgatcacctgcctggcctacaccctgaagctgagtgacaagagcctgagcatcctgaagatggtgggccctggcttcctgagcctgggcctgatgatgctggtgtgtggcctggtgtgggtgcccatcatcaagaagaagcagaagcaccggcagaagagcaacttcctgcggagcctgaagagcttcttcctgaccaggtag

SEQ ID NO: 164067 - DNA, 414 bp, synthetic construct; identical to SEQ ID NO: 164066
  misc_feature 1..414: note = Description of Artificial Sequence: Synthetic coding sequence
  source 1..414: mol_type = other DNA

SEQ ID NO: 164068 - DNA, 159 bp, synthetic construct
  misc_feature 1..159: note = Description of Artificial Sequence: Synthetic coding sequence
  source 1..159: mol_type = other DNA
atggagaaggtgcagtacctgaccaggtctgccatcagaagagccagcaccatcgagatgccccagcaggcccggcagaagctgcagaacctcttcatcaacttctgcctgatcctgatctgcctgctgctgatctgcatcatcgtgatgctgctgtag

SEQ ID NO: 164069 - DNA, 1371 bp, synthetic construct
  misc_feature 1..1371: note = Description of Artificial Sequence: Synthetic coding sequence
  source 1..1371: mol_type = other DNA
atgcctcctggcccctgggagagctgcttctgggtgggcggcctcatcctgtggctgtctgtgggcagcagtggagatgccccacccaccccccagcccaagtgtgccgacttccagagcgccaacctgtttgagggcacagacctgaaggtgcagttcctgctgtttgtgcccagcaaccccagctgtggccagctggtggagggcagcagtgacctgcagaacagcggcttcaatgccaccctgggcaccaagctgatcatccacggcttccgggtgctgggcaccaagcccagctggattgacaccttcatccgcaccctgctgcgggccaccaatgccaacgtgattgctgtggactggatctacggcagcactggagtgtacttctctgctgtgaagaatgtcatcaagctgagcctggagatcagcctcttcctgaacaagctgctggtgctgggcgtgtctgagagcagcatccacatcattggagtgtccctgggcgcccacgtgggcggcatggtgggccagctgtttggaggccagctgggccagatcaccggcctggaccctgctggccctgagtacacccgggcctctgtggaggagcggctggatgctggagatgccctgtttgtggaggccatccacacagacacagacaacctgggcatccgcatccctgtgggccacgtggactactttgtgaatggaggccaggaccagcccggctgccccaccttcttctacgccggctacagctacctgatctgtgaccacatgagagctgtgcacctgtacatcagcgccctggagaacagctgccccctgatggccttcccctgtgccagctacaaggccttcctggccggccgctgcctggactgcttcaaccccttcctgctgagctgccccagaattggcctggtggagcagggcggcgtgaagattgagcccctgcccaaggaggtgaaggtgtacctgctgaccaccagcagcgccccctactgcatgcaccacagcctggtggagttccacctgaaggagctgaggaacaaggacaccaacatcgaggtgaccttcctgagcagcaacatcaccagcagcagcaagatcaccatccccaagcagcagagatatggcaagggcatcatcgcccacgccaccccccagtgccagatcaaccaggtgaagttcaagttccagagcagcaacagagtgtggaagaaggacaggaccaccatcatcggcaagttctgcacagccctgctgcctgtgaatgaccgggagaagatggtgtgcctgcctgagcctgtgaacctgcaggcctctgtgacagtgtcctgtgacctgaagatcgcctgtgtgtag

SEQ ID NO: 164070 - DNA, 1323 bp, synthetic construct
  misc_feature 1..1323: note = Description of Artificial Sequence: Synthetic coding sequence
  source 1..1323: mol_type = other DNA
atgcctcctggcccctgggagagctgcttctgggtgggcggcctcatcctgtggctgtctgtgggcagcagtggagatgccccacccaccccccagcccaagtgtgccgacttccagagcgccaacctgtttgagggcacagacctgaaggtgcagttcctgctgtttgtgcccagcaaccccagctgtggccagctggtggagggcagcagtgacctgcagaacagcggcttcaatgccaccctgggcaccaagctgatcatccacggcttccgggtgctgggcaccaagcccagctggattgacaccttcatccgcaccctgctgcgggccaccaatgccaacgtgattgctgtggactggatctacggcagcactggagtgtacttctctgctgtgaagaatgtgctgggcgtgtctgagagcagcatccacatcattggagtgtccctgggcgcccacgtgggcggcatggtgggccagctgtttggaggccagctgggccagatcaccggcctggaccctgctggccctgagtacacccgggcctctgtggaggagcggctggatgctggagatgccctgtttgtggaggccatccacacagacacagacaacctgggcatccgcatccctgtgggccacgtggactactttgtgaatggaggccaggaccagcccggctgccccaccttcttctacgccggctacagctacctgatctgtgaccacatgagagctgtgcacctgtacatcagcgccctggagaacagctgccccctgatggccttcccctgtgccagctacaaggccttcctggccggccgctgcctggactgcttcaaccccttcctgctgagctgccccagaattggcctggtggagcagggcggcgtgaagattgagcccctgcccaaggaggtgaaggtgtacctgctgaccaccagcagcgccccctactgcatgcaccacagcctggtggagttccacctgaaggagctgaggaacaaggacaccaacatcgaggtgaccttcctgagcagcaacatcaccagcagcagcaagatcaccatccccaagcagcagagatatggcaagggcatcatcgcccacgccaccccccagtgccagatcaaccaggtgaagttcaagttccagagcagcaacagagtgtggaagaaggacaggaccaccatcatcggcaagttctgcacagccctgctgcctgtgaatgaccgggagaagatggtgtgcctgcctgagcctgtgaacctgcaggcctctgtgacagtgtcctgtgacctgaagatcgcctgtgtgtag

SEQ ID NO: 164071 - DNA, 852 bp, synthetic construct
  misc_feature 1..852: note = Description of Artificial Sequence: Synthetic coding sequence
  source 1..852: mol_type = other DNA
atggtgggccagctgtttggaggccagctgggccagatcaccggcctggaccctgctggccctgagtacacccgggcctctgtggaggagcggctggatgctggagatgccctgtttgtggaggccatccacacagacacagacaacctgggcatccgcatccctgtgggccacgtggactactttgtgaatggaggccaggaccagcccggctgccccaccttcttctacgccggctacagctacctgatctgtgaccacatgagagctgtgcacctgtacatcagcgccctggagaacagctgccccctgatggccttcccctgtgccagctacaaggccttcctggccggccgctgcctggactgcttcaaccccttcctgctgagctgcccccgcatcggcctggtggagcagggcggcgtgaagattgagcccctgcccaaggaggtgaaggtgtacctgctgaccaccagcagcgccccctactgcatgcaccacagcctggtggagttccacctgaaggagctgaggaacaaggacaccaacatcgaggtgaccttcctgagcagcaacatcaccagcagcagcaagatcaccatccccaagcagcagagatatggcaagggcatcatcgcccacgccaccccccagtgccagatcaaccaggtgaagttcaagttccagagcagcaacagagtgtggaagaaggacaggaccaccatcatcggcaagttctgcacagccctgctgcctgtgaatgaccgggagaagatggtgtgcctgcctgagcctgtgaacctgcaggcctctgtgacagtgtcctgtgacctgaagatcgcctgtgtgtag

SEQ ID NO: 164072 - DNA, 1656 bp, synthetic construct
  misc_feature 1..1656: note = Description of Artificial Sequence: Synthetic coding sequence
  source 1..1656: mol_type = other DNA
atgaggacccggccccggccccggctgcggaggacagagaacttcctgacagctgtgcaccacggcaagaaggaggagaaggctgctgtggagcggcggcggctgcacgtgctgaaggccctgaagaagctgcgcatcgaggctgatgaggcccctgtggtggccgtgctgggcagcggcggcggcctgcgggcccacatcgcctgcctgggcgtgctgtctgagatgaaggagcagggcctgctggatgctgtgacctacctggccggcgtgtctggcagcacctgggccatcagcagcctgtacaccaatgatggagacatggaggccctggaggccgacctgaagcaccgcttcacccggcaggagtgggacctggccaagagcctgcagaagaccatccaggccgcccggtctgagaactacagcctgacagacttctgggcctacatggtgatcagcaagcagacccgggagctgcctgagagccacctgagcaacatgaagaagcctgtggaggagggcaccctgccctaccccatctttgctgccatcgacaatgacctgcagcccagctggcaggaggcccgggcccctgagacctggtttgagttcaccccccaccacgccggcttcagcgccctgggcgcctttgtgtccatcacccacttcggcagcaagttcaagaagggccgcctggtgaggacccaccctgagcgggacctgaccttcctgcggggcctgtggggcagcgccctgggcaacacagaggtgatccgggagtacatctttgaccagctgaggaacctgaccctgaagggcctgtggaggagagctgtggccaatgccaagagcatcggccacctgatctttgcccggctgctgcggctgcaggagagcagccagggcgagcaccccccaccagaagatgagggcggggagcctgagcacacctggctgacagagatgctggagaactggaccaggaccagcctggagaagcaggagcagccccatgaggaccctgagaggaagggcagcctgagcaacctgatggactttgtgaagaagacaggcatctgtgccagcaagtgggagtggggcaccacccacaacttcctgtacaagcatggaggcatccgggacaagatcatgagcagcaggaagcacctgcacctggtggatgctggcctggccatcaacacccccttccccctggtgctgccccccacccgggaggtgcacctgatcctgagctttgacttctctgctggggacccctttgagaccatccgggccaccacagactactgcagaagacacaagatccccttcccccaggtggaggaggccgagctggacctgtggagcaaggccccagccagctgctacatcctgaagggggagaccggccctgtggtgatgcacttccccctcttcaacattgatgcctgtggcggggacatcgaggcctggagcgacacctatgacaccttcaagctggccgacacctacaccctggatgtggtggtgctgctgctggccctggccaagaagaatgtgcgggagaacaagaagaagatcctgcgggagctgatgaatgtggccggcctgtactaccccaaggacagcgcccggagctgctgcctggcctag

SEQ ID NO: 164073 - DNA, 4392 bp, synthetic construct
  misc_feature 1..4392: note = Description of Artificial Sequence: Synthetic coding sequence
  source 1..4392: mol_type = other DNA
atgctgctgagccccagcctgctgctgctgctgctgctgggcgccccccggggctgtgccgagggcgtggccgccgccctgaccccagagcggctgctggagtggcaggacaagggcatctttgtgatccagagcgagagcctgaagaagtgcatccaggccggcaagtctgtgctgaccctggagaactgcaagcaggccaacaagcacatgctgtggaagtgggtgagcaaccacggcctcttcaacatcggcggcagcggctgcctgggcctgaacttcagcgcccctgagcagcccctgagcctgtatgaatgtgacagcaccctggtgtccctgcgctggcgctgcaacaggaagatgatcaccggccccctgcagtacagcgtgcaggtggcccatgacaacacagtggtggccagcaggaagtacatccacaagtggatctcctatggcagcggcggcggggacatctgtgagtacctgcacaaggacctgcacaccatcaagggcaacacccacggcatgccctgcatgttccccttccagtacaaccaccagtggcaccatgaatgtacccgggagggccgggaggatgacctgctgtggtgtgccaccaccagccgctatgaaagagatgagaagtggggcttctgcccagaccccaccagcgctgaggtgggctgtgacaccatctgggagaaggacctgaacagccacatctgctaccagttcaacctgctgagcagcctgtcctggagcgaggcccacagcagctgccagatgcagggcggcaccctgctgagcatcacagatgaaacagaggagaacttcatccgggagcacatgagcagcaagacagtggaggtgtggatgggcctgaaccagctggatgagcacgccggctggcagtggagcgatggcacccccctgaactacctgaactggagccctgaggtgaactttgagccctttgtggaggaccactgcggcaccttcagcagcttcatgcccagcgcctggaggagccgggactgtgagagcaccctgccctacatctgcaagaagtacctgaaccacatcgaccatgaaattgtggagaaggatgcctggaagtactatgccacccactgtgagcccggctggaacccctacaacagaaactgctacaagctgcagaaggaggagaagacctggcatgaggccctgcggagctgccaggccgacaacagcgccctgattgacatcaccagcctggccgaggtggagttcctggtgaccctgctgggagatgaaaatgccagcgagacctggattggcctgagcagcaacaagatccctgtgtcctttgagtggagcaatgacagcagcgtcatcttcaccaactggcacaccctggagccccacatcttccccaacagaagccagctgtgtgtgtctgctgagcagagcgagggccactggaaggtgaagaactgtgaggagcggctcttctacatctgcaagaaggccggccacgtgctgagtgatgctgagagcggctgccaggagggctgggagcggcacggcggcttctgctacaagattgacacagtgctgcggagctttgaccaggccagcagcggctactactgccccccagccctggtgaccatcaccaacagatttgagcaggccttcatcaccagcctcatcagctctgtggtgaagatgaaggacagctacttctggatcgccctgcaggaccagaatgacaccggggagtacacctggaagcctgtgggccagaagccagagcctgtgcagtacacccactggaacacccaccagccccgctacagcggcggctgtgtggccatgaggggccgccaccccctgggccgctgggaggtgaagcactgccgccacttcaaggccatgagcctgtgcaagcagcctgtggagaaccaggagaaggccgagtatgaggagcgctggcccttccacccctgctacctggactgggagagcgagcccggcctggccagctgcttcaaggtgttccacagcgagaaggtgctgatgaagaggacctggagggaggccgaggccttctgtgaggagtttggagcccacctggccagctttgcccacatcgaggaggagaactttgtgaatgagctgctgcacagcaagttcaactggacagaggagcggcagttctggattggcttcaacaagaggaaccccctgaatgccggctcctgggagtggagcgacaggacccctgtggtgagcagcttcctggacaacacctactttggagaagatgccaggaactgtgctgtgtacaaggccaacaagaccctgctgcccctgcactgcggcagcaagcgggagtggatctgcaagatccccagagatgtgaagcccaagatccccttctggtaccagtatgatgtgccctggctgttctaccaggatgctgagtacctgttccacacctttgccagcgagtggctgaactttgaatttgtgtgctcctggctgcacagcgacctgctgaccatccacagcgcccacgagcaggagttcatccacagcaagatcaaggccctgagcaaatatggagcctcctggtggattggcctgcaggaggagcgggccaatgatgagttccgctggagagatggcacccctgtgatctaccagaactgggacaccggccgggagaggacagtgaacaaccagagccagagatgtggcttcatcagcagcatcaccggcctgtggggcagcgaggagtgcagcgtgtccatgcccagcatctgcaagaggaagaaggtgtggctgattgagaagaagaaggacacccccaagcagcacggcacctgccccaagggctggctgtacttcaactacaagtgcctgctgctgaacatccccaaggaccccagctcctggaagaactggacccacgcccagcacttctgtgccgaggagggcggcaccctggtggccattgaaagtgaggtggagcaggccttcatcaccatgaacctgtttggccagaccacctctgtgtggattggcctgcagaatgatgattatgagacctggctgaatggcaagcctgtggtgtacagcaactggagcccctttgacatcatcaacatccccagccacaacaccacagaggtgcagaagcacatccccctgtgtgccctgctgagcagcaaccccaacttccacttcaccgggaagtggtactttgaggactgtgggaaggagggctacggctttgtgtgtgagaagatgcaggacaccagcggccatggagtgaacaccagtgacatgtaccccatgcccaacaccctggagtatggcaacagaacctacaagatcatcaatgccaacatgacctggtatgctgccatcaagacctgcctgatgcacaaggcccagctggtgtccatcacagaccagtaccaccagagcttcctgactgtggtgctgaaccggctgggctacgcccactggattggcctcttcaccacagacaatggcctgaactttgactggagcgatggcaccaagagcagcttcaccttctggaaggatgaggagagcagcctgctgggggactgtgtgtttgctgacagcaatggccgctggcacagcacagcctgtgagagcttcctgcagggcgccatctgccacgtgcccccagagacccggcagagcgagcaccctgagctgtgcagcgagaccagcatcccctggatcaagttcaagagcaactgctacagcttcagcacagtgctggacagcatgagctttgaagctgcccacgagttctgcaagaaggagggcagcaacctgctgaccatcaaggatgaagcagaaaatgccttcctgctggaggagctgtttgccttcggcagctctgtgcagatggtgtggctgaatgcccagtttgatggcaacaatgagaccatcaagtggtttgatggcacccccacagaccagagcaactggggcatcaggaagccagacacagactacttcaagccccaccactgtgtggccctgcgcatccctgagggcctgtggcagctgagcccctgccaggagaagaagggcttcatctgcaagatggaggccgacatccacacagctgaggccctgcctgagaagggccccagccacagcatcatccccctggccgtggtgctgaccctcatcgtcatcgtggccatctgcaccctgtccttctgcatctacaagcacaacggcggcttcttccggcggctggccggcttcaggaacccctactacccagccaccaacttcagcacagtgtacctggaggagaacatcctgatcagtgacctggagaagagtgaccagtag

SEQ ID NO: 164074 - DNA, 3975 bp, synthetic construct
  misc_feature 1..3975: note = Description of Artificial Sequence: Synthetic coding sequence
  source 1..3975: mol_type = other DNA
atgctgctgagccccagcctgctgctgctgctgctgctgggcgccccccggggctgtgccgagggcgtggccgccgccctgaccccagagcggctgctggagtggcaggacaagggcatctttgtgatccagagcgagagcctgaagaagtgcatccaggccggcaagtctgtgctgaccctggagaactgcaagcaggccaacaagcacatgctgtggaagtgggtgagcaaccacggcctcttcaacatcggcggcagcggctgcctgggcctgaacttcagcgcccctgagcagcccctgagcctgtatgaatgtgacagcaccctggtgtccctgcgctggcgctgcaacaggaagatgatcaccggccccctgcagtacagcgtgcaggtggcccatgacaacacagtggtggccagcaggaagtacatccacaagtggatctcctatggcagcggcggcggggacatctgtgagtacctgcacaaggacctgcacaccatcaagggcaacacccacggcatgccctgcatgttccccttccagtacaaccaccagtggcaccatgaatgtacccgggagggccgggaggatgacctgctgtggtgtgccaccaccagccgctatgaaagagatgagaagtggggcttctgcccagaccccaccagcgctgaggtgggctgtgacaccatctgggagaaggacctgaacagccacatctgctaccagttcaacctgctgagcagcctgtcctggagcgaggcccacagcagctgccagatgcagggcggcaccctgctgagcatcacagatgaaacagaggagaacttcatccgggagcacatgagcagcaagacagtggaggtgtggatgggcctgaaccagctggatgagcacgccggctggcagtggagcgatggcacccccctgaactacctgaactggagccctgaggtgaactttgagccctttgtggaggaccactgcggcaccttcagcagcttcatgcccagcgcctggaggagccgggactgtgagagcaccctgccctacatctgcaagaagtacctgaaccacatcgaccatgaaattgtggagaaggatgcctggaagtactatgccacccactgtgagcccggctggaacccctacaacagaaactgctacaagctgcagaaggaggagaagacctggcatgaggccctgcggagctgccaggccgacaacagcgccctgattgacatcaccagcctggccgaggtggagttcctggtgaccctgctgggagatgaaaatgccagcgagacctggattggcctgagcagcaacaagatccctgtgtcctttgagtggagcaatgacagcagcgtcatcttcaccaactggcacaccctggagccccacatcttccccaacagaagccagctgtgtgtgtctgctgagcagagcgagggccactggaaggtgaagaactgtgaggagcggctcttctacatctgcaagaaggccggccacgtgctgagtgatgctgagagcggctgccaggagggctgggagcggcacggcggcttctgctacaagattgacacagtgctgcggagctttgaccaggccagcagcggctactactgccccccagccctggtgaccatcaccaacagatttgagcaggccttcatcaccagcctcatcagctctgtggtgaagatgaaggacagctacttctggatcgccctgcaggaccagaatgacaccggggagtacacctggaagcctgtgggccagaagccagagcctgtgcagtacacccactggaacacccaccagccccgctacagcggcggctgtgtggccatgaggggccgccaccccctgggccgctgggaggtgaagcactgccgccacttcaaggccatgagcctgtgcaagcagcctgtggagaaccaggagaaggccgagtatgaggagcgctggcccttccacccctgctacctggactgggagagcgagcccggcctggccagctgcttcaaggtgttccacagcgagaaggtgctgatgaagaggacctggagggaggccgaggccttctgtgaggagtttggagcccacctggccagctttgcccacatcgaggaggagaactttgtgaatgagctgctgcacagcaagttcaactggacagaggagcggcagttctggattggcttcaacaagaggaaccccctgaatgccggctcctgggagtggagcgacaggacccctgtggtgagcagcttcctggacaacacctactttggagaagatgccaggaactgtgctgtgtacaaggccaacaagaccctgctgcccctgcactgcggcagcaagcgggagtggatctgcaagatccccagagatgtgaagcccaagatccccttctggtaccagtatgatgtgccctggctgttctaccaggatgctgagtacctgttccacacctttgccagcgagtggctgaactttgaatttgtgtgctcctggctgcacagcgacctgctgaccatccacagcgcccacgagcaggagttcatccacagcaagatcaaggccctgagcaaatatggagcctcctggtggattggcctgcaggaggagcgggccaatgatgagttccgctggagagatggcacccctgtgatctaccagaactgggacaccggccgggagaggacagtgaacaaccagagccagagatgtggcttcatcagcagcatcaccggcctgtggggcagcgaggagtgcagcgtgtccatgcccagcatctgcaagaggaagaaggtgtggctgattgagaagaagaaggacacccccaagcagcacggcacctgccccaagggctggctgtacttcaactacaagtgcctgctgctgaacatccccaaggaccccagctcctggaagaactggacccacgcccagcacttctgtgccgaggagggcggcaccctggtggccattgaaagtgaggtggagcaggccttcatcaccatgaacctgtttggccagaccacctctgtgtggattggcctgcagaatgatgattatgagacctggctgaatggcaagcctgtggtgtacagcaactggagcccctttgacatcatcaacatccccagccacaacaccacagaggtgcagaagcacatccccctgtgtgccctgctgagcagcaaccccaacttccacttcaccgggaagtggtactttgaggactgtgggaaggagggctacggctttgtgtgtgagaagatgcaggacaccagcggccatggagtgaacaccagtgacatgtaccccatgcccaacaccctggagtatggcaacagaacctacaagatcatcaatgccaacatgacctggtatgctgccatcaagacctgcctgatgcacaaggcccagctggtgtccatcacagaccagtaccaccagagcttcctgactgtggtgctgaaccggctgggctacgcccactggattggcctcttcaccacagacaatggcctgaactttgactggagcgatggcaccaagagcagcttcaccttctggaaggatgaggagagcagcctgctgggggactgtgtgtttgctgacagcaatggccgctggcacagcacagcctgtgagagcttcctgcagggcgccatctgccacgtgcccccagagacccggcagagcgagcaccctgagctgtgcagcgagaccagcatcccctggatcaagttcaagagcaactgctacagcttcagcacagtgctggacagcatgagctttgaagctgcccacgagttctgcaagaaggagggcagcaacctgctgaccatcaaggatgaagcagaaaatgccttcctgctggaggagctgtttgccttcggcagctctgtgcagatggtgtggctgaatgcccagtttgatggcaacagcaagtag

SEQ ID NO: 164075 - DNA, 1584 bp, synthetic construct
  misc_feature 1..1584: note = Description of Artificial Sequence: Synthetic coding sequence
  source 1..1584: mol_type = other DNA
atgggcagcagcgaggtgtccatcatccctggcctgcagaaggaggagaaggctgctgtggagcggcggcggctgcacgtgctgaaggccctgaagaagctgcgcatcgaggctgatgaggcccctgtggtggccgtgctgggcagcggcggcggcctgcgggcccacatcgcctgcctgggcgtgctgtctgagatgaaggagcagggcctgctggatgctgtgacctacctggccggcgtgtctggcagcacctgggccatcagcagcctgtacaccaatgatggagacatggaggccctggaggccgacctgaagcaccgcttcacccggcaggagtgggacctggccaagagcctgcagaagaccatccaggccgcccggtctgagaactacagcctgacagacttctgggcctacatggtgatcagcaagcagacccgggagctgcctgagagccacctgagcaacatgaagaagcctgtggaggagggcaccctgccctaccccatctttgctgccatcgacaatgacctgcagcccagctggcaggaggcccgggcccctgagacctggtttgagttcaccccccaccacgccggcttcagcgccctgggcgcctttgtgtccatcacccacttcggcagcaagttcaagaagggccgcctggtgaggacccaccctgagcgggacctgaccttcctgcggggcctgtggggcagcgccctgggcaacacagaggtgatccgggagtacatctttgaccagctgaggaacctgaccctgaagggcctgtggaggagagctgtggccaatgccaagagcatcggccacctgatctttgcccggctgctgcggctgcaggagagcagccagggcgagcaccccccaccagaagatgagggcggggagcctgagcacacctggctgacagagatgctggagaactggaccaggaccagcctggagaagcaggagcagccccatgaggaccctgagaggaagggcagcctgagcaacctgatggactttgtgaagaagacaggcatctgtgccagcaagtgggagtggggcaccacccacaacttcctgtacaagcatggaggcatccgggacaagatcatgagcagcaggaagcacctgcacctggtggatgctggcctggccatcaacacccccttccccctggtgctgccccccacccgggaggtgcacctgatcctgagctttgacttctctgctggggacccctttgagaccatccgggccaccacagactactgcagaagacacaagatccccttcccccaggtggaggaggccgagctggacctgtggagcaaggccccagccagctgctacatcctgaagggggagaccggccctgtggtgatgcacttccccctcttcaacattgatgcctgtggcggggacatcgaggcctggagcgacacctatgacaccttcaagctggccgacacctacaccctggatgtggtggtgctgctgctggccctggccaagaagaatgtgcgggagaacaagaagaagatcctgcgggagctgatgaatgtggccggctag

SEQ ID NO: 164076 - DNA, 1626 bp, synthetic construct
  misc_feature 1..1626: note = Description of Artificial Sequence: Synthetic coding sequence
  source 1..1626: mol_type = other DNA
atgggcagcagcgaggtgtccatcatccctggcctgcagaaggaggagaaggctgctgtggagcggcggcggctgcacgtgctgaaggccctgaagaagctgcgcatcgaggctgatgaggcccctgtggtggccgtgctgggcagcggcggcggcctgcgggcccacatcgcctgcctgggcgtgctgtctgagatgaaggagcagggcctgctggatgctgtgacctacctggccggcgtgtctggcagcacctgggccatcagcagcctgtacaccaatgatggagacatggaggccctggaggccgacctgaagcaccgcttcacccggcaggagtgggacctggccaagagcctgcagaagaccatccaggccgcccggtctgagaactacagcctgacagacttctgggcctacatggtgatcagcaagcagacccgggagctgcctgagagccacctgagcaacatgaagaagcctgtggaggagggcaccctgccctaccccatctttgctgccatcgacaatgacctgcagcccagctggcaggaggcccgggcccctgagacctggtttgagttcaccccccaccacgccggcttcagcgccctgggcgcctttgtgtccatcacccacttcggcagcaagttcaagaagggccgcctggtgaggacccaccctgagcgggacctgaccttcctgcggggcctgtggggcagcgccctgggcaacacagaggtgatccgggagtacatctttgaccagctgaggaacctgaccctgaagggcctgtggaggagagctgtggccaatgccaagagcatcggccacctgatctttgcccggctgctgcggctgcaggagagcagccagggcgagcaccccccaccagaagatgagggcggggagcctgagcacacctggctgacagagatgctggagaactggaccaggaccagcctggagaagcaggagcagccccatgaggaccctgagaggaagggcagcctgagcaacctgatggactttgtgaagaagacaggcatctgtgccagcaagtgggagtggggcaccacccacaacttcctgtacaagcatggaggcatccgggacaagatcatgagcagcaggaagcacctgcacctggtggatgctggcctggccatcaacacccccttccccctggtgctgccccccacccgggaggtgcacctgatcctgagctttgacttctctgctggggacccctttgagaccatccgggccaccacagactactgcagaagacacaagatccccttcccccaggtggaggaggccgagctggacctgtggagcaaggccccagccagctgctacatcctgaagggggagaccggccctgtggtgatgcacttccccctcttcaacattgatgcctgtggcggggacatcgaggcctggagcgacacctatgacaccttcaagctggccgacacctacaccctggatgtggtggtgctgctgctggccctggccaagaagaatgtgcgggagaacaagaagaagatcctgcgggagctgatgaatgtggccggcctgtactaccccaaggacagcgcccggagctgctgcctggcctag

SEQ ID NO: 164077 - DNA, 2457 bp, synthetic construct
  misc_feature 1..2457: note = Description of Artificial Sequence: Synthetic coding sequence
  source 1..2457: mol_type = other DNA
atggagagcctgagccctgggggccccccaggccacccctaccagggcgaggccagcacctgctggcagctgactgtgcgggtgctggaggccaggaacctgcgctgggccgacctgctgtctgaggccgacccctacgtgatcctgcagctgagcacagcccctggcatgaagttcaagaccaagaccctgacagacaccagccaccctgtgtggaatgaggccttccgcttcctgatccagagccaggtgaagaatgtgctggagctgagcatctatgatgaagattctgtgacagaagatgacatctgcttcaaggtgctgtatgacatcagcgaggtgctgcccgggaagctgctgaggaagaccttcagccagagcccccagggcgaggaggagctggatgtggagttcctgatggaggagaccagtgacaggcctgagaacctgatcaccaacaaggtgattgtggcccgggagctgagctgcctggatgtgcacctggacagcacaggcagcacagctgtggtggccgaccaggacaagctggagctggagctggtgctgaagggcagctatgaggacacccagaccagcttcctgggcacagccagcgccttccgcttccactacatggccgccctggagacagagctgagcggccgcctgcggagcagccgcagcaatggctggaatggagacaacagcgctggctacctgactgtgcccctgcggcccctgaccatcggcaaggaggtgaccatggatgtgcctgccccaaatgcccctggggtgcggctgcagctgaaggccgagggctgcccagaggagctggccgtgcacctgggcttcaacctgtgtgccgaggagcaggccttcctgagcaggaggaagcaggtggtggccaaggccctgaagcaggccctgcagctggaccgggacctgcaggaggatgaggtgcctgtggtgggcatcatggccaccggcggcggggcccgggccatgaccagcctgtatggccacctgctggccctgcagaagctgggcctgctggactgtgtgacctacttcagcggcatcagcggcagcacctggaccatggcccacctgtatggagaccctgagtggagccagagggacctggagggccccatccgctatgcccgggagcacctggccaagagcaagctggaggtgttcagccctgagcggctggccagctacagaagagagctggagctgcgggcagagcagggccaccccaccacctttgtggacctgtgggccctggtgctggagagcatgctgcacggccaggtgatggaccagaagctgagcggccagagagctgccctggagcggggccagaaccccctgcccctgtacctgagcctgaatgtgaaggagaacaacctggagaccctggacttcaaggagtgggtggagttcagcccctatgaggtgggcttcctgaagtatggagcctttgtgcccccagagctgtttggcagcgagttcttcatgggccgcctgatgaggcgcatccctgagccccgcatctgcttcctggaggccatctggagcaacatcttcagcctgaacctgctggatgcctggtatgacctgaccagcagtggagagagctggaagcagcacatcaaggacaagaccaggagcctggagaaggagcccctgaccaccagcggcaccagcagccggctggaggcctcctggctgcagcctggaacagccctggcccaggccttcaagggcttcctgaccggccggcccctgcaccagaggagccccaacttcctgcagggcctgcagctgcaccaggactactgcagccacaaggacttcagcacctgggccgactaccagctggacagcatgcccagccagctgacccccaaggagccccggctgtgcctggtggatgctgcctacttcatcaacaccagcagccccagcatgttccggcccggccggcggctggacctgatcctgagctttgactacagcctgagcgccccctttgaggccctgcagcagacagagctgtactgccgggcccggggcctgcccttcccccgggtggagcccagcccccaggaccagcaccagccccgggagtgccacctgttcagtgaccctgcctgcccagaggcccccatcctgctgcacttccccctggtgaatgccagcttcaaggaccacagcgcccctggggtgcagaggagccctgctgagctgcagggcggccaggtggacctgaccggggccacctgcccctacaccctgagcaacatgacctacaaggaggaggactttgagcggctgctgcggctgagtgactacaacgtgcagaccagccagggcgccatcctgcaggccctgaggacagccctgaagcacaggaccctggaggcccggcccccccgggcccagacctag

SEQ ID NO: 164078 - DNA, 1326 bp, synthetic construct
  misc_feature 1..1326: note = Description of Artificial Sequence: Synthetic coding sequence
  source 1..1326: mol_type = other DNA
atggtgccccccaagctgcacgtgctcttctgcctgtgtggctgcctggccgtggtgtacccctttgactggcagtacatcaaccctgtggcccacatgaagagcagcgcctgggtgaacaagatccaggtgctgatggccgccgccagctttggccagaccaagatccccagaggaaatggcccctacagcgtgggctgcacagacctgatgtttgaccacaccaacaagggcaccttcctgcggctgtactaccccagccaggacaatgaccggctggacaccctgtggatccccaacaaggagtacttctggggcctgagcaagttcctgggcacccactggctgatgggcaacatcctgcggctgctgtttggctccatgaccaccccagccaactggaacagccccctgcggcctggagagaagtaccccctggtggtgttcagccacggcctgggcgccttccgcaccctgtacagcgccatcggcatcgacctggccagccacggcttcatcgtggccgctgtggagcaccgggacagaagtgccagcgccacctactacttcaaggaccagagcgctgctgagatcggggacaagtcctggctgtacctgcggaccctgaagcaggaggaggagacccacatcagaaatgagcaggtgcggcagagggccaaggagtgcagccaggccctgagcctcatcctggacatcgaccacggcaagcctgtgaagaatgccctggacctgaagtttgacatggagcagctgaaggacagcattgaccgggagaagattgctgtgattggccacagctttggaggagccaccgtcatccagaccctgtctgaggaccagcgcttccgctgtggcatcgccctggatgcctggatgttccccctgggagatgaggtgtacagccgcatcccccagcccctcttcttcatcaacagcgagtacttccagtacccagccaacatcatcaagatgaagaagtgctacagcccagacaaggagaggaagatgatcaccatccggggctctgtgcaccagaactttgctgacttcacctttgccaccgggaagatcatcggccacatgctgaagctgaagggggacatcgacagcaatgtggccatcgacctgagcaacaaggccagcctggccttcctgcagaagcacctgggcctgcacaaggactttgaccagtgggactgcctgattgaaggagatgatgagaacctgatccctggcaccaacatcaacaccaccaaccagcacatcatgctgcagaacagcagcggcatcgagaagtacaactag

SEQ ID NO: 164079 - DNA, 1326 bp, synthetic construct; identical to SEQ ID NO: 164078
  misc_feature 1..1326: note = Description of Artificial Sequence: Synthetic coding sequence
  source 1..1326: mol_type = other DNA

SEQ ID NO: 164080 - DNA, 660 bp, synthetic construct
  misc_feature 1..660: note = Description of Artificial Sequence: Synthetic coding sequence
  source 1..660: mol_type = other DNA
atggctgctgccagctttggccagaccaagatccccagaggaaatggcccctacagcgtgggctgcacagacctgatgtttgaccacaccaacaagggcaccttcctgcggctgtactaccccagccaggacaatgaccggctggacaccctgtggatccccaacaaggagtacttctggggcctgagcaagttcctgggcacccactggctgatgggcaacatcctgcggctgctgtttggctccatgaccaccccagccaactggaacagccccctgcggcctggagagaagtaccccctggtggtgttcagccacggcctgggcgccttccgcaccctgtacagcgccatcggcatcgacctggccagccacggcttcatcgtggccgctgtggagcaccgggacagaagtgccagcgccacctactacttcaaggaccagagcgctgctgagattggagacaagtcctggctgtacctgcggaccctgaagcaggaggaggagacccacatcagaaatgagcaggtgcggcagagggccaaggaatgttcccaggccctgagcctcatcctggacatcgaccacggcaagcctgtgaagaatgccctggacctgaagtttgacatggagcagctgaaggtgtcctacaagaagtag

SEQ ID NO: 164081 - DNA, 414 bp, synthetic construct
  misc_feature 1..414: note = Description of Artificial Sequence: Synthetic coding sequence
  source 1..414: mol_type = other DNA
atgaccaccccagccaactggaacagccccctgcggcctggagagaagtaccccctggtggtgttcagccacggcctgggcgccttccgcaccctgtacagcgccatcggcatcgacctggccagccacggcttcatcgtggccgctgtggagcaccgggacagaagtgccagcgccacctactacttcaaggaccagagcgctgctgagattggagacaagtcctggctgtacctgcggaccctgaagcaggaggaggagacccacatcagaaatgagcaggtgcggcagagggccaaggaatgttcccaggccctgagcctcatcctggacatcgaccacggcaagcctgtgaagaatgccctggacctgaagtttgacatggagcagctgaaggtgtcctacaagaagtag

SEQ ID NO: 164082 - DNA, 489 bp, synthetic construct
  misc_feature 1..489: note = Description of Artificial Sequence: Synthetic coding sequence
  source 1..489: mol_type = other DNA
atgagggcccccatccctgagcccaagccaggggacctgattgagatcttccggcccttctaccgccactgggccatctacgtgggagatggctacgtggtgcacctggccccacccagcgaggtggccggggccggggccgcctctgtgatgtctgccctgacagacaaggccatcgtgaagaaggagctgctgtatgatgtggccggcagtgacaagtaccaggtgaacaacaagcatgatgacaagtacagccccctgccctgcagcaagatcatccagagagctgaggagctggtgggccaggaggtgctgtacaagctgaccagcgagaactgtgagcactttgtgaatgagctgcgctatggagtggcccggagtgaccaggtgagagatgtgatcatcgccgcctctgtggccggcatgggcctggccgccatgagcctcatcggcgtgatgttcagcaggaacaagaggcagaagcagtag

SEQ ID NO: 164083 - DNA, 489 bp, synthetic construct; identical to SEQ ID NO: 164082
  misc_feature 1..489: note = Description of Artificial Sequence: Synthetic coding sequence
  source 1..489: mol_type = other DNA

SEQ ID NO: 164084 - DNA, 4377 bp, synthetic construct
  misc_feature 1..4377: note = Description of Artificial Sequence: Synthetic coding sequence
  source 1..4377: mol_type = other DNA
atgggcctgcggcccggcatcttcctgctggagctgctgctgctgctgggccagggcaccccccagatccacaccagccccaggaagagcaccctggagggccagctgtggccagagaccctgaagaacagccccttcccctgcaaccccaacaagctgggcgtgaacatgcccagcaagtctgtgcacagcctgaagcccagcgacatcaagtttgtggccgccatcggcaacctggagatccccccagaccccggcactggagacctggagaagcaggactggacagagcggccccagcaggtgtgcatgggcgtgatgacagtgctgagtgacatcatccgctacttcagccccagcgtgcccatgcctgtgtgccacacaggcaagagggtcatcccccatgatggagctgaggacctgtggatccaggcccaggagctggtgaggaacatgaaggagaacctgcagctggacttccagtttgactggaagctgatcaacgtgttcttcagcaatgccagccagtgctacctgtgccccagcgcccagcagaatggcctggccgccggcggcgtggatgagctgatgggcgtgctggactacctgcagcaggaggtgccccgggcctttgtgaacctggtggacctgtctgaggtggccgaggtgtcccggcagtaccacggcacctggctgagccctgcccctgagccctgcaactgcagcgaggagaccacccggctggccaaggtggtgatgcagtggagctaccaggaggcctggaacagcctgctggccagcagccgctacagcgagcaggagagcttcaccgtggtgttccagcccttcttctatgagaccacccccagcctgcacagcgaggacccccggctgcaggacagcaccaccctggcctggcacctgtggaacaggatgatggagcctgctggggagaaggatgagcccctgtctgtgaagcacggccggcccatgaagtgccccagccaggagagcccctacctgttctcctacagaaacagcaactacctgacccggctgcagaagccccaggacaagctggaggtgcgggagggcgctgagatccgctgcccagacaaggaccccagcgacacagtgcccacctctgtgcaccggctgaagccagctgacatcaacgtcatcggggccctgggggacagcctgacagctggaaatggagctggcagcaccccaggaaatgtgctggatgtgctgacccagtaccggggcctgtcctggagcgtgggcggagatgagaacatcggcaccgtgaccaccctggccaacatcctgcgggagttcaaccccagcctgaagggcttctctgtgggcaccgggaaggagaccagccccaatgccttcctgaaccaggccgtggccggcggccgggcagaggacctgcctgtgcaggcccggcggctggtggacctgatgaagaatgacacccgcatccacttccaggaggactggaagatcatcaccctcttcatcggcggcaatgacctgtgtgacttctgcaatgacctggtgcactacagcccccagaacttcacagacaacatcggcaaggccctggacatcctgcatgctgaggtgccccgggcctttgtgaacctggtgacagtgctggagatcgtgaacctgcgggagctgtaccaggagaagaaggtgtactgccccaggatgatcctgcggagcctgtgcccctgtgtgctgaagtttgatgacaacagcacagagctggccaccctcatcgagttcaacaagaagttccaggagaagacccaccagctgattgagagcggccgctatgacacccgggaggacttcaccgtggtggtgcagcccttctttgaaaatgtggacatgcccaagaccagcgagggcctgcctgacaacagcttctttgccccagactgcttccacttcagcagcaagagccacagccgggccgccagcgccctgtggaacaacatgctggagcctgtgggccagaagaccaccaggcacaagtttgagaacaagatcaacatcacctgccccaaccaggtgcagcccttcctgcggacctacaagaacagcatgcagggccacggcacctggctgccctgccgggaccgggcccccagcgccctgcaccccacctctgtgcacgccctgcggcctgctgacatccaggtggtggccgccctgggggacagcctgacagctggaaatggcatcggcagcaagccagatgacctgcctgatgtgaccacccagtaccggggcctgagctacagcgctggaggagatggcagcctggagaatgtgaccaccctgcccaacatcctgcgggagttcaacagaaacctgaccggctatgctgtgggcactggagatgccaatgacaccaatgccttcctgaaccaggccgtgcctggggccaaggccgaggacctgatgagccaggtgcagaccctgatgcagaagatgaaggatgaccaccgggtgaacttccacgaggactggaaggtgatcaccgtgctgattggaggcagtgacctgtgtgactactgcacagacagcaacctgtacagcgctgccaactttgtgcaccacctgagaaatgccctggatgtgctgcaccgggaggtgccccgggtgctggtgaacctggtggacttcctgaaccccaccatcatgaggcaggtgttcctgggcaacccagacaagtgccctgtgcagcaggcctctgtgctgtgcaactgtgtgctgaccctgcgggagaacagccaggagctggcccggctggaggccttcagccgggcctaccgcagctccatgagggagctggtgggcagcggccgctatgacacccaggaggacttctctgtggtgctgcagcccttcttccagaacatccagctgcctgtgctggctgatggcctgcctgacaccagcttctttgccccagactgcatccaccccaaccagaagttccacagccagctggcccgggccctgtggaccaacatgctggagcccctgggcagcaagacagagaccctggacctgcgggcagagatgcccatcacctgccccacccagaatgagcccttcctgcggacccccaggaacagcaactacacctaccccatcaagccagccatcgagaactggggcagtgacttcctgtgcacagagtggaaggccagcaacagcgtgcccacctctgtgcaccagctgcggcctgctgacatcaaggtggtggccgccctgggggacagcctgaccacagctgtgggcgcccggcccaacaacagcagtgacctgcccacctcctggaggggcctgtcctggagcattggaggagatggcaacctggagacccacaccaccctgcccaacatcctgaagaagttcaacccctacctgctgggcttcagcaccagcacctgggagggcacagctggcctgaatgtggccgctgagggcgcccgggcccgggacatgcctgcccaggcctgggacctggtggagaggatgaagaacagcccagacatcaacctggagaaggactggaagctggtgaccctcttcatcggcgtgaatgacctgtgccactactgtgagaaccctgaggcccacctggccacagaatatgtgcagcacatccagcaggccctggacatcctgtctgaggagctgccccgggcctttgtgaatgtggtggaggtgatggagctggccagcctgtaccagggccagggcggcaaatgtgccatgctggccgcccagaacaactgcacctgcctgcggcacagccagagcagcctggagaagcaggagctgaagaaggtgaactggaacctgcagcacggcatcagcagcttctcctactggcaccagtacacccagagagaagattttgctgtggtggtgcagcccttcttccagaacaccctgacccccctgaatgaaagaggagacacagacctgaccttcttcagcgaggactgcttccacttcagtgaccggggccacgccgagatggccatcgccctgtggaacaacatgctggagcctgtgggcaggaagaccaccagcaacaacttcacccacagccgggccaagctgaagtgccccagccctgagagcccctacctgtacaccctgaggaacagccggctgctgcctgaccaggccgaggaggcccctgaggtgctgtactgggccgtgcctgtggccgccggcgtgggcctggtggtgggcatcattggaacagtggtgtggcgctgcagaagaggaggaagaagagaagatcctcccatgagcctgaggacagtggccctgtag

SEQ ID NO: 164085 - DNA, 1467 bp, synthetic construct
  misc_feature 1..1467: note = Description of Artificial Sequence: Synthetic coding sequence
  source 1..1467: mol_type = other DNA
atggagcctgctggggagaaggatgagcccctgtctgtgaagcacggccggcccatgaagtgccccagccaggagagcccctacctgttctcctacagaaacagcaactacctgacccggctgcagaagccccaggacaagctggaggtgcgggagggcgctgagatccgctgcccagacaaggaccccagcgacacagtgcccacctctgtgcaccggctgaagccagctgacatcaacgtcatcggggccctgggggacagcctgacagctggaaatggagctggcagcaccccaggaaatgtgctggatgtgctgacccagtaccggggcctgtcctggagcgtgggcggagatgagaacatcggcaccgtgaccaccctggccaacatcctgcgggagttcaaccccagcctgaagggcttctctgtgggcaccgggaaggagaccagccccaatgccttcctgaaccaggccgtggccggcggccgggcagaggacctgcctgtgcaggcccggcggctggtggacctgatgaagaatgacacccgcatccacttccaggaggactggaagatcatcaccctcttcatcggcggcaatgacctgtgtgacttctgcaatgacctggtgcactacagcccccagaacttcacagacaacatcggcaaggccctggacatcctgcatgctgaggtgccccgggcctttgtgaacctggtgacagtgctggagatcgtgaacctgcgggagctgtaccaggagaagaaggtgtactgccccaggatgatcctgcggagcctgtgcccctgtgtgctgaagtttgatgacaacagcacagagctggccaccctcatcgagttcaacaagaagttccaggagaagacccaccagctgattgagagcggccgctatgacacccgggaggacttcaccgtggtggtgcagcccttctttgaaaatgtggacatgcccaagaccagcgagggcctgcctgacaacagcttctttgccccagactgcttccacttcagcagcaagagccacagccgggccgccagcgccctgtggaacaacatgctggagcctgtgggccagaagaccaccaggcacaagtttgagaacaagatcaacatcacctgccccaaccaggtgcagcccttcctgcggacctacaagaacagcatgcagggccacggcacctggctgccctgccgggaccgggcccccagcgccctgcaccccacctctgtgcacgccctgcggcctgctgacatccaggtggtggccgccctgggggacagcctgacagctggaaatggcatcggcagcaagccagatgacctgcctgatgtgaccacccagtaccggggcctgagctaccgggagagcaagccaggcttcctgagtgacagctgggtgtccaagagcaacaggaagtgcaccaggaaggcccccaacccctag

SEQ ID NO: 164086 - DNA, 4344 bp, synthetic construct
  misc_feature 1..4344: note = Description of Artificial Sequence: Synthetic coding sequence
  source 1..4344: mol_type = other DNA
atgggcctgcggcccggcatcttcctgctggagctgctgctgctgctgggccagggcaccccccagatccacaccagccccaggaagagcaccctggagggccagctgtggccagagaccctgaagaacagccccttcccctgcaaccccaacaagctgggcgtgaacatgcccagcaagtctgtgcacagcctgaagcccagcgacatcaagtttgtggccgccatcggcaacctggagatccccccagaccccggcactggagacctggagaagcaggactggacagagcggccccagcaggtgtgcatgggcgtgatgacagtgctgagtgacatcatccgctacttcagccccagcgtgcccatgcctgtgtgccacacaggcaagagggtcatcccccatgatggagctgaggacctgtggatccaggcccaggagctggtgaggaacatgaaggagaacctgcagctggacttccagtttgactggaagctgatcaacgtgttcttcagcaatgccagccagtgctacctgtgccccagcgcccagcaggcccccagcctgagcacagtgctgctgagccagaatggcctggccgccggcggcgtggatgagctgatgggcgtgctggactacctgcagcaggaggtgccccgggcctttgtgaacctggtggacctgtctgaggtggccgaggtgtcccggcagtaccacggcacctggctgagccctgcccctgagccctgcaactgcagcgaggagaccacccggctggccaaggtggtgatgcagtggagctaccaggaggcctggaacagcctgctggccagcagccgctacagcgagcaggagagcttcaccgtggtgttccagcccttcttctatgagaccacccccagcctgcacagcgaggacccccggctgcaggacagcaccaccctggcctggcacctgtggaacaggatgatggagcctgctggggagaaggatgagcccctgtctgtgaagcacggccggcccatgaagtgccccagccaggagagcccctacctgttctcctacagaaacagcaactacctgacccggctgcagaagccccaggacaagctggaggtgcgggagggcgctgagatccgctgcccagacaaggaccccagcgacacagtgcccacctctgtgcaccggctgaagccagctgacatcaacgtgattggagccctgggggacagcctgacagctggaaatggagctggcagcaccccaggaaatgtgctggatgtgctgacccagtaccggggcctgtcctggagcgtgggcggagatgaaaatattggaacagtgaccaccctggccaacatcctgcgggagttcaaccccagcctgaagggcttctctgtgggcaccgggaaggagaccagccccaatgccttcctgaaccaggccgtggccggcggccgggcagaggacctgcctgtgcaggcccggcggctggtggacctgatgaagaatgacacccgcatccacttccaggaggactggaagatcatcaccctcttcatcggcggcaatgacctgtgtgacttctgcaatgacctggtgccccgggcctttgtgaacctggtgacagtgctggagatcgtgaacctgcgggagctgtaccaggagaagaaggtgtactgccccaggatgatcctgcggagcctgtgcccctgtgtgctgaagtttgatgacaacagcacagagctggccaccctgattgagttcaacaagaagttccaggagaagacccaccagctgattgaaagtggccgctatgacacccgggaggacttcaccgtggtggtgcagcccttctttgaaaatgtggacatgcccaagaccagcgagggcctgcctgacaacagcttctttgccccagactgcttccacttcagcagcaagagccacagcagagctgccagcgccctgtggaacaacatgctggagcctgtgggccagaagaccaccaggcacaagtttgagaacaagatcaacatcacctgccccaaccaggtgcagcccttcctgcggacctacaagaacagcatgcagggccacggcacctggctgccctgccgggaccgggcccccagcgccctgcaccccacctctgtgcacgccctgcggcctgctgacatccaggtggtggccgccctgggggacagcctgacagctggaaatggaattggcagcaagccagatgacctgcctgatgtgaccacccagtaccggggcctgagctacagcgctggaggagatggcagcctggagaatgtgaccaccctgcccaacatcctgcgggagttcaacagaaacctgaccggctatgctgtgggcactggagatgccaatgacaccaatgccttcctgaaccaggccgtgcctggggccaaggccgaggacctgatgagccaggtgcagaccctgatgcagaagatgaaggatgaccaccgggtgaacttccacgaggactggaaggtgatcaccgtgctgattggaggcagtgacctgtgtgactactgcacagacagcaacctgtacagcgctgccaactttgtgcaccacctgagaaatgccctggatgtgctgcaccgggaggtgccccgggtgctggtgaacctggtggacttcctgaaccccaccatcatgaggcaggtgttcctgggcaacccagacaagtgccctgtgcagcaggcctctgtgctgtgcaactgtgtgctgaccctgcgggagaacagccaggagctggcccggctggaggccttcagccgggcctaccgcagctccatgagggagctggtgggcagcggccgctatgacacccaggaggacttctctgtggtgctgcagcccttcttccagaacatccagctgcctgtgctggctgatggcctgcctgacaccagcttctttgccccagactgcatccaccccaaccagaagttccacagccagctggcccgggccctgtggaccaacatgctggagcccctgggcagcaagacagagaccctggacctgcgggcagagatgcccatcacctgccccacccagaatgagcccttcctgcggaccccaagaaacagcaactacacctaccccatcaagccagccatcgagaactggggcagtgacttcctgtgcacagagtggaaggccagcaacagcgtgcccacctctgtgcaccagctgcggcctgctgacatcaaggtggtggccgccctgggggacagcctgaccacagctgtgggcgcccggcccaacaacagcagtgacctgcccacctcctggaggggcctgtcctggagcattggaggagatggcaacctggagacccacaccaccctgcccaacatcctgaagaagttcaacccctacctgctgggcttcagcaccagcacctgggagggcacagctggcctgaatgtggccgctgagggcgcccgggcccgggacatgcctgcccaggcctgggacctggtggagaggatgaagaacagcccagacatcaacctggagaaggactggaagctggtgaccctcttcatcggcgtgaatgacctgtgccactactgtgaaaatcctgaggcccacctggccacagaatatgtgcagcacatccagcaggccctggacatcctgtctgaggagctgccccgggcctttgtgaatgtggtggaggtgatggagctggccagcctgtaccagggccagggcggcaaatgtgccatgctggccgcccagaacaactgcacctgcctgcggcacagccagagcagcctggagaagcaggagctgaagaaggtgaactggaacctgcagcacggcatcagcagcttctcctactggcaccagtacacccagcgggaggactttgctgtggtggtgcagcccttcttccagaacaccctgacccccctgaatgaaagaggagacacagacctgaccttcttcagcgaggactgcttccacttcagtgaccggggccatgctgagatggccatcgccctgtggaacaacatgctggagcctgtgggcaggaagaccaccagcaacaacttcacccacagccgggccaagctgaagtgccccagccctgagagcccctacctgtacaccctgaggaacagccggctgctgcctgaccaggccgaggaggcccctgaggtgctgtactgggccgtgcctgtggccgccggcgtgggcctggtggtgggcatcatcggcaccgtggtgtggcgctgccggcggggcggccggcgggaggacccccccatgagcctgaggacagtggccctgtag

SEQ ID NO: 164087 - DNA, 1272 bp, synthetic construct
  misc_feature 1..1272: note = Description of Artificial Sequence: Synthetic coding sequence
  source 1..1272: mol_type = other DNA
atgcccatcacctgccccacccagaatgagcccttcctgcggaccccaagaaacagcaactacacctaccccatcaagccagccatcgagaactggggcagtgacttcctgtgcacagagtggaaggccagcaacagcgtgcccacctctgtgcaccagctgcggcctgctgacatcaaggtggtggccgccctgggggacagcctgaccacagctgtgggcgcccggcccaacaacagcagtgacctgcccacctcctggaggggcctgtcctggagcattggaggagatggcaacctggagacccacaccaccctgcccaacatcctgaagaagttcaacccctacctgctgggcttcagcaccagcacctgggagggcacagctggcctgaatgtggccgctgagggcgcccgggcccgggacatgcctgcccaggcctgggacctggtggagaggatgaagaacagcccagacatcaacctggagaaggactggaagctggtgaccctcttcatcggcgtgaatgacctgtgccactactgtgaaaatcctgaggcccacctggccacagaatatgtgcagcacatccagcaggccctggacatcctgtctgaggagctgccccgggcctttgtgaatgtggtggaggtgatggagctggccagcctgtaccagggccagggcggcaaatgtgccatgctggccgcccagaacaactgcacctgcctgcggcacagccagagcagcctggagaagcaggagctgaagaaggtgaactggaacctgcagcacggcatcagcagcttctcctactggcaccagtacacccagcgggaggactttgctgtggtggtgcagcccttcttccagaacaccctgacccccctgaatgaaagaggagacacagacctgaccttcttcagcgaggactgcttccacttcagtgaccggggccatgctgagatggccatcgccctgtggaacaacatgctggagcctgtgggcaggaagaccaccagcaacaacttcacccacagccgggccaagctgaagtgccccagccctgagagcccctacctgtacaccctgaggaacagccggctgctgcctgaccaggccgaggaggcccctgaggtgctgtactgggccgtgcctgtggccgccggcgtgggcctggtggtgggcatcatcggcaccgtggtgtggcgctgccggcggggcggccggcgggaggacccccccatgagcctgaggacagtggccctgtag

SEQ ID NO: 164088 - DNA, 3504 bp, synthetic construct
  misc_feature 1..3504: note = Description of Artificial Sequence: Synthetic coding sequence
  source 1..3504: mol_type = other DNA
atggccggggcccagcccggggtgcacgccctgcagctggagcccccaacagtggtggagaccctgcggcggggcagcaagttcatcaagtgggatgaggagaagctgatgacagtggtgtctggccctgaccctgtgaacacagtgttcctgaacttcatggctgtgcaggatgacacagccaaggtgtggagcgaggagctgttcaagctggccatgaacatcctggcccagaatgccagcaggaacaccttcctgaggaaggcctacaccaagctgaagctgcaggtgaaccaggacggccgcatccctgtgaagaacatcctgaagatgttttctgctgacaagaagagggtggagacagccctggagagctgtggcctgaagttcaacagaagtgagagcatccggccagatgagttcagcctggagatctttgagcgcttcctgaacaagctgtgcctgcggccagacatcgacaagatcctgctggagatcggggccaagggcaagccctacctgaccctggagcagctgatggacttcatcaaccagaagcagagggacccccggctgaatgaggtgctgtacccacccctgcggcccagccaggcccggctgctgattgagaagtatgagcccaaccagcagttcctggagcgggaccagatgtccatggagggcttcagccgctacctgggcggggaggagaatggcatcctgcccctggaggccctggacctgagcacagacatgacccagcccctgagcgcctacttcatcaacagcagccacaacacctacctgacagctggccagctggccggcaccagctctgtggagatgtaccggcaggccctgctgtggggctgccgctgtgtggagctggatgtgtggaagggccggcccccagaggaggagcccttcatcacccacggcttcaccatgaccacagaggtgcccctgagagatgtgctggaggccatcgccgagacagccttcaagaccagcccctaccctgtgatcctgagctttgagaaccacgtggacagcgccaagcagcaggccaagatggccgagtactgccgcagcatctttggagatgccctgctgattgagcccctggacaagtaccccctggcccctggggtgcccctgcccagcccccaggacctgatgggccgcatcctggtgaagaacaagaagaggcaccggcccagcgctgggggcccagattctgctggcaggaagaggcccctggagcagagcaacagcgccctgtctgagagcagcgctgccacagagcccagcagcccccagctgggcagccccagcagtgacagctgccccggcctgagcaatggagaggaggtgggcctggagaagcccagcctggagccccagaagagcctgggagatgagggcctgaacagaggcccctacgtgctgggccctgctgacagagaagatgaggaggaggatgaggaggaggaggagcagacagaccccaagaagcccaccacagatgagggcacagccagcagcgaggtgaatgccacagaggagatgagcaccctggtgaactacatcgagcctgtgaagttcaagagctttgaggccgccaggaagaggaacaagtgctttgagatgagcagctttgtggagaccaaggccatggagcagctgaccaagagccccatggagtttgtggagtacaacaagcagcagctgagccgcatctaccccaagggcaccagggtggacagcagcaactacatgccccagctgttctggaatgtgggctgccagctggtggccctgaacttccagaccctggatgtggccatgcagctgaatgctggggtgtttgagtacaacggccgcagcggctacctgctgaagccagagttcatgagaagaccagacaagagctttgaccccttcacagaggtgattgtggatggcatcgtggccaatgccctgcgggtgaaggtgatcagcggccagttcctgagtgacaggaaggtgggcatctacgtggaggtggacatgtttggcctgcctgtggacaccaggaggaagtaccgcaccaggaccagccagggcaacagcttcaaccctgtgtgggatgaggagccctttgacttccccaaggtggtgctgcccaccctggccagcctgagaattgctgcctttgaggagggcggcaagtttgtgggccaccgcatcctgcctgtgtctgccatccgcagcggctaccactacgtgtgcctgagaaatgaggccaaccagcccctgtgcctgcctgccctgctgatctacacagaggccagtgactacatcccagatgaccaccaggactatgcagaggccctgatcaaccccatcaagcacgtgtccctgatggaccagagggcccggcagctggccgccctgattggagagagcgaggcccaggccggccaggagacctgccaggacacccagagccagcagctgggcagccagcccagcagcaaccccacccccagccccctggatgccagccccaggaggcctcctggccccaccaccagccctgccagcaccagcctgagcagccctggccagagagatgacctgattgccagcatcctgtctgaggtggcccccacccccctggatgagctgcggggccacaaggccctggtgaagctgcggagccggcaggagcgggacctgcgggagctgaggaagaagcaccagaggaaggctgtgaccctgacccggcggctgctggatggcctggcccaggcccaggccgagggccgctgccgcctgcggcctggggccctgggcggcgctgctgatgtggaggacaccaaggagggggaggatgaggccaagcgctaccaggagttccagaaccggcaggtgcagagcctgctggagctgcgggaggcccaggtggatgctgaggcccagaggcggctggagcacctgcggcaggccctgcagaggctgcgggaggtggtgctggatgccaacaccacccagttcaagaggctgaaggagatgaatgaaagagagaagaaggagctgcagaagatcctggacaggaagaggcacaacagcatcagcgaggccaagatgagggacaagcacaagaaggaggccgagctgacagagatcaacagaagacacatcacagaatctgtgaacagcatccggcggctggaggaggcccagaagcagagacatgaccggctggtggccggccagcagcaggtgctgcagcagctggccgaggaggagcccaagctgctggcccagctggcccaggagtgccaggagcagagggcccggctgccccaggagatcagaagaagcctgctgggggagatgcctgagggcctgggagatggccccctggtggcctgtgccagcaatggacatgcccctggcagcagcggccacctgagcggggctgacagcgagagccaggaggagaacacccagctgtag

SEQ ID NO: 164089 - DNA, 3651 bp, synthetic construct
  misc_feature 1..3651: note = Description of Artificial Sequence: Synthetic coding sequence
  source 1..3651: mol_type = other DNA
atggccggggcccagcccggggtgcacgccctgcagctgaagcctgtgtgtgtgtctgacagcctgaagaagggcaccaagtttgtgaagtgggatgatgacagcaccatcgtgacccccatcatcctgaggacagacccccagggcttcttcttctactggacagaccagaacaaggagacagagctgctggacctgagcctggtgaaggatgcccgctgtggcagacatgccaaggcccccaaggaccccaagctgcgggagctgctggatgtgggcaacatcggccgcctggagcagaggatgatcaccgtggtgtatggccctgacctggtgaacatcagccacctgaacctggtggccttccaggaggaggtggccaaggagtggaccaatgaggtgttcagcctggccaccaacctgctggcccagaacatgagcagagatgccttcctggagaaggcctacaccaagctgaagctgcaggtgaccccagagggccgcatccccctgaagaacatctaccgcctcttctctgctgacaggaagagggtggagacagccctggaggcctgcagcctgcccagcagcagaaatgacagcatcccccaggaggacttcaccccagaggtgtacagagtcttcctgaacaacctgtgccccaggcctgagattgacaacatcttcagcgagtttggagccaagagcaagccctacctgactgtggaccagatgatggacttcatcaacctgaagcagagggacccccggctgaatgagatcctgtacccacccctgaagcaggagcaggtgcaggtgctgattgagaagtatgagcccaacaacagcctggccaggaagggccagatctctgtggatggcttcatgagatacctgagcggggaggagaatggagtggtgtccccagagaagctggacctgaatgaagacatgagccagcccctgagccactacttcatcaacagcagccacaacacctacctgacagctggccagctggccggcaacagctctgtggagatgtaccggcaggtgctgctgagcggctgccgctgtgtggagctggactgctggaagggccgcacagctgaggaggagcccgtcatcacccacggcttcaccatgaccacagagatctccttcaaggaggtgattgaggccatcgcagaatgtgccttcaagaccagccccttccccatcctgctgagctttgagaaccacgtggacagccccaagcagcaggccaagatggccgagtactgccgcctcatctttggagatgccctgctgatggagcccctggagaagtaccccctggagagcggcgtgcccctgcccagccccatggacctgatgtacaagatcctggtgaagaacaagaagaagagccacaagagcagcgagggcagcggcaagaagaagctgtctgagcaggccagcaacacctacagcgacagcagctccatgtttgagcccagcagccctggggccggggaggccgacacagaaagtgatgatgatgatgatgatgatgactgcaagaagagctccatggatgagggcacagctggcagcgaggccatggccacagaggagatgagcaacctggtgaactacatccagcctgtgaagtttgagagctttgagatcagcaagaagaggaacaagagctttgagatgagcagctttgtggagaccaagggcctggagcagctgaccaagagccctgtggagtttgtggagtacaacaagatgcagctgagccgcatctaccccaagggcaccagggtggacagcagcaactacatgccccagctgttctggaatgccggctgccagatggtggccctgaacttccagaccatggacctggccatgcagatcaacatgggcatgtatgagtacaacgggaagagcggctaccgcctgaagccagagttcatgaggaggccagacaagcactttgaccccttcacagagggcatcgtggatggcatcgtggccaacaccctgtctgtgaagatcatcagcggccagttcctgagtgacaagaaggtgggcacctacgtggaggtggacatgtttggcctgcctgtggacaccaggaggaaggccttcaagaccaagaccagccagggcaatgctgtgaaccctgtgtgggaggaggagcccatcgtgttcaagaaggtggtgctgcccaccctggcctgcctgagaattgctgtgtatgaggagggcggcaagttcatcggccaccgcatcctgcctgtgcaggccatccggcccggctaccactacatctgcctgagaaatgaaagaaaccagcccctgaccctgcctgctgtgtttgtgtacatcgaggtgaaggactatgtgcctgacacctatgcagatgtgattgaggccctgagcaaccccatccgctacgtgaacctgatggagcagagggccaagcagctggccgccctgaccctggaggatgaggaggaggtgaagaaggaggccgaccccggggagaccccatctgaggcccccagcgaggcccggaccaccccagcagaaaatggagtgaaccacaccaccaccctgacccccaagccacccagccaggccctgcacagccagcctgcccctggctctgtgaaggccccagccaagacagaagatctcatccagagcgtgctgacagaggtggaggcccagaccatcgaggagctgaagcagcagaagagctttgtgaagctgcagaagaagcactacaaggagatgaaggacctggtgaagaggcaccacaagaagaccacagacctgatcaaggagcacaccaccaagtacaatgagatccagaatgactacctgcggcggcgggccgccctggagaagagcgccaagaaggacagcaagaagaagtctgagcccagcagcccagaccacggcagcagcaccatcgagcaggacctggccgccctggatgctgagatgacccagaagctgattgacctgaaggacaagcagcagcagcagctgctgaacctgcggcaggagcagtactacagcgagaagtaccagaagcgggagcacatcaagctgctgatccagaagctgacagatgtggccgaggagtgccagaacaaccagctgaagaagctgaaggagatctgtgagaaggagaagaaggagctgaagaagaagatggacaagaagaggcaggagaagatcacagaggccaagagcaaggacaagagccagatggaggaggagaagacagagatgatccgcagctacatccaggaggtggtgcagtacatcaagaggctggaggaggcccagagcaagaggcaggagaagctggtggagaagcacaaggagatccggcagcagatcctggatgagaagcccaagctgcaggtggagctggagcaggagtaccaggacaagttcaagaggctgcccctggagatcctggagtttgtgcaggaggccatgaagggcaagatcagcgaggacagcaaccacggcagcgcccccctgagcctgagcagtgaccccgggaaggtgaaccacaagacccccagcagcgaggagctgggcggggacatccctgggaaggagtttgacacccccctgtag

SEQ ID NO: 164090 - DNA, 672 bp, synthetic construct
  misc_feature 1..672: note = Description of Artificial Sequence: Synthetic coding sequence
  source 1..672: mol_type = other DNA
atgaggaggccagacaagcactttgaccccttcacagagggcatcgtggatggcatcgtggccaacaccctgtctgtgaagatcatcagcggccagttcctgagtgacaagaaggtgggcacctacgtggaggtggacatgtttggcctgcctgtggacaccaggaggaaggccttcaagaccaagaccagccagggcaatgctgtgaaccctgtgtgggaggaggagcccatcgtgttcaagaaggtggtgctgcccaccctggcctgcctgagaattgctgtgtatgaggagggcggcaagttcatcggccaccgcatcctgcctgtgcaggccatccggcccggctaccactacatctgcctgagaaatgaaagaaaccagcccctgaccctgcctgctgtgtttgtgtacatcgaggtgaaggactatgtgcctgacacctatgcagatgtgattgaggccctgagcaaccccatccgctacgtgaacctgatggagcagagggccaagcagctggccgccctgaccctggaggatgaggaggaggtgaagaaggagggcggcttcctgcatgatgagatcatgaggctgaccaggaacaccctggagaagctgatggccctgcccctgacccacgtggtgcccatccagagcaagatgctgtcctag

SEQ ID NO: 164091 - DNA, 3522 bp, synthetic construct
  misc_feature 1..3522: note = Description of Artificial Sequence: Synthetic coding sequence
  source 1..3522: mol_type = other DNA
atggccggggcccagcccggggtgcacgccctgcagctgaagcctgtgtgtgtgtctgacagcctgaagaagggcaccaagtttgtgaagtgggatgatgacagcaccatcgtgacccccatcatcctgaggacagacccccagggcttcttcttctactggacagaccagaacaaggagacagagctgctggacctgagcctggtgaaggatgcccgctgtggcagacatgccaaggcccccaaggaccccaagctgcgggagctgctggatgtgggcaacatcggccgcctggagcagaggatgatcaccgtggtgtatggccctgacctggtgaacatcagccacctgaacctggtggccttccaggaggaggtggccaaggagtggaccaatgaggtgttcagcctggccaccaacctgctggcccagaacatgagcagagatgccttcctggagaaggcctacaccaagctgaagctgcaggtgaccccagagggccgcatccccctgaagaacatctaccgcctcttctctgctgacaggaagagggtggagacagccctggaggcctgcagcctgcccagcagcagaaatgacagcatcccccaggaggacttcaccccagaggtgtacagagtcttcctgaacaacctgtgccccaggcctgagattgacaacatcttcagcgagtttggagccaagagcaagccctacctgactgtggaccagatgatggacttcatcaacctgaagcagagggacccccggctgaatgagatcctgtacccacccctgaagcaggagcaggtgcaggtgctgattgagaagtatgagcccaacaacagcctggccaggaagggccagatctctgtggatggcttcatgagatacctgagcggggaggagaatggagtggtgtccccagagaagctggacctgaatgaagacatgagccagcccctgagccactacttcatcaacagcagccacaacacctacctgacagctggccagctggccggcaacagctctgtggagatgtaccggcaggtgctgctgagcggctgccgctgtgtggagctggactgctggaagggccgcacagctgaggaggagcccgtcatcacccacggcttcaccatgaccacagagatctccttcaaggaggtgattgaggccatcgcagaatgtgccttcaagaccagccccttccccatcctgctgagctttgagaaccacgtggacagccccaagcagcaggccaagatggccgagtactgccgcctcatctttggagatgccctgctgatggagcccctggagaagtaccccctggagagcggcgtgcccctgcccagccccatggacctgatgtacaagatcctggtgaagaacaagaagaagagccacaagagcagcgagggcagcggcaagaagaagctgtctgagcaggccagcaacacctacagcgacagcagctccatgtttgagcccagcagccctggggccggggaggccgacacagaaagtgatgatgatgatgatgatgatgactgcaagaagagctccatggatgagggcacagctggcagcgaggccatggccacagaggagatgagcaacctggtgaactacatccagcctgtgaagtttgagagctttgagatcagcaagaagaggaacaagagctttgagatgagcagctttgtggagaccaagggcctggagcagctgaccaagagccctgtggagtttgtggagtacaacaagatgcagctgagccgcatctaccccaagggcaccagggtggacagcagcaactacatgccccagctgttctggaatgccggctgccagatggtggccctgaacttccagaccatggacctggccatgcagatcaacatgggcatgtatgagtacaacgggaagagcggctaccgcctgaagccagagttcatgaggaggccagacaagcactttgaccccttcacagagggcatcgtggatggcatcgtggccaacaccctgtctgtgaagatcatcagcggccagttcctgagtgacaagaaggtgggcacctacgtggaggtggacatgtttggcctgcctgtggacaccaggaggaaggccttcaagaccaagaccagccagggcaatgctgtgaaccctgtgtgggaggaggagcccatcgtgttcaagaaggtggtgctgcccaccctggcctgcctgagaattgctgtgtatgaggagggcggcaagttcatcggccaccgcatcctgcctgtgcaggccatccggcccggctaccactacatctgcctgagaaatgaaagaaaccagcccctgaccctgcctgctgtgtttgtgtacatcgaggtgaaggactatgtgcctgacacctatgcagatgtgattgaggccctgagcaaccccatccgctacgtgaacctgatggagcagagggccaagcagctggccgccctgaccctggaggatgaggaggaggtgaagaaggaggccgaccccggggagaccccatctgaggcccccagcgaggcccggaccaccccagcagaaaatggagtgaaccacaccaccaccctgacccccaagccacccagccaggccctgcacagccagcctgcccctggctctgtgaaggccccagccaagacagaagatctcatccagagcgtgctgacagaggtggaggcccagaccatcgaggagctgaagcagcagaagagctttgtgaagctgcagaagaagcactacaaggagatgaaggacctggtgaagaggcaccacaagaagaccacagacctgatcaaggagcacaccaccaagtacaatgagatccagaatgactacctgcggcggcgggccgccctggagaagagcgccaagaaggacagcaagaagaagtctgagcccagcagcccagaccacggcagcagcaccatcgagcaggacctggccgccctggatgctgagatgacccagaagctgattgacctgaaggacaagcagcagcagcagctgctgaacctgcggcaggagcagtactacagcgagaagtaccagaagcgggagcacatcaagctgctgatccagaagctgacagatgtggccgaggagtgccagaacaaccagctgaagaagctgaaggagatctgtgagaaggagaagaaggagctgaagaagaagatggacaagaagaggcaggagaagatcacagaggccaagagcaaggacaagagccagatggaggaggagaagacagagatgatccgcagctacatccaggaggtggtgcagtacatcaagaggctggaggaggcccagagcaagaggcaggagaagctggtggagaagcacaaggagatccggcagcagatcctggatgagaagcccaagggggagggcagcagcagcttcctgtctgagacctgccacgaggaccccagcgtgagccccaacttcaccccacccaacccccaggccctgaagtggtag

SEQ ID NO: 164092 - DNA, 3522 bp, synthetic construct; identical to SEQ ID NO: 164091
  misc_feature 1..3522: note = Description of Artificial Sequence: Synthetic coding sequence
  source 1..3522: mol_type = other DNA

SEQ ID NO: 164093 - DNA, 699 bp, synthetic construct
  misc_feature 1..699: note = Description of Artificial Sequence: Synthetic coding sequence
  source 1..699: mol_type = other DNA
gctggggcccagcccggggtgcacgccctgcagctgaagcctgtgtgtgtgtctgacagcctgaagaagggcaccaagtttgtgaagtgggatgatgacagcaccatcgtgacccccatcatcctgaggacagacccccagggcttcttcttctactggacagaccagaacaaggagacagagctgctggacctgagcctggtgaaggatgcccgctgtggcagacatgccaaggcccccaaggaccccaagctgcgggagctgctggatgtgggcaacatcggccgcctggagcagaggatgatcaccgtggtgtatggccctgacctggtgaacatcagccacctgaacctggtggccttccaggaggaggtggccaaggagtggaccaatgaggtgttcagcctggccaccaacctgctggcccagaacatgagcagagatgccttcctggagaaggcctacaccaagctgaagctgcaggtgaccccagagggccgcatccccctgaagaacatctaccgcctcttctctgctgacaggaagagggtggagacagccctggaggcctgcagcctgcccagcagccgggtggagaaggccaatgaggccgccaagtctgagcagagctgtgggaaggccccacccaagcacttccacctgcacttcatcaagcagaacaagatgctggagccctag

SEQ ID NO: 164094 - DNA, 93 bp, synthetic construct
  misc_feature 1..93: note = Description of Artificial Sequence: Synthetic coding sequence
  source 1..93: mol_type = other DNA
gaggaggcccagagcaagaggcaggagaagctggtggagaagcacaaggagatccggcagcagatcctggatgagaagcccaaggtgccctag

SEQ ID NO: 164095 - DNA, 591 bp, synthetic construct
  misc_feature 1..591: note = Description of Artificial Sequence: Synthetic coding sequence
  source 1..591: mol_type = other DNA
atcatcagcggccagttcctgagtgacaagaaggtgggcacctacgtggaggtggacatgtttggcctgcctgtggacaccaggaggaaggccttcaagaccaagaccagccagggcaatgctgtgaaccctgtgtgggaggaggagcccatcgtgttcaagaaggtggtgctgcccaccctggcctgcctgagaattgctgtgtatgaggagggcggcaagttcatcggccaccgcatcctgcctgtgcaggccatccggcccggctaccactacatctgcctgagaaatgaaagaaaccagcccctgaccctgcctgctgtgtttgtgtacatcgaggtgaaggactatgtgcctgacacctatgcagatgtgattgaggccctgagcaaccccatccgctacgtgaacctgatggagcagagggccaagcagctggccgccctgaccctggaggatgaggaggaggtgaagaaggagggcggcttcctgcatgatgagatcatgaggctgaccaggaacaccctggagaagctgatggccctgcccctgacccacgtggtgcccatccagagcaagatgctgtcctag

SEQ ID NO: 164096 - DNA, 3411 bp, synthetic construct
  misc_feature 1..3411: note = Description of Artificial Sequence: Synthetic coding sequence
  source 1..3411: mol_type = other DNA
acccaggaccccaagctgcgggagctgctggatgtgggcaacatcggccgcctggagcagaggatgatcaccgtggtgtatggccctgacctggtgaacatcagccacctgaacctggtggccttccaggaggaggtggccaaggagtggaccaatgaggtgttcagcctggccaccaacctgctggcccagaacatgagcagagatgccttcctggagaaggcctacaccaagctgaagctgcaggtgaccccagagggccgcatccccctgaagaacatctaccgcctcttctctgctgacaggaagagggtggagacagccctggaggcctgcagcctgcccagcagcagaaatgacagcatcccccaggaggacttcaccccagaggtgtacagagtcttcctgaacaacctgtgccccaggcctgagattgacaacatcttcagcgagtttggagccaagagcaagccctacctgactgtggaccagatgatggacttcatcaacctgaagcagagggacccccggctgaatgagatcctgtacccacccctgaagcaggagcaggtgcaggtgctgattgagaagtatgagcccaacaacagcctggccaggaagggccagatctctgtggatggcttcatgagatacctgagcggggaggagaatggagtggtgtccccagagaagctggacctgaatgaagacatgagccagcccctgagccactacttcatcaacagcagccacaacacctacctgacagctggccagctggccggcaacagctctgtggagatgtaccggcaggtgctgctgagcggctgccgctgtgtggagctggactgctggaagggccgcacagctgaggaggagcccgtcatcacccacggcttcaccatgaccacagagatctccttcaaggaggtgattgaggccatcgcagaatgtgccttcaagaccagccccttccccatcctgctgagctttgagaaccacgtggacagccccaagcagcaggccaagatggccgagtactgccgcctcatctttggagatgccctgctgatggagcccctggagaagtaccccctggagagcggcgtgcccctgcccagccccatggacctgatgtacaagatcctggtgaagaacaagaagaagagccacaagagcagcgagggcagcggcaagaagaagctgtctgagcaggccagcaacacctacagcgacagcagctccatgtttgagcccagcagccctggggccggggaggccgacacagaaagtgatgatgatgatgatgatgatgactgcaagaagagctccatggatgagggcacagctggcagcgaggccatggccacagaggagatgagcaacctggtgaactacatccagcctgtgaagtttgagagctttgagatcagcaagaagaggaacaagagctttgagatgagcagctttgtggagaccaagggcctggagcagctgaccaagagccctgtggagtttgtggagtacaacaagatgcagctgagccgcatctaccccaagggcaccagggtggacagcagcaactacatgccccagctgttctggaatgccggctgccagatggtggccctgaacttccagaccatggacctggccatgcagatcaacatgggcatgtatgagtacaacgggaagagcggctaccgcctgaagccagagttcatgaggaggccagacaagcactttgaccccttcacagagggcatcgtggatggcatcgtggccaacaccctgtctgtgaagatcatcagcggccagttcctgagtgacaagaaggtgggcacctacgtggaggtggacatgtttggcctgcctgtggacaccaggaggaaggccttcaagaccaagaccagccagggcaatgctgtgaaccctgtgtgggaggaggagcccatcgtgttcaagaaggtggtgctgcccaccctggcctgcctgagaattgctgtgtatgaggagggcggcaagttcatcggccaccgcatcctgcctgtgcaggccatccggcccggctaccactacatctgcctgagaaatgaaagaaaccagcccctgaccctgcctgctgtgtttgtgtacatcgaggtgaaggactatgtgcctgacacctatgcagatgtgattgaggccctgagcaaccccatccgctacgtgaacctgatggagcagagggccaagcagctggccgccctgaccctggaggatgaggaggaggtgaagaaggaggccgaccccggggagaccccatctgaggcccccagcgaggcccggaccaccccagcagaaaatggagtgaaccacaccaccaccctgacccccaagccacccagccaggccctgcacagccagcctgcccctggctctgtgaaggccccagccaagacagaagatctcatccagagcgtgctgacagaggtggaggcccagaccatcgaggagctgaagcagcagaagagctttgtgaagctgcagaagaagcactacaaggagatgaaggacctggtgaagaggcaccacaagaagaccacagacctgatcaaggagcacaccaccaagtacaatgagatccagaatgactacctgcggcggcgggccgccctggagaagagcgccaagaaggacagcaagaagaagtctgagcccagcagcccagaccacggcagcagcaccatcgagcaggacctggccgccctggatgctgagatgacccagaagctgattgacctgaaggacaagcagcagcagcagctgctgaacctgcggcaggagcagtactacagcgagaagtaccagaagcgggagcacatcaagctgctgatccagaagctgacagatgtggccgaggagtgccagaacaaccagctgaagaagctgaaggagatctgtgagaaggagaagaaggagctgaagaagaagatggacaagaagaggcaggagaagatcacagaggccaagagcaaggacaagagccagatggaggaggagaagacagagatgatccgcagctacatccaggaggtggtgcagtacatcaagaggctggaggaggcccagagcaagaggcaggagaagctggtggagaagcacaaggagatccggcagcagatcctggatgagaagcccaagctgcaggtggagctggagcaggagtaccaggacaagttcaagaggctgcccctggagatcctggagtttgtgcaggaggccatgaagggcaagatcagcgaggacagcaaccacggcagcgcccccctgagcctgagcagtgaccccgggaaggtgaaccacaagacccccagcagcgaggagctgggcggggacatccctgggaaggagtttgacacccccctgtag

SEQ ID NO: 164097 - DNA, 3282 bp, synthetic construct
  misc_feature 1..3282: note = Description of Artificial Sequence: Synthetic coding sequence
  source 1..3282: mol_type = other DNA
acccaggaccccaagctgcgggagctgctggatgtgggcaacatcggccgcctggagcagaggatgatcaccgtggtgtatggccctgacctggtgaacatcagccacctgaacctggtggccttccaggaggaggtggccaaggagtggaccaatgaggtgttcagcctggccaccaacctgctggcccagaacatgagcagagatgccttcctggagaaggcctacaccaagctgaagctgcaggtgaccccagagggccgcatccccctgaagaacatctaccgcctcttctctgctgacaggaagagggtggagacagccctggaggcctgcagcctgcccagcagcagaaatgacagcatcccccaggaggacttcaccccagaggtgtacagagtcttcctgaacaacctgtgccccaggcctgagattgacaacatcttcagcgagtttggagccaagagcaagccctacctgactgtggaccagatgatggacttcatcaacctgaagcagagggacccccggctgaatgagatcctgtacccacccctgaagcaggagcaggtgcaggtgctgattgagaagtatgagcccaacaacagcctggccaggaagggccagatctctgtggatggcttcatgagatacctgagcggggaggagaatggagtggtgtccccagagaagctggacctgaatgaagacatgagccagcccctgagccactacttcatcaacagcagccacaacacctacctgacagctggccagctggccggcaacagctctgtggagatgtaccggcaggtgctgctgagcggctgccgctgtgtggagctggactgctggaagggccgcacagctgaggaggagcccgtcatcacccacggcttcaccatgaccacagagatctccttcaaggaggtgattgaggccatcgcagaatgtgccttcaagaccagccccttccccatcctgctgagctttgagaaccacgtggacagccccaagcagcaggccaagatggccgagtactgccgcctcatctttggagatgccctgctgatggagcccctggagaagtaccccctggagagcggcgtgcccctgcccagccccatggacctgatgtacaagatcctggtgaagaacaagaagaagagccacaagagcagcgagggcagcggcaagaagaagctgtctgagcaggccagcaacacctacagcgacagcagctccatgtttgagcccagcagccctggggccggggaggccgacacagaaagtgatgatgatgatgatgatgatgactgcaagaagagctccatggatgagggcacagctggcagcgaggccatggccacagaggagatgagcaacctggtgaactacatccagcctgtgaagtttgagagctttgagatcagcaagaagaggaacaagagctttgagatgagcagctttgtggagaccaagggcctggagcagctgaccaagagccctgtggagtttgtggagtacaacaagatgcagctgagccgcatctaccccaagggcaccagggtggacagcagcaactacatgccccagctgttctggaatgccggctgccagatggtggccctgaacttccagaccatggacctggccatgcagatcaacatgggcatgtatgagtacaacgggaagagcggctaccgcctgaagccagagttcatgaggaggccagacaagcactttgaccccttcacagagggcatcgtggatggcatcgtggccaacaccctgtctgtgaagatcatcagcggccagttcctgagtgacaagaaggtgggcacctacgtggaggtggacatgtttggcctgcctgtggacaccaggaggaaggccttcaagaccaagaccagccagggcaatgctgtgaaccctgtgtgggaggaggagcccatcgtgttcaagaaggtggtgctgcccaccctggcctgcctgagaattgctgtgtatgaggagggcggcaagttcatcggccaccgcatcctgcctgtgcaggccatccggcccggctaccactacatctgcctgagaaatgaaagaaaccagcccctgaccctgcctgctgtgtttgtgtacatcgaggtgaaggactatgtgcctgacacctatgcagatgtgattgaggccctgagcaaccccatccgctacgtgaacctgatggagcagagggccaagcagctggccgccctgaccctggaggatgaggaggaggtgaagaaggaggccgaccccggggagaccccatctgaggcccccagcgaggcccggaccaccccagcagaaaatggagtgaaccacaccaccaccctgacccccaagccacccagccaggccctgcacagccagcctgcccctggctctgtgaaggccccagccaagacagaagatctcatccagagcgtgctgacagaggtggaggcccagaccatcgaggagctgaagcagcagaagagctttgtgaagctgcagaagaagcactacaaggagatgaaggacctggtgaagaggcaccacaagaagaccacagacctgatcaaggagcacaccaccaagtacaatgagatccagaatgactacctgcggcggcgggccgccctggagaagagcgccaagaaggacagcaagaagaagtctgagcccagcagcccagaccacggcagcagcaccatcgagcaggacctggccgccctggatgctgagatgacccagaagctgattgacctgaaggacaagcagcagcagcagctgctgaacctgcggcaggagcagtactacagcgagaagtaccagaagcgggagcacatcaagctgctgatccagaagctgacagatgtggccgaggagtgccagaacaaccagctgaagaagctgaaggagatctgtgagaaggagaagaaggagctgaagaagaagatggacaagaagaggcaggagaagatcacagaggccaagagcaaggacaagagccagatggaggaggagaagacagagatgatccgcagctacatccaggaggtggtgcagtacatcaagaggctggaggaggcccagagcaagaggcaggagaagctggtggagaagcacaaggagatccggcagcagatcctggatgagaagcccaagggggagggcagcagcagcttcctgtctgagacctgccacgaggaccccagcgtgagccccaacttcaccccacccaacccccaggccctgaagtggtag

SEQ ID NO: 164098 - DNA, 3558 bp, synthetic construct
  misc_feature 1..3558: note = Description of Artificial Sequence: Synthetic coding sequence
  source 1..3558: mol_type = other DNA
atgagcctgctgaaccctgtgctgctgccccccaaggtgaaggcctacctgagccagggcgagcgcttcatcaagtgggatgatgagaccaccgtggccagccctgtgatcctgcgggtggaccccaagggctactacctgtactggacctaccagagcaaggagatggagttcctggacatcaccagcatccgggacaccaggtttgggaagtttgccaagatgcccaagagccagaagctgagagatgtgttcaacatggacttcccagacaacagcttcctgctgaagaccctgactgtggtgtctggccctgacatggtggacctgaccttccacaactttgtgtcctacaaggaaaatgtgggcaaggcctgggccgaggatgtgctggccctggtgaagcaccccctgacagccaatgccagccgcagcaccttcctggacaagatcctggtgaagctgaagatgcagctgaacagcgagggcaagatccctgtgaagaacttcttccagatgtttcctgctgacaggaagagggtggaggccgccctgagcgcctgccacctgcccaagggcaagaatgatgccatcaaccctgaggacttccctgagcctgtgtacaagagcttcctgatgagcctgtgccccaggcctgagattgatgagatcttcaccagctaccacgccaaggccaagccctacatgaccaaggagcacctgaccaagttcatcaaccagaagcagagggacagccggctgaacagcctgctcttccccccagcccggccagaccaggtgcagggcctgattgacaagtatgagcccagcggcatcaatgcccagaggggccagctgagccctgagggcatggtgtggttcctgtgtggcccagaaaattctgtgctggcccaggacaagctgctgctgcaccacgacatgacccagcccctgaaccactacttcatcaacagcagccacaacacctacctgacagctggccagttcagcggcctgagcagcgctgagatgtaccggcaggtgctgctgagcggctgccgctgtgtggagctggactgctggaagggcaagcccccagatgaggagcccatcatcacccacggcttcaccatgaccacagacatcttcttcaaggaggccatcgaggccatcgccgagagcgccttcaagaccagcccctaccccatcatcctgagctttgagaaccacgtggacagcccccggcagcaggccaagatggccgagtactgcaggaccatctttggagacatgctgctgacagagcccctggagaagttccccctgaagccaggagtgcccctgcccagccctgaggacctgcggggcaagatcctgatcaagaacaagaagaaccagttcagcggccccaccagcagcagcaaggacacaggaggagaggccgagggcagcagcccccccagcgccccagctggggagggcaccgtgtgggccggggaggagggcacagagctggaggaggaggaggtggaggaggaggaggaggaggagagcggcaacctggatgaggaggagatcaagaagatgcagagtgatgagggcacagctggcctggaggtgacagcctatgaggagatgagcagcctggtgaactacatccagcccaccaagtttgtgtcctttgagttcagcgcccagaagaacagaagctatgtgatcagcagcttcacagagctgaaggcctatgacctgctgagcaaggcctctgtgcagtttgtggactacaacaagaggcagatgagccgcatctaccccaagggcaccaggatggacagcagcaactacatgccccagatgttctggaatgccggctgccagatggtggccctgaacttccagaccatggacctgcccatgcagcagaacatggctgtgtttgagttcaacggccagagcggctacctgctgaagcatgagttcatgaggaggccagacaagcagttcaaccccttctctgtggacagaattgatgtggtggtggccaccaccctgagcatcaccgtcatcagcggccagttcctgtctgagaggtctgtgaggacctacgtggaggtggagctgtttggcctgcccggggaccccaagaggcgctaccgcaccaagctgagccccagcaccaacagcatcaaccctgtgtggaaggaggagccctttgtgtttgagaagatcctgatgcctgagctggccagcctgcgggtggccgtgatggaggagggcaacaagttcctgggccaccgcatcatccccatcaatgccctgaacagcggctaccaccacctgtgcctgcacagcgagagcaacatgcccctgaccatgcctgccctcttcatcttcctggagatgaaggactacatccctggggcctgggccgacctgactgtggccctggccaaccccatcaagttcttcagcgcccatgacaccaagtctgtgaagctgaaggaggccatgggcggcctgcctgagaagcccttccccctggccagccctgtggccagccaggtgaatggagccctggcccccaccagcaatggcagccctgctgcccgggccggggcccgggaggaggccatgaaggaggccgctgagcccaggacagccagcctggaggagctgcgggagctgaagggcgtggtgaagctgcagaggagacatgagaaggagctgcgggagctggagcggcggggggcccggcgctgggaggagctgctgcagagaggagctgcccagctggccgagctgggccccccaggagtgggcggcgtgggcgcctgcaagctgggccctgggaagggcagcaggaagaagaggagcctgccccgggaggagagcgctggagctgcccctggagagggccctgagggcgtggatggccgggtgcgggagctgaaggaccggctggagctggagctgctgcggcagggcgaggagcagtatgaatgtgtgctgaagaggaaggagcagcacgtggccgagcagatcagcaagatgatggagctggcccgggagaagcaggccgctgagctgaaggccctgaaggagaccagtgaaaatgacaccaaggagatgaagaagaagctggagaccaagaggctggagcgcatccagggcatgaccaaggtgaccacagacaagatggcccaggagcggctgaagcgggagatcaacaacagccacatccaggaggtggtgcaggtgatcaagcagatgacagagaacctggagcggcaccaggagaagctggaggagaagcaggccgcctgcctggagcagatccgggagatggagaagcagttccagaaggaggccctggccgagtatgaggccaggatgaagggcctggaggccgaggtgaaggagagcgtgcgggcctgcctgcggacctgcttccccagcgaggccaaggacaagccagagcgggcctgtgaatgtcctcctgagctgtgtgagcaggaccccctgattgccaaggcagatgcccaggagagccggctgtag

SEQ ID NO: 164099 - DNA, 3546 bp, synthetic construct
  misc_feature 1..3546: note = Description of Artificial Sequence: Synthetic coding sequence
  source 1..3546: mol_type = other DNA
atgagcctgctgaaccctgtgctgctgccccccaaggtgaaggcctacctgagccagggcgagcgcttcatcaagtgggatgatgagaccaccgtggccagccctgtgatcctgcgggtggaccccaagggctactacctgtactggacctaccagagcaaggagatggagttcctggacatcaccagcatccgggacaccaggtttgggaagtttgccaagatgcccaagagccagaagctgagagatgtgttcaacatggacttcccagacaacagcttcctgctgaagaccctgactgtggtgtctggccctgacatggtggacctgaccttccacaactttgtgtcctacaaggaaaatgtgggcaaggcctgggccgaggatgtgctggccctggtgaagcaccccctgacagccaatgccagccgcagcaccttcctggacaagatcctggtgaagctgaagatgcagctgaacagcgagggcaagatccctgtgaagaacttcttccagatgtttcctgctgacaggaagagggtggaggccgccctgagcgcctgccacctgcccaagggcaagaatgatgccatcaaccctgaggacttccctgagcctgtgtacaagagcttcctgatgagcctgtgccccaggcctgagattgatgagatcttcaccagctaccacgccaaggccaagccctacatgaccaaggagcacctgaccaagttcatcaaccagaagcagagggacagccggctgaacagcctgctcttccccccagcccggccagaccaggtgcagggcctgattgacaagtatgagcccagcggcatcaatgcccagaggggccagctgagccctgagggcatggtgtggttcctgtgtggcccagaaaattctgtgctggcccaggacaagctgctgctgcaccacgacatgacccagcccctgaaccactacttcatcaacagcagccacaacacctacctgacagctggccagttcagcggcctgagcagcgctgagatgtaccggcaggtgctgctgagcggctgccgctgtgtggagctggactgctggaagggcaagcccccagatgaggagcccatcatcacccacggcttcaccatgaccacagacatcttcttcaaggaggccatcgaggccatcgccgagagcgccttcaagaccagcccctaccccatcatcctgagctttgagaaccacgtggacagcccccggcagcaggccaagatggccgagtactgcaggaccatctttggagacatgctgctgacagagcccctggagaagttccccctgaagccaggagtgcccctgcccagccctgaggacctgcggggcaagatcctgatcaagaacaagaagaaccagttcagcggccccaccagcagcagcaaggacacaggaggagaggccgagggcagcagcccccccagcgccccagctgtgtgggccggggaggagggcacagagctggaggaggaggaggtggaggaggaggaggaggaggagagcggcaacctggatgaggaggagatcaagaagatgcagagtgatgagggcacagctggcctggaggtgacagcctatgaggagatgagcagcctggtgaactacatccagcccaccaagtttgtgtcctttgagttcagcgcccagaagaacagaagctatgtgatcagcagcttcacagagctgaaggcctatgacctgctgagcaaggcctctgtgcagtttgtggactacaacaagaggcagatgagccgcatctaccccaagggcaccaggatggacagcagcaactacatgccccagatgttctggaatgccggctgccagatggtggccctgaacttccagaccatggacctgcccatgcagcagaacatggctgtgtttgagttcaacggccagagcggctacctgctgaagcatgagttcatgaggaggccagacaagcagttcaaccccttctctgtggacagaattgatgtggtggtggccaccaccctgagcatcaccgtcatcagcggccagttcctgtctgagaggtctgtgaggacctacgtggaggtggagctgtttggcctgcccggggaccccaagaggcgctaccgcaccaagctgagccccagcaccaacagcatcaaccctgtgtggaaggaggagccctttgtgtttgagaagatcctgatgcctgagctggccagcctgcgggtggccgtgatggaggagggcaacaagttcctgggccaccgcatcatccccatcaatgccctgaacagcggctaccaccacctgtgcctgcacagcgagagcaacatgcccctgaccatgcctgccctcttcatcttcctggagatgaaggactacatccctggggcctgggccgacctgactgtggccctggccaaccccatcaagttcttcagcgcccatgacaccaagtctgtgaagctgaaggaggccatgggcggcctgcctgagaagcccttccccctggccagccctgtggccagccaggtgaatggagccctggcccccaccagcaatggcagccctgctgcccgggccggggcccgggaggaggccatgaaggaggccgctgagcccaggacagccagcctggaggagctgcgggagctgaagggcgtggtgaagctgcagaggagacatgagaaggagctgcgggagctggagcggcggggggcccggcgctgggaggagctgctgcagagaggagctgcccagctggccgagctgggccccccaggagtgggcggcgtgggcgcctgcaagctgggccctgggaagggcagcaggaagaagaggagcctgccccgggaggagagcgctggagctgcccctggagagggccctgagggcgtggatggccgggtgcgggagctgaaggaccggctggagctggagctgctgcggcagggcgaggagcagtatgaatgtgtgctgaagaggaaggagcagcacgtggccgagcagatcagcaagatgatggagctggcccgggagaagcaggccgctgagctgaaggccctgaaggagaccagtgaaaatgacaccaaggagatgaagaagaagctggagaccaagaggctggagcgcatccagggcatgaccaaggtgaccacagacaagatggcccaggagcggctgaagcgggagatcaacaacagccacatccaggaggtggtgcaggtgatcaagcagatgacagagaacctggagcggcaccaggagaagctggaggagaagcaggccgcctgcctggagcagatccgggagatggagaagcagttccagaaggaggccctggccgagtatgaggccaggatgaagggcctggaggccgaggtgaaggagagcgtgcgggcctgcctgcggacctgcttccccagcgaggccaaggacaagccagagcgggcctgtgaatgtcctcctgagctgtgtgagcaggaccccctgattgccaaggcagatgcccaggagagccggctgtag

SEQ ID NO: 164100 - DNA, 3705 bp, synthetic construct
  misc_feature 1..3705: note = Description of Artificial Sequence: Synthetic coding sequence
  source 1..3705: mol_type = other DNA
atggccggggcccagcccggggtgcacgccctgcagctggagcccccaacagtggtggagaccctgcggcggggcagcaagttcatcaagtgggatgaggagaccagcagcaggaacctggtgaccctgcgggtggaccccaacggcttcttcctgtactggacaggccccaacatggaggtggacaccctggacatcagcagcatccgggacaccaggacaggccgctatgcccggctgcccaaggaccccaagatccgggaggtgctgggctttggaggcccagatgcccggctggaggagaagctgatgacagtggtgtctggccctgaccctgtgaacacagtgttcctgaacttcatggctgtgcaggatgacacagccaaggtgtggagcgaggagctgttcaagctggccatgaacatcctggcccagaatgccagcaggaacaccttcctgaggaaggcctacaccaagctgaagctgcaggtgaaccaggacggccgcatccctgtgaagaacatcctgaagatgttttctgctgacaagaagagggtggagacagccctggagagctgtggcctgaagttcaacagaagtgagagcatccggccagatgagttcagcctggagatctttgagcgcttcctgaacaagctgtgcctgcggccagacatcgacaagatcctgctggagattggagccaagggcaagccctacctgaccctggagcagctgatggacttcatcaaccagaagcagagggacccccggctgaatgaggtgctgtacccacccctgcggcccagccaggcccggctgctgattgagaagtatgagcccaaccagcagttcctggagcgggaccagatgtccatggagggcttcagccgctacctgggcggggaggagaatggcatcctgcccctggaggccctggacctgagcacagacatgacccagcccctgagcgcctacttcatcaacagcagccacaacacctacctgacagctggccagctggccggcaccagctctgtggagatgtaccggcaggccctgctgtggggctgccgctgtgtggagctggatgtgtggaagggccggcccccagaggaggagcccttcatcacccacggcttcaccatgaccacagaggtgcccctgagagatgtgctggaggccatcgccgagacagccttcaagaccagcccctaccctgtgatcctgagctttgaaaatcatgtggacagcgccaagcagcaggccaagatggccgagtactgccgcagcatctttggagatgccctgctgattgagcccctggacaagtaccccctggcccctggggtgcccctgcccagcccccaggacctgatgggccgcatcctggtgaagaacaagaagaggcaccggcccagcgctgggggccctgacagcgctggcaggaagaggcccctggagcagagcaacagcgccctgtctgagagcagcgctgccacagagcccagcagcccccagctgggcagccccagcagtgacagctgccccggcctgagcaatggagaggaggtgggcctggagaagcccagcctggagccccagaagagcctgggagatgagggcctgaacagaggcccctacgtgctgggccctgctgaccgggaggatgaggaggaggatgaggaggaggaggagcagacagaccccaagaagcccaccacagatgagggcacagccagcagcgaggtgaatgccacagaggagatgagcaccctggtgaactacatcgagcctgtgaagttcaagagctttgaagctgccaggaagagaaataaatgttttgagatgagcagctttgtggagaccaaggccatggagcagctgaccaagagccccatggagtttgtggagtacaacaagcagcagctgagccgcatctaccccaagggcaccagggtggacagcagcaactacatgccccagctgttctggaatgtgggctgccagctggtggccctgaacttccagaccctggatgtggccatgcagctgaatgctggggtgtttgagtacaacggccgcagcggctacctgctgaagccagagttcatgaggaggccagacaagagctttgaccccttcacagaggtgattgtggatggcatcgtggccaatgccctgcgggtgaaggtgatcagcggccagttcctgagtgacaggaaggtgggcatctacgtggaggtggacatgtttggcctgcctgtggacaccaggaggaagtaccgcaccaggaccagccagggcaacagcttcaaccctgtgtgggatgaggagccctttgacttccccaaggtggtgctgcccaccctggccagcctgagaattgctgcctttgaggagggcggcaagtttgtgggccaccgcatcctgcctgtgtctgccatccgcagcggctaccactacgtgtgcctgagaaatgaggccaaccagcccctgtgcctgcctgccctgctgatctacacagaggccagtgactacatcccagatgaccaccaggactatgcagaggccctgatcaaccccatcaagcacgtgtccctgatggaccagagggcccggcagctggccgccctgattggagagagcgaggcccaggccggccaggagacctgccaggacacccagagccagcagctgggcagccagcccagcagcaaccccacccccagccccctggatgccagcccccggcggcccccaggccccaccaccagccctgccagcaccagcctgagcagccctggccagagagatgacctgattgccagcatcctgtctgaggtggcccccacccccctggatgagctgcggggccacaaggccctggtgaagctgcggagccggcaggagcgggacctgcgggagctgaggaagaagcaccagaggaaggctgtgaccctgacccggcggctgctggatggcctggcccaggcccaggccgagggccgctgccgcctgcggcctggggccctgggcggcgctgctgatgtggaggacaccaaggagggagaagatgaggccaagcgctaccaggagttccagaaccggcaggtgcagagcctgctggagctgcgggaggcccaggtggatgctgaggcccagaggcggctggagcacctgcggcaggccctgcagaggctgcgggaggtggtgctggatgccaacaccacccagttcaagaggctgaaggagatgaatgaaagagagaagaaggagctgcagaagatcctggacaggaagaggcacaacagcatcagcgaggccaagatgagggacaagcacaagaaggaggccgagctgacagagatcaacagaagacacatcacagagagcgtgaacagcatccggcggctggaggaggcccagaagcagagacatgaccggctggtggccggccagcagcaggtgctgcagcagctggccgaggaggagcccaagctgctggcccagctggcccaggagtgccaggagcagagggcccggctgccccaggagatccgccgcagcctgctgggggagatgcctgagggcctgggagatggccccctggtggcctgtgccagcaatggccacgcccctggcagcagcggccacctgtctggagctgacagcgagagccaggaggagaacacccagctgtag

SEQ ID NO: 164101 - DNA, 3705 bp, synthetic construct; identical to SEQ ID NO: 164100
  misc_feature 1..3705: note = Description of Artificial Sequence: Synthetic coding sequence
  source 1..3705: mol_type = other DNA

SEQ ID NO: 164102 - DNA, 3528 bp, synthetic construct
  misc_feature 1..3528: note = Description of Artificial Sequence: Synthetic coding sequence
  source 1..3528: mol_type = other DNA
atggccaagccctatgagttcaactggcagaaggaggtgcccagcttcctgcaggagggcgctgtgtttgacagatatgaggaggagagctttgtgtttgagcccaactgcctcttcaaggtggatgaatttggcttcttcctgacctggaggtctgagggcaaggagggccaggtgctggagtgcagcctcatcaacagcatccgcagcggggccatccccaaggaccccaagatcctggccgccctggaggccgtgggcaagtcagaaaatgacctggagggcagaattgtgtgtgtgtgcagcggcacagacctggtgaacatctccttcacctacatggtggctgaaaatcctgaggtgaccaagcagtgggtggagggcctgcggagcatcatccacaacttccgggccaacaacgtgagccccatgacctgcctgaagaagcactggatgaagctggccttcatgaccaacaccaacgggaagatccctgtgcgcagcatcaccaggacctttgccagcggcaagacagagaaggtgatcttccaggccctgaaggagctgggcctgcccagcggcaagaatgatgaaattgagcccacagccttctcctatgagaagttctatgagctgacccagaagatctgccccaggacagacattgaagatctcttcaagaagatcaacggggacaagacagactacctgactgtggaccagctggtgtccttcctgaatgagcaccagagggacccccggctgaatgagatcctcttccccttctatgatgccaagagggccatgcagatcatcgagatgtatgagccagatgaggacctgaagaagaagggcctcatcagcagtgatggcttctgccgctacctgatgtctgatgaaaatgcccctgtgttcctggaccggctggagctgtaccaggagatggaccaccccctggcccactacttcatcagcagcagccacaacacctacctgaccggccggcagtttggaggcaagagctctgtggagatgtaccggcaggtgctgctggccggctgccgctgtgtggagctggactgctgggatggaaaaggagaggaccaggagcccatcatcacccacggcaaggccatgtgcacagacatcctcttcaaggatgtgatccaggccatcaaggagacagcctttgtgaccagcgagtaccctgtgatcctgagctttgagaaccactgcagcaagtaccagcagtacaagatgagcaagtactgtgaggacctgtttggagacctgctgctgaagcaggccctggagagccaccccctggagcccggccgggccctgcccagccccaatgacctgaagaggaagatcctgatcaagaacaagaggctgaagccagaggtggagaagaagcagctggaggccctgcgctccatgatggaggccggggagagcgccagccctgccaacatcctggaggatgacaatgaggaggagattgaatctgctgaccaggaggaggaggcccaccctgagttcaagtttggaaatgagctgtctgcagatgacctgggccacaaggaggccgtggccaacagcgtgaagaagggcctggtgacagtggaggatgagcaggcctggatggccagctacaagtatgtgggcgccaccaccaacatccacccctacctgagcaccatgatcaactatgcccagcctgtgaagttccagggcttccacgtggccgaggagaggaacatccactacaacatgagcagcttcaatgaatctgtgggcctgggctacctgaagacccacgccattgaatttgtgaactacaacaagaggcagatgagccgcatctaccccaagggcggccgggtggacagcagcaactacatgccccagatcttctggaatgccggctgccagatggtgtccctgaactaccagaccccagacctggccatgcagctgaaccagggcaagtttgagtacaacggcagctgtggctacctgctgaagccagacttcatgagaagaccagacaggacctttgaccccttcagcgagacccctgtggatggagtgattgctgccacctgcagcgtgcaggtgatcagcggccagttcctgagtgacaagaagattggcacctacgtggaggtggacatgtatggcctgcccacagacaccatcaggaaggagttccgcaccaggatggtgatgaacaacggcctgaaccctgtgtacaatgaggagagctttgtgttcaggaaggtgatcctgcctgacctggccgtgctgagaattgctgtgtatgatgacaacaacaagctgattggccagaggatcctgcccctggatggcctgcaggccggctaccgccacatcagcctgagaaatgaaggcaacaagcccctgagcctgcccaccatcttctgcaacatcgtgctgaagacctacgtgcctgatggctttggagacatcgtggatgccctgagtgaccccaagaagttcctgagcatcacagagaagagagctgaccagatgagggccatgggcatcgagaccagtgacattgctgatgtgcccagcgacaccagcaagaatgacaagaagggcaaggccaacacagccaaggccaacgtgaccccccagagcagcagcgagctgcggcccaccaccacagctgccctggccagcggcgtggaggccaagaagggcatcgagctgatcccccaggtgagaattgaggacctgaagcagatgaaggcctacctgaagcacctgaagaagcagcagaaggagctgaacagcctgaagaagaagcacgccaaggagcacagcaccatgcagaagctgcactgcacccaggtggacaagatcgtggcccagtatgacaaggagaagagcacccatgagaagatcctggagaaggccatgaagaagaagggcggcagcaactgcctggagatgaagaaggagacagagatcaagatccagaccctgaccagtgaccacaagagcaaggtgaaggagatcgtggcccagcacaccaaggagtggagcgagatgatcaacacccacagcgctgaggagcaggagatccgggacctgcacctgagccagcagtgtgagctgctgaagaagctgctgatcaatgcccacgagcagcagacccagcagctgaagctgagccatgaccgggagagcaaggagatgagggcccaccaggccaagatctccatggagaacagcaaggccatcagccaggacaagagcatcaagaacaaggccgagcgggagaggagagtgcgggagctgaacagcagcaacaccaagaagttcctggaggagaggaagaggctggccatgaagcagagcaaggagatggaccagctgaagaaggtgcagctggagcacctggagttcctggagaagcagaatgagcaggccaaggagatgcagcagatggtgaagctggaggccgagatggacagaagacctgccaccgtggtgtag

SEQ ID NO: 164103 - DNA, 3585 bp, synthetic construct
  misc_feature 1..3585: note = Description of Artificial Sequence: Synthetic coding sequence
  source 1..3585: mol_type = other DNA
atggccaagccctatgagttcaactggcagaaggaggtgcccagcttcctgcaggagggcgctgtgtttgacagatatgaggaggagagctttgtgtttgagcccaactgcctcttcaaggtggatgaatttggcttcttcctgacctggaggtctgagggcaaggagggccaggtgctggagtgcagcctcatcaacagcatccgcagcggggccatccccaaggaccccaagatcctggccgccctggaggccgtgggcaagtcagaaaatgacctggagggcagaattgtgtgtgtgtgcagcggcacagacctggtgaacatctccttcacctacatggtggctgaaaatcctgaggtgaccaagcagtgggtggagggcctgcggagcatcatccacaacttccgggccaacaacgtgagccccatgacctgcctgaagaagcactggatgaagctggccttcatgaccaacaccaacgggaagatccctgtgcgcagcatcaccaggacctttgccagcggcaagacagagaaggtgatcttccaggccctgaaggagctgggcctgcccagcggcaagaatgatgaaattgagcccacagccttctcctatgagaagttctatgagctgacccagaagatctgccccaggacagacattgaagatctcttcaagaagatcaacggggacaagacagactacctgactgtggaccagctggtgtccttcctgaatgagcaccagagggacccccggctgaatgagatcctcttccccttctatgatgccaagagggccatgcagatcatcgagatgtatgagccagatgaggacctgaagaagaagggcctcatcagcagtgatggcttctgccgctacctgatgtctgatgaaaatgcccctgtgttcctggaccggctggagctgtaccaggagatggaccaccccctggcccactacttcatcagcagcagccacaacacctacctgaccggccggcagtttggaggcaagagctctgtggagatgtaccggcaggtgctgctggccggctgccgctgtgtggagctggactgctgggatggaaaaggagaggaccaggagcccatcatcacccacggcaaggccatgtgcacagacatcctcttcaaggatgtgatccaggccatcaaggagacagcctttgtgaccagcgagtaccctgtgatcctgagctttgagaaccactgcagcaagtaccagcagtacaagatgagcaagtactgtgaggacctgtttggagacctgctgctgaagcaggccctggagagccaccccctggagcccggccgggccctgcccagccccaatgacctgaagaggaagatcctgatcaagaacaagaggctgaagccagaggtggagaagaagcagctggaggccctgcgctccatgatggaggccggggagagcgccagccctgccaacatcctggaggatgacaatgaggaggagattgaatctgctgaccaggaggaggaggcccaccctgagttcaagtttggaaatgagctgtctgcagatgacctgggccacaaggaggccgtggccaacagcgtgaagaagggcctggtgacagtggaggatgagcaggcctggatggccagctacaagtatgtgggcgccaccaccaacatccacccctacctgagcaccatgatcaactatgcccagcctgtgaagttccagggcttccacgtggccgaggagaggaacatccactacaacatgagcagcttcaatgaatctgtgggcctgggctacctgaagacccacgccattgaatttgtgaactacaacaagaggcagatgagccgcatctaccccaagggcggccgggtggacagcagcaactacatgccccagatcttctggaatgccggctgccagatggtgtccctgaactaccagaccccagacctggccatgcagctgaaccagggcaagtttgagtacaacggcagctgtggctacctgctgaagccagacttcatgagaagaccagacaggacctttgaccccttcagcgagacccctgtggatggagtgattgctgccacctgcagcgtgcaggtgatcagcggccagttcctgagtgacaagaagattggcacctacgtggaggtggacatgtatggcctgcccacagacaccatcaggaaggagttccgcaccaggatggtgatgaacaacggcctgaaccctgtgtacaatgaggagagctttgtgttcaggaaggtgatcctgcctgacctggccgtgctgagaattgctgtgtatgatgacaacaacaagctgattggccagaggatcctgcccctggatggcctgcaggccggctaccgccacatcagcctgagaaatgaaggcaacaagcccctgagcctgcccaccatcttctgcaacatcgtgctgaagacctacgtgcctgatggctttggagacatcgtggatgccctgagtgaccccaagaagttcctgagcatcacagagaagagagctgaccagatgagggccatgggcatcgagaccagtgacattgctgatgtgcccagcgacaccagcaagaatgacaagaagggcaaggccaacacagccaaggccaacgtgaccccccagagcagcagcgagctgcggcccaccaccacagctgccctggccagcggcgtggaggccaagaagggcatcgagctgatcccccaggtgagaattgaggacctgaagcagatgaaggcctacctgaagcacctgaagaagcagcagaaggagctgaacagcctgaagaagaagcacgccaaggagcacagcaccatgcagaagctgcactgcacccaggtggacaagatcgtggcccagtatgacaaggagaagagcacccatgagaagatcctggagaaggccatgaagaagaagggcggcagcaactgcctggagatgaagaaggagacagagatcaagatccagaccctgaccagtgaccacaagagcaaggtgaaggagatcgtggcccagcacaccaaggagtggagcgagatgatcaacacccacagcgctgaggagcaggagatccgggacctgcacctgagccagcagtgtgagctgctgaagaagctgctgatcaatgcccacgagcagcagacccagcagctgaagctgagccatgaccgggagagcaaggagatgagggcccaccaggccaagatctccatggagaacagcaaggccatcagccaggacaagagcatcaagaacaaggccgagcgggagaggagagtgcgggagctgaacagcagcaacaccaagaagttcctggaggagaggaagaggctggccatgaagcagagcaaggagatggaccagctgaagaaggtgcagctggagcacctggagttcctggagaagcagaatgagcagctgctgaagagctgccacgctgtgtcccagacccagggcgagggagatgctgctgatggagaaattggcagcagagatggcccccagaccagcaacagctccatgaagctgcagaatgccaactag

SEQ ID NO: 164104 - DNA, 3564 bp, synthetic construct
  misc_feature 1..3564: note = Description of Artificial Sequence: Synthetic coding sequence
  source 1..3564: mol_type = other DNA
atggccaagccctatgagttcaactggcagaaggaggtgcccagcttcctgcaggagggcgctgtgtttgacagatatgaggaggagagctttgtgtttgagcccaactgcctcttcaaggtggatgaatttggcttcttcctgacctggaggtctgagggcaaggagggccaggtgctggagtgcagcctcatcaacagcatccgcagcggggccatccccaaggaccccaagatcctggccgccctggaggccgtgggcaagtcagaaaatgacctggagggcagaattgtgtgtgtgtgcagcggcacagacctggtgaacatctccttcacctacatggtggctgaaaatcctgaggtgaccaagcagtgggtggagggcctgcggagcatcatccacaacttccgggccaacaacgtgagccccatgacctgcctgaagaagcactggatgaagctggccttcatgaccaacaccaacgggaagatccctgtgcgcagcatcaccaggacctttgccagcggcaagacagagaaggtgatcttccaggccctgaaggagctgggcctgcccagcggcaagaatgatgaaattgagcccacagccttctcctatgagaagttctatgagctgacccagaagatctgccccaggacagacattgaagatctcttcaagaagatcaacggggacaagacagactacctgactgtggaccagctggtgtccttcctgaatgagcaccagagggacccccggctgaatgagatcctcttccccttctatgatgccaagagggccatgcagatcatcgagatgtatgagccagatgaggacctgaagaagaagggcctcatcagcagtgatggcttctgccgctacctgatgtctgatgaaaatgcccctgtgttcctggaccggctggagctgtaccaggagatggaccaccccctggcccactacttcatcagcagcagccacaacacctacctgaccggccggcagtttggaggcaagagctctgtggagatgtaccggcaggtgctgctggccggctgccgctgtgtggagctggactgctgggatggaaaaggagaggaccaggagcccatcatcacccacggcaaggccatgtgcacagacatcctcttcaaggatgtgatccaggccatcaaggagacagcctttgtgaccagcgagtaccctgtgatcctgagctttgagaaccactgcagcaagtaccagcagtacaagatgagcaagtactgtgaggacctgtttggagacctgctgctgaagcaggccctggagagccaccccctggagcccggccgggccctgcccagccccaatgacctgaagaggaagatcctgatcaagaacaagaggctgaagccagaggtggagaagaagcagctggaggccctgcgctccatgatggaggccggggagagcgccagccctgccaacatcctggaggatgacaatgaggaggagattgaatctgctgaccaggaggaggaggcccaccctgagttcaagtttggaaatgagctgtctgcagatgacctgggccacaaggaggccgtggccaacagcgtgaagaaggccagtgatgacctggagcacgagaacaacaagaagggcctggtgacagtggaggatgagcaggcctggatggccagctacaagtatgtgggcgccaccaccaacatccacccctacctgagcaccatgatcaactatgcccagcctgtgaagttccagggcttccacgtggccgaggagaggaacatccactacaacatgagcagcttcaatgaatctgtgggcctgggctacctgaagacccacgccattgaatttgtgaactacaacaagaggcagatgagccgcatctaccccaagggcggccgggtggacagcagcaactacatgccccagatcttctggaatgccggctgccagatggtgtccctgaactaccagaccccagacctggccatgcagctgaaccagggcaagtttgagtacaacggcagctgtggctacctgctgaagccagacttcatgagaagaccagacaggacctttgaccccttcagcgagacccctgtggatggagtgattgctgccacctgcagcgtgcaggtgatcagcggccagttcctgagtgacaagaagattggcacctacgtggaggtggacatgtatggcctgcccacagacaccatcaggaaggagttccgcaccaggatggtgatgaacaacggcctgaaccctgtgtacaatgaggagagctttgtgttcaggaaggtgatcctgcctgacctggccgtgctgagaattgctgtgtatgatgacaacaacaagctgattggccagaggatcctgcccctggatggcctgcaggccggctaccgccacatcagcctgagaaatgaaggcaacaagcccctgagcctgcccaccatcttctgcaacatcgtgctgaagacctacgtgcctgatggctttggagacatcgtggatgccctgagtgaccccaagaagttcctgagcatcacagagaagagagctgaccagatgagggccatgggcatcgagaccagtgacattgctgatgtgcccagcgacaccagcaagaatgacaagaagggcaaggccaacacagccaaggccaacgtgaccccccagagcagcagcgagctgcggcccaccaccacagctgccctggccagcggcgtggaggccaagaagggcatcgagctgatcccccaggtgagaattgaggacctgaagcagatgaaggcctacctgaagcacctgaagaagcagcagaaggagctgaacagcctgaagaagaagcacgccaaggagcacagcaccatgcagaagctgcactgcacccaggtggacaagatcgtggcccagtatgacaaggagaagagcacccatgagaagatcctggagaaggccatgaagaagaagggcggcagcaactgcctggagatgaagaaggagacagagatcaagatccagaccctgaccagtgaccacaagagcaaggtgaaggagatcgtggcccagcacaccaaggagtggagcgagatgatcaacacccacagcgctgaggagcaggagatccgggacctgcacctgagccagcagtgtgagctgctgaagaagctgctgatcaatgcccacgagcagcagacccagcagctgaagctgagccatgaccgggagagcaaggagatgagggcccaccaggccaagatctccatggagaacagcaaggccatcagccaggacaagagcatcaagaacaaggccgagcgggagaggagagtgcgggagctgaacagcagcaacaccaagaagttcctggaggagaggaagaggctggccatgaagcagagcaaggagatggaccagctgaagaaggtgcagctggagcacctggagttcctggagaagcagaatgagcaggccaaggagatgcagcagatggtgaagctggaggccgagatggacagaagacctgccaccgtggtgtag

SEQ ID NO: 164105 - DNA, 3528 bp, synthetic construct; identical to SEQ ID NO: 164102
  misc_feature 1..3528: note = Description of Artificial Sequence: Synthetic coding sequence
  source 1..3528: mol_type = other DNA

SEQ ID NO: 164106 - DNA, 3585 bp, synthetic construct; identical to SEQ ID NO: 164103
  misc_feature 1..3585: note = Description of Artificial Sequence: Synthetic coding sequence
  source 1..3585: mol_type = other DNA

SEQ ID NO: 164107 - DNA, 342 bp, synthetic construct
  misc_feature 1..342: note = Description of Artificial Sequence: Synthetic coding sequence
  source 1..342: mol_type = other DNA
atggccaagccctatgagttcaactggcagaaggaggtgcccagcttcctgcaggagggcgctgtgtttgacagatatgaggaggagagctttgtgtttgagcccaactgcctcttcaaggtggatgaatttggcttcttcctgacctggaggtctgagggcaaggagggccaggtgctggagtgcagcctcatcaacagcatccgcagcggggccatccccaaggaccccaagatcctggccgccctggaggccgtgggcaagtcagaaaatgacctggagggcagaattgtgtgtgtgtgcagcggcacagacctggtgaacatctccttcacctactag

SEQ ID NO: 164108 - DNA, 3072 bp, synthetic construct
  misc_feature 1..3072: note = Description of Artificial Sequence: Synthetic coding sequence
  source 1..3072: mol_type = other DNA
cctgtgcgcagcatcaccaggacctttgccagcggcaagacagagaaggtgatcttccaggccctgaaggagctgggcctgcccagcggcaagaatgatgaaattgagcccacagccttctcctatgagaagttctatgagctgacccagaagatctgccccaggacagacattgaagatctcttcaagaagatcaacggggacaagacagactacctgactgtggaccagctggtgtccttcctgaatgagcaccagagggacccccggctgaatgagatcctcttccccttctatgatgccaagagggccatgcagatcatcgagatgtatgagccagatgaggacctgaagaagaagggcctcatcagcagtgatggcttctgccgctacctgatgtctgatgaaaatgcccctgtgttcctggaccggctggagctgtaccaggagatggaccaccccctggcccactacttcatcagcagcagccacaacacctacctgaccggccggcagtttggaggcaagagctctgtggagatgtaccggcaggtgctgctggccggctgccgctgtgtggagctggactgctgggatggaaaaggagaggaccaggagcccatcatcacccacggcaaggccatgtgcacagacatcctcttcaaggatgtgatccaggccatcaaggagacagcctttgtgaccagcgagtaccctgtgatcctgagctttgagaaccactgcagcaagtaccagcagtacaagatgagcaagtactgtgaggacctgtttggagacctgctgctgaagcaggccctggagagccaccccctggagcccggccgggccctgcccagccccaatgacctgaagaggaagatcctgatcaagaacaagaggctgaagccagaggtggagaagaagcagctggaggccctgcgctccatgatggaggccggggagagcgccagccctgccaacatcctggaggatgacaatgaggaggagattgaatctgctgaccaggaggaggaggcccaccctgagttcaagtttggaaatgagctgtctgcagatgacctgggccacaaggaggccgtggccaacagcgtgaagaaggccagtgatgacctggagcacgagaacaacaagaagggcctggtgacagtggaggatgagcaggcctggatggccagctacaagtatgtgggcgccaccaccaacatccacccctacctgagcaccatgatcaactatgcccagcctgtgaagttccagggcttccacgtggccgaggagaggaacatccactacaacatgagcagcttcaatgaatctgtgggcctgggctacctgaagacccacgccattgaatttgtgaactacaacaagaggcagatgagccgcatctaccccaagggcggccgggtggacagcagcaactacatgccccagatcttctggaatgccggctgccagatggtgtccctgaactaccagaccccagacctggccatgcagctgaaccagggcaagtttgagtacaacggcagctgtggctacctgctgaagccagacttcatgagaagaccagacaggacctttgaccccttcagcgagacccctgtggatggagtgattgctgccacctgcagcgtgcaggtgatcagcggccagttcctgagtgacaagaagattggcacctacgtggaggtggacatgtatggcctgcccacagacaccatcaggaaggagttccgcaccaggatggtgatgaacaacggcctgaaccctgtgtacaatgaggagagctttgtgttcaggaaggtgatcctgcctgacctggccgtgctgagaattgctgtgtatgatgacaacaacaagctgattggccagaggatcctgcccctggatggcctgcaggccggctaccgccacatcagcctgagaaatgaaggcaacaagcccctgagcctgcccaccatcttctgcaacatcgtgctgaagacctacgtgcctgatggctttggagacatcgtggatgccctgagtgaccccaagaagttcctgagcatcacagagaagagagctgaccagatgagggccatgggcatcgagaccagtgacattgctgatgtgcccagcgacaccagcaagaatgacaagaagggcaaggccaacacagccaaggccaacgtgaccccccagagcagcagcgagctgcggcccaccaccacagctgccctggccagcggcgtggaggccaagaagggcatcgagctgatcccccaggtgagaattgaggacctgaagcagatgaaggcctacctgaagcacctgaagaagcagcagaaggagctgaacagcctgaagaagaagcacgccaaggagcacagcaccatgcagaagctgcactgcacccaggtggacaagatcgtggcccagtatgacaaggagaagagcacccatgagaagatcctggagaaggccatgaagaagaagggcggcagcaactgcctggagatgaagaaggagacagagatcaagatccagaccctgaccagtgaccacaagagcaaggtgaaggagatcgtggcccagcacaccaaggagtggagcgagatgatcaacacccacagcgctgaggagcaggagatccgggacctgcacctgagccagcagtgtgagctgctgaagaagctgctgatcaatgcccacgagcagcagacccagcagctgaagctgagccatgaccgggagagcaaggagatgagggcccaccaggccaagatctccatggagaacagcaaggccatcagccaggacaagagcatcaagaacaaggccgagcgggagaggagagtgcgggagctgaacagcagcaacaccaagaagttcctggaggagaggaagaggctggccatgaagcagagcaaggagatggaccagctgaagaaggtgcagctggagcacctggagttcctggagaagcagaatgagcaggccaaggagatgcagcagatggtgaagctggaggccgagatggacagaagacctgccaccgtggtgtag

SEQ ID NO: 164109 - DNA, 183 bp, synthetic construct
  misc_feature 1..183: note = Description of Artificial Sequence: Synthetic coding sequence
  source 1..183: mol_type = other DNA
atggccaagccctatgagttcaactggcagaaggaggtgcccagcttcctgcaggagggcgctgtgtttgacagatatgaggaggagagctttgtgtttgagcccaactgcctcttcaaggtggatgaatttggcttcttcctgacctggaggtctgagggcaaggagggccaggtgctgtag

SEQ ID NO: 164110 - DNA, 246 bp, synthetic construct
  misc_feature 1..246: note = Description of Artificial Sequence: Synthetic coding sequence
  source 1..246: mol_type = other DNA
atggccaagccctatgagttcaactggcagaaggaggtgcccagcttcctgcaggagggcgctgtgtttgacagatatgaggaggagagctttgtgtttgagcccaactgcctcttcaaggtggatgaatttggcttcttcctgacctggaggtctgagggcaaggagggccaggtgctggagtgcagcctcatcaacagcatccgcagcggggccatccccaaggaccccaagatcctggcctag

SEQ ID NO: 164111 - DNA, 333 bp, synthetic construct
  misc_feature 1..333: note = Description of Artificial Sequence: Synthetic coding sequence
  source 1..333: mol_type = other DNA
atggccaagccctatgagttcaactggcagaaggaggtgcccagcttcctgcaggagggcgctgtgtttgacagatatgaggaggagagctttgtgtttgagcccaactgcctcttcaaggtggatgaatttggcttcttcctgacctggaggtctgagggcaaggagggccaggtgctggagtgcagcctcatcaacagcatccgcagcggggccatccccaaggaccccaagatcctggccgccctggaggccgtgggcaagtcagaaaatgacctggagggcagaattgtgtgtgtgtgcagcggcacagacctggtgaacatctcctag

SEQ ID NO: 164112 - DNA, 2271 bp, synthetic construct
  misc_feature 1..2271: note = Description of Artificial Sequence: Synthetic coding sequence
  source 1..2271: mol_type = other DNA
atggattctggccgggacttcctgaccctgcacggcctgcaggatgatgaggacctgcaggccctgctgaagggcagccagctgctgaaggtgaagagcagctcctggaggcgggagcgcttctacaagctgcaggaggactgcaagaccatctggcaggagagcaggaaggtgatgaggaccccagagagccagctgttcagcattgaggacatccaggaggtgaggatgggccacaggacagagggcctggagaagtttgccagagatgtgcctgaagatcgctgcttcagcatcgtgttcaaggaccagaggaacaccctggacctgattgcccccagccctgcagatgcccagcactgggtgctgggcctgcacaagatcatccaccacagcggctccatggaccagaggcagaagctgcagcactggatccacagctgcctgaggaaggctgacaagaacaaggacaacaagatgtccttcaaggagctgcagaacttcctgaaggagctgaacatccaggtggatgacagctatgccaggaagatcttcagagaatgtgaccacagccagacagacagcctggaggatgaggagattgaggccttctacaagatgctgacccagagggtggagattgacaggacctttgctgaggccgccggcagcggggagaccctgtctgtggaccagctggtgaccttcctgcagcaccagcagcgggaggaggccgccggccctgccctggccctgagcctgattgaaagatatgagcccagcgagacagccaaggcccagaggcagatgaccaaggatggcttcctgatgtacctgctgtctgcagatggcagcgccttcagcctggcccaccggcgggtgtaccaggacatgggccagcccctgagccactacctggtgagcagcagccacaacacctacctgctggaggaccagctggccggccccagcagcacagaggcctacatccgggccctgtgcaagggctgccgctgcctggagctggactgctgggatggccccaaccaggagcccatcatctaccacggctacaccttcaccagcaagatcctcttctgtgatgtgctgcgggccatccgggactatgccttcaaggccagcccctaccctgtgatcctgagcctggagaaccactgcaccctggagcagcagagggtgatggcccggcacctgcacgccatcctgggccccatgctgctgaaccggcccctggatggagtgaccaacagcctgcccagccctgagcagctgaagggcaagatcctgctgaagggcaagaagctgggcggcctgctgcccccaggaggagagggcggccctgaggccaccgtggtgtctgatgaagatgaagctgctgagatggaggatgaggccgtgcgcagccgggtgcagcacaagcccaaggaggacaagctgcggctggcccaggagctgagtgacatggtgatctactgcaagtctgtgcactttggaggcttcagcagccctggcaccccaggccaggccttctatgagatggccagcttctctgaaaatagagccctgcggctgctgcaggagagcggaaatggatttgtgcgccacaacgtgggccacctgagccgcatctacccagctggctggaggacagacagcagcaactacagccctgtggagatgtggaatggaggctgccagatcgtggccctgaacttccagaccccaggccctgagatggatgtgtaccagggccgcttccaggacaacggggcctgtggctacgtgctgaagccagccttcctgcgggaccccaacggcaccttcaacccccgggccctggcccagggcccctggtgggccaggaagaggctgaacatccgggtcatcagcggccagcagctgcccaaggtgaacaagaacaagaacagcatcgtggaccccaaggtgacagtggagatccatggagtgtccagagatgtggccagccggcagacagctgtgatcaccaacaacggcttcaacccctggtgggacacagaatttgcctttgaggtggtggtgcctgacctggccctgatccgcttcctggtggaggactatgatgccagcagcaagaatgacttcatcggccagagcaccatccccctgaacagcctgaagcagggctaccgccacgtgcacctgatgagcaagaatggagaccagcaccccagcgccaccctgtttgtgaagatcagcctgcaggactag

SEQ ID NO: 164113 - DNA, 2334 bp, synthetic construct
  misc_feature 1..2334: note = Description of Artificial Sequence: Synthetic coding sequence
  source 1..2334: mol_type = other DNA
atgcagtgcctgggcatccgcagccgcagccgcagccgggagctgtacctgcaggagaggagcctgaaggtggccgccctgaatggccggcggctgggcctgcaggatgatgaggacctgcaggccctgctgaagggcagccagctgctgaaggtgaagagcagctcctggaggcgggagcgcttctacaagctgcaggaggactgcaagaccatctggcaggagagcaggaaggtgatgaggaccccagagagccagctgttcagcattgaggacatccaggaggtgaggatgggccacaggacagagggcctggagaagtttgccagagatgtgcctgaggaccgctgcttcagcatcgtgttcaaggaccagaggaacaccctggacctgattgcccccagccctgcagatgcccagcactgggtgctgggcctgcacaagatcatccaccacagcggctccatggaccagaggcagaagctgcagcactggatccacagctgcctgaggaaggctgacaagaacaaggacaacaagatgtccttcaaggagctgcagaacttcctgaaggagctgaacatccaggtggatgacagctatgccaggaagatcttccgggagtgtgaccacagccagacagacagcctggaggatgaggagattgaggccttctacaagatgctgacccagagggtggagattgacaggacctttgctgaggccgccggcagcggggagaccctgtctgtggaccagctggtgaccttcctgcagcaccagcagcgggaggaggccgccggccctgccctggccctgagcctcatcgagagatatgagcccagcgagacagccaaggcccagaggcagatgaccaaggatggcttcctgatgtacctgctgtctgcagatggcagcgccttcagcctggcccacagaagagtgtaccaggacatgggccagcccctgagccactacctggtgagcagcagccacaacacctacctgctggaggaccagctggccggccccagcagcacagaggcctacatccgggccctgtgcaagggctgccgctgcctggagctggactgctgggatggccccaaccaggagcccatcatctaccacggctacaccttcaccagcaagatcctcttctgtgatgtgctgcgggccatccgggactatgccttcaaggccagcccctaccctgtgatcctgagcctggagaaccactgcaccctggagcagcagagggtgatggcccggcacctgcacgccatcctgggccccatgctgctgaaccggcccctggatggagtgaccaacagcctgcccagccctgagcagctgaagggcaagatcctgctgaagggcaagaagctgggcggcctgctgcccccaggaggagagggcggccctgaggccaccgtggtgtctgatgaagatgaggccgctgagatggaggatgaagctgtgcgcagccgggtgcagcacaagcccaaggaggacaagctgcggctggcccaggagctgagtgacatggtgatctactgcaagtctgtgcactttggaggcttcagcagccctggcaccccaggccaggccttctatgagatggccagcttcagcgagaacagagccctgcggctgctgcaggagagcggaaatggatttgtgcgccacaacgtgggccacctgagccgcatctacccagctggctggaggacagacagcagcaactacagccctgtggagatgtggaatggaggctgccagatcgtggccctgaacttccagaccccaggccctgagatggatgtgtaccagggccgcttccaggacaatggagcctgtggctacgtgctgaagccagccttcctgcgggaccccaacggcaccttcaacccccgggccctggcccagggcccctggtgggccaggaagaggctgaacatccgggtcatcagcggccagcagctgcccaaggtgaacaagaacaagaacagcatcgtggaccccaaggtgacagtggagatccacggcgtgtccagagatgtggccagccggcagacagctgtgatcaccaacaacggcttcaacccctggtgggacacagaatttgcctttgaggtggtggtgcctgacctggccctgatccgcttcctggtggaggactatgatgccagcagcaagaatgacttcatcggccagagcaccatccccctgaacagcctgaagcagggctacagacatgtgcacctgatgagcaagaatggagaccagcaccccagcgccaccctgtttgtgaagatcagcctgcaggactag

SEQ ID NO: 164114 - DNA, 6909 bp, synthetic construct
  misc_feature 1..6909: note = Description of Artificial Sequence: Synthetic coding sequence
  source 1..6909: mol_type = other DNA
atgaccagcgaggagatgacagcctctgtgctgatccctgtgacccagaggaaggtggtgtctgcccagagcgctgctgatgagagcagcgagaaggtgtctgacatcaacatcagcaaggcccacacagtgagaagaagtggagagaccagccacaccatcagccagctgaacaagctgaaggaggagcccagcggcagcaacctgcccaagatcctgagcatcgcccgggagaagatcgtgtctgatgagaacagcaatgagaagtgctgggagaagatcatgccagacagcgccaagaacctgaacatcaactgcaacaacatcctgaggaaccaccagcacggcctgccccagaggcagttctatgagatgtacaacagcgtggccgaggaggacctgtgcctggagaccggcatccccagccccctggagaggaaggtgtttcctggcatccagctggagctggaccggcccagcatgggcatcagccccctgggcaaccagagcgtcatcattgaaacaggccgggcccacccagacagcagaagagctgtgttccacttccactatgaggtggacaggaggatgtctgacaccttctgcaccctgtctgagaacctgatcctggatgactgtggcaactgtgtgcccctgcccggcggggaggagaagcagaagaagaactacgtggcctacacctgcaagctgatggagctggccaagaactgtgacaacaagaatgagcagctgcagtgtgaccactgtgacaccctgaatgacaagtacttctgctttgagggcagctgtgagaaggtggacatggtgtacagcggggacagcttctgcaggaaggacttcacagacagccaggccgccaagaccttcctgagccactttgaggacttcccagacaactgtgatgatgtggaggaggatgccttcaagagcaagaaggagaggagcaccctgctggtgcggcgcttctgcaagaatgaccgggaggtgaagaagtctgtgtacacaggcacccgggccatcgtgaggaccctgcccagcggccacatcggcctgacagcctggagctacatcgaccagaagagaaatggccccctgctgccctgtggccgggtgatggagccccccagcacagtggagatccggcaggacggcagccagaggctgtctgaggcccagtggtaccccatctacaatgctgtgcggcgggaggagacagaaaatacagtgggcagcctgctgcacttcctgaccaagctgcctgccagcgagacagcccacggccgcatctctgtgggcccctgcctgaagcagtgtgtgcgggacacagtgtgtgagtaccgggccaccctgcagaggaccagcatcagccagtacatcaccggcagcctgctggaggccaccaccagcctgggcgcccggagcggcctgctgagcacctttggaggcagcactggaaggatgatgctgaaggagcggcagcccggccccagcgtggccaacagcaatgccctgcccagcagcagcgctggcatcagcaaggagctgattgacctgcagcccctcatccagtttcctgaggaggtggccagcatcctgatggagcaggagcagaccatctaccgccgggtgctgcctgtggactacctgtgcttcctgacccgggacctgggcaccccagagtgccagagcagcctgccctgcctgaaggccagcatcagcgccagcatcctgaccacccagaatggagagcacaatgccctggaggacctggtgatgaggttcaatgaggtgtcctcctgggtgacctggctgatcctgacagctggctccatggaggagaagcgggaggtgttctcctacctggtgcacgtggccaagtgctgctggaacatgggcaactacaatgctgtgatggagttcctggccggcctgcggagcaggaaggtgctgaagatgtggcagttcatggaccagagcgacatcgagaccatgaggagcctgaaggatgccatggcccagcacgagagcagctgtgagtacaggaaggtggtgacccgggccctgcacatccctggctgcaaggtggtgcccttctgtggggtcttcctgaaggagctgtgtgaggtgctggatggagccagcggcctgatgaagctgtgcccccgctacaacagccaggaggagaccctggagtttgtggccgactacagcggccaggacaacttcctgcagagggtgggccagaatggcctgaagaacagcgagaaggagagcacagtgaacagcatcttccaggtgatccgcagctgcaacagaagcctggagacagatgaggaggacagccccagcgagggcaacagcagcaggaagagcagcctgaaggacaagagccgctggcagttcatcatcggggacctgctggacagcgacaatgacatctttgagcagagcaaggagtatgacagccacggcagcgaggacagccagaaggcctttgaccatggaacagagctgatcccctggtacgtgctgagcatccaggctgatgtgcaccagttcctgctgcagggcgccaccgtcatccactatgaccaggacacccacctgagcgcccgctgcttcctgcagctgcagcctgacaacagcaccctgacctgggtgaagcccaccacagccagccctgccagcagcaaggccaagctgggcgtgctgaacaacacagctgagcccgggaagttccccctgctgggcaatgccggcctgagcagcctgacagagggcgtgctggacctgtttgctgtgaaggctgtgtacatgggccaccctggcatcgacatccacacagtgtgtgtgcagaacaagctgggctccatgttcctgtctgagaccggggtgaccctgctgtatggcctgcagaccacagacaaccggctgctgcactttgtggcccccaagcacacagccaagatgctgttcagcggcctgctggagctgaccagggctgtgaggaagatgaggaagttcccagaccagaggcagcagtggctgaggaagcagtatgtgtccctgtaccaggaggatggccgctatgagggccccaccctggcccatgctgtggagctgtttggaggccgccgctggagcgccaggaaccccagccctggcaccagcgccaagaatgctgagaagcccaacatgcagaggaacaacaccctgggcatcagcaccaccaagaagaagaagaagatcctgatgagaggagagagcggggaggtgacagatgatgagatggccaccaggaaggccaagatgcacaaggagtgccgcagccgcagcggcagtgacccccaggacatcaatgagcaggaggagagcgaggtgaatgccatcgccaacccccccaaccccctgcccagcagaagagcccacagcctgaccacagctggcagccccaacctggccgccggcaccagcagccccatccggcctgtgagcagccctgtgctgagcagcagcaacaagagccccagcagcgcctggagcagcagctcctggcacggccgcatcaagggcggcatgaagggcttccagagcttcatggtgtctgacagcaacatgagctttgtggagtttgtggagctgttcaagagcttctctgtgcgcagcaggaaggacctgaaggacctgtttgatgtgtatgctgtgccctgcaacagaagtggcagcgagagcgcccccctgtacaccaacctgaccattgatgagaacaccagtgacctgcagcctgacctggacctgctgaccagaaatgtgtctgacctgggcctcttcatcaagagcaagcagcagctgagtgacaaccagaggcagatcagtgatgccatcgccgccgccagcatcgtgaccaacggcaccggcatcgagagcaccagcctgggcatcttcggcgtgggcatcctgcagctgaatgacttcctggtgaactgccagggcgagcactgcacctatgatgagatcctgagcatcatccagaagtttgagcccagcatctccatgtgccaccagggcctgatgagctttgagggctttgcccgcttcctgatggacaaggagaactttgccagcaagaatgatgagagccaggagaacatcaaggagctgcagctgcccctgagctactactacatcgagagcagccacaacacctacctgaccggccaccagctgaagggggagagctctgtggagctgtacagccaggtgctgctgcagggctgccgctctgtggagctggactgctgggatggagatgatggcatgcccatcatctaccacggccacaccctgaccaccaagatccccttcaaggaggtggtggaggccatcgacagaagtgccttcatcaacagcgacctgcccatcatcatcagcattgagaaccactgcagcctgccccagcagaggaagatggccgagatcttcaagacagtgtttggagagaagctggtgaccaagttcctgtttgaaacagacttcagtgatgaccccatgctgcccagcccagaccagctgaggaagaaggtgctgctgaagaacaagaagctgaaggcccaccagacccctgtggacatcctgaagcagaaggcccaccagctggcctccatgcaggtgcaggcctacaacggcggcaatgccaaccccaggcctgccaacaatgaggaggaggaggatgaggaggatgaatatgactatgactatgagagcctgagtgatgacaacatcctggaggacaggcctgagaacaagagctgcaatgacaagctgcagtttgagtacaatgaggagatccccaagaggatcaagaaggctgacaacagcgcctgcaacaagggcaaggtgtatgacatggagctgggggaggagttctacctggaccagaacaagaaggagagccggcagatcgcccctgagctgagtgacctggtgatctactgccaggccgtgaagtttcctggcctgagcaccctgaatgccagcggcagcagccggggcaaggagaggaagagcaggaagagcatctttggaaacaaccctggccgcatgagccctggagaaacagccagcttcaacaagaccagcggcaagagcagctgtgagggcatccggcagacctgggaggagagcagcagccccctgaaccccaccaccagcctgagcgccatcatccgcacccccaagtgctaccacatcagcagcctgaatgaaaatgctgccaagaggctgtgccgccgctacagccagaagctgacccagcacacagcctgccagctgctgcggacctacccagctgccaccagaattgacagcagcaaccccaaccccctgatgttctggctgcacggcatccagctggtggccctgaactaccagacagatgacctgcccctgcacctgaatgctgccatgtttgaggccaatggaggctgcggctacgtgctgaagccccctgtgctgtgggacaagaactgccccatgtaccagaagttcagccccctggagcgggacctggacagcatggaccctgctgtgtacagcctgaccatcgtgtctggccagaatgtgtgccccagcaacagcatgggcagcccctgcatcgaggtggatgtgctgggcatgcccctggacagctgccacttccgcaccaagcccatccacaggaacaccctgaaccccatgtggaatgagcagttcctgttccacgtgcactttgaggacctggtgttcctgcgctttgctgtggtggagaacaacagcagcgctgtgacagcccagaggatcatccccctgaaggccctgaagaggggctaccgccacctgcagctgaggaacctgcacaatgaggtgctggagatcagcagcctcttcatcaacagcaggaggatggaggagaacagcagcggcaacaccatgtctgccagctccatgttcaacacagaggagaggaagtgcctgcagacccaccgggtgacagtgcatggagtgcccggccctgagcccttcaccgtcttcaccatcaatggaggcaccaaggccaagcagctgctgcagcagatcctgaccaatgagcaggacatcaagcctgtgaccacagactacttcctgatggaggagaagtacttcatcagcaaggagaagaatgaatgtaggaagcagcccttccagagggccatcggccctgaggaggagatcatgcagatcctgagctcctggttccctgaggagggctacatgggcagaattgtgctgaagacccagcaggagaacctggaggagaagaacatcgtgcaggatgacaaggaggtgatcctgagcagcgaggaggagagcttctttgtgcaggtgcatgatgtgtccccagagcagcccaggacagtcatcaaggccccccgggtgtccacagcccaggatgtgatccagcagaccctgtgcaaggccaagtacagctacagcatcctgagcaaccccaaccccagcgactatgtgctgctggaggaggtggtgaaggacaccaccaacaagaagaccaccacccccaagagcagccagagggtgctgctggaccaggagtgtgtgttccaggcccagagcaagtggaagggggccggcaagttcatcctgaagctgaaggagcaggtgcaggccagccgggaggacaagaagaagggcatcagctttgccagcgagctgaagaagctgaccaagagcaccaagcagccccggggcctgaccagccccagccagctgctgaccagcgagagcatccagaccaaggaggagaagcctgtgggcggcctgagcagcagtgacaccatggactaccggcagtag

SEQ ID NO: 164115 - DNA, 5985 bp, synthetic construct
  misc_feature 1..5985: note = Description of Artificial Sequence: Synthetic coding sequence
  source 1..5985: mol_type = other DNA
atggtgtctgagggcagcgctgctggccgggactttgctggcatggaggaggtgcggcagctgcacgtgcgcttctgcaagggcatcaagatctggcaccaggcctggttcctgtgcagcctgctgggccgggagccccaggagcgggaggccggctgccagctgtggctgtgcaccctgtctgctgtgctgaaggtgggctggctgttccccctgtctgaggtgcccaacttcaccctgctgaaggatggctgcggctgctggaggctgaaggaggaccagatctacaatgctgtgcggcgggaggagacagaaaatacagtgggcagcctgctgcacttcctgaccaagctgcctgccagcgagacagcccacggccgcatctctgtgggcccctgcctgaagcagtgtgtgcgggacacagtgtgtgagtaccgggccaccctgcagaggaccagcatcagccagtacatcaccggcagcctgctggaggccaccaccagcctgggcgcccggagcggcctgctgagcacctttggaggcagcactggaaggatgatgctgaaggagcggcagcccggccccagcgtggccaacagcaatgccctgcccagcagcagcgctggcatcagcaaggagctgattgacctgcagcccctcatccagtttcctgaggaggtggccagcatcctgatggagcaggagcagaccatctaccgccgggtgctgcctgtggactacctgtgcttcctgacccgggacctgggcaccccagagtgccagagcagcctgccctgcctgaaggccagcatcagcgccagcatcctgaccacccagaatggagagcacaatgccctggaggacctggtgatgaggttcaatgaggtgtcctcctgggtgacctggctgatcctgacagctggctccatggaggagaagcgggaggtgttctcctacctggtgcacgtggccaagtgctgctggaacatgggcaactacaatgctgtgatggagttcctggccggcctgcggagcaggaaggtgctgaagatgtggcagttcatggaccagagcgacatcgagaccatgaggagcctgaaggatgccatggcccagcacgagagcagctgtgagtacaggaaggtggtgacccgggccctgcacatccctggctgcaaggtggtgcccttctgtggggtcttcctgaaggagctgtgtgaggtgctggatggagccagcggcctgatgaagctgtgcccccgctacaacagccaggaggagaccctggagtttgtggccgactacagcggccaggacaacttcctgcagagggtgggccagaatggcctgaagaacagcgagaaggagagcacagtgaacagcatcttccaggtgatccgcagctgcaacagaagcctggagacagatgaggaggacagccccagcgagggcaacagcagcaggaagagcagcctgaaggacaagagccgctggcagttcatcatcggggacctgctggacagcgacaatgacatctttgagcagagcaaggagtatgacagccacggcagcgaggacagccagaaggcctttgaccatggaacagagctgatcccctggtacgtgctgagcatccaggctgatgtgcaccagttcctgctgcagggcgccaccgtcatccactatgaccaggacacccacctgagcgcccgctgcttcctgcagctgcagcctgacaacagcaccctgacctgggtgaagcccaccacagccagccctgccagcagcaaggccaagctgggcgtgctgaacaacacagctgagcccgggaagttccccctgctgggcaatgccggcctgagcagcctgacagagggcgtgctggacctgtttgctgtgaaggctgtgtacatgggccaccctggcatcgacatccacacagtgtgtgtgcagaacaagctgggctccatgttcctgtctgagaccggggtgaccctgctgtatggcctgcagaccacagacaaccggctgctgcactttgtggcccccaagcacacagccaagatgctgttcagcggcctgctggagctgaccagggctgtgaggaagatgaggaagttcccagaccagaggcagcagtggctgaggaagcagtatgtgtccctgtaccaggaggatggccgctatgagggccccaccctggcccatgctgtggagctgtttggaggccgccgctggagcgccaggaaccccagccctggcaccagcgccaagaatgctgagaagcccaacatgcagaggaacaacaccctgggcatcagcaccaccaagaagaagaagaagatcctgatgagaggagagagcggggaggtgacagatgatgagatggccaccaggaaggccaagatgcacaaggagtgccgcagccgcagcggcagtgacccccaggacatcaatgagcaggaggagagcgaggtgaatgccatcgccaacccccccaaccccctgcccagcagaagagcccacagcctgaccacagctggcagccccaacctggccgccggcaccagcagccccatccggcctgtgagcagccctgtgctgagcagcagcaacaagagccccagcagcgcctggagcagcagctcctggcacggccgcatcaagggcggcatgaagggcttccagagcttcatggtgtctgacagcaacatgagctttgtggagtttgtggagctgttcaagagcttctctgtgcgcagcaggaaggacctgaaggacctgtttgatgtgtatgctgtgccctgcaacagaagtggcagcgagagcgcccccctgtacaccaacctgaccattgatgagaacaccagtgacctgcagcctgacctggacctgctgaccagaaatgtgtctgacctgggcctcttcatcaagagcaagcagcagctgagtgacaaccagaggcagatcagtgatgccatcgccgccgccagcatcgtgaccaacggcaccggcatcgagagcaccagcctgggcatcttcggcgtgggcatcctgcagctgaatgacttcctggtgaactgccagggcgagcactgcacctatgatgagatcctgagcatcatccagaagtttgagcccagcatctccatgtgccaccagggcctgatgagctttgagggctttgcccgcttcctgatggacaaggagaactttgccagcaagaatgatgagagccaggagaacatcaaggagctgcagctgcccctgagctactactacatcgagagcagccacaacacctacctgaccggccaccagctgaagggggagagctctgtggagctgtacagccaggtgctgctgcagggctgccgctctgtggagctggactgctgggatggagatgatggcatgcccatcatctaccacggccacaccctgaccaccaagatccccttcaaggaggtggtggaggccatcgacagaagtgccttcatcaacagcgacctgcccatcatcatcagcattgagaaccactgcagcctgccccagcagaggaagatggccgagatcttcaagacagtgtttggagagaagctggtgaccaagttcctgtttgaaacagacttcagtgatgaccccatgctgcccagcccagaccagctgaggaagaaggtgctgctgaagaacaagaagctgaaggcccaccagacccctgtggacatcctgaagcagaaggcccaccagctggcctccatgcaggtgcaggcctacaacggcggcaatgccaaccccaggcctgccaacaatgaggaggaggaggatgaggaggatgaatatgactatgactatgagagcctgagtgatgacaacatcctggaggacaggcctgagaacaagagctgcaatgacaagctgcagtttgagtacaatgaggagatccccaagaggatcaagaaggctgacaacagcgcctgcaacaagggcaaggtgtatgacatggagctgggggaggagttctacctggaccagaacaagaaggagagccggcagatcgcccctgagctgagtgacctggtgatctactgccaggccgtgaagtttcctggcctgagcaccctgaatgccagcggcagcagccggggcaaggagaggaagagcaggaagagcatctttggaaacaaccctggccgcatgagccctggagaaacagccagcttcaacaagaccagcggcaagagcagctgtgagggcatccggcagacctgggaggagagcagcagccccctgaaccccaccaccagcctgagcgccatcatccgcacccccaagtgctaccacatcagcagcctgaatgaaaatgctgccaagaggctgtgccgccgctacagccagaagctgacccagcacacagcctgccagctgctgcggacctacccagctgccaccagaattgacagcagcaaccccaaccccctgatgttctggctgcacggcatccagctggtggccctgaactaccagacagatgacctgcccctgcacctgaatgctgccatgtttgaggccaatggaggctgcggctacgtgctgaagccccctgtgctgtgggacaagaactgccccatgtaccagaagttcagccccctggagcgggacctggacagcatggaccctgctgtgtacagcctgaccatcgtgtctggccagaatgtgtgccccagcaacagcatgggcagcccctgcatcgaggtggatgtgctgggcatgcccctggacagctgccacttccgcaccaagcccatccacaggaacaccctgaaccccatgtggaatgagcagttcctgttccacgtgcactttgaggacctggtgttcctgcgctttgctgtggtggagaacaacagcagcgctgtgacagcccagaggatcatccccctgaaggccctgaagaggggctaccgccacctgcagctgaggaacctgcacaatgaggtgctggagatcagcagcctcttcatcaacagcaggaggatggaggagaacagcagcggcaacaccatgtctgccagctccatgttcaacacagaggagaggaagtgcctgcagacccaccgggtgacagtgcatggagtgcccggccctgagcccttcaccgtcttcaccatcaatggaggcaccaaggccaagcagctgctgcagcagatcctgaccaatgagcaggacatcaagcctgtgaccacagactacttcctgatggaggagaagtacttcatcagcaaggagaagaatgaatgtaggaagcagcccttccagagggccatcggccctgaggaggagatcatgcagatcctgagctcctggttccctgaggagggctacatgggcagaattgtgctgaagacccagcaggagaacctggaggagaagaacatcgtgcaggatgacaaggaggtgatcctgagcagcgaggaggagagcttctttgtgcaggtgcatgatgtgtccccagagcagcccaggacagtcatcaaggccccccgggtgtccacagcccaggatgtgatccagcagaccctgtgcaaggccaagtacagctacagcatcctgagcaaccccaaccccagcgactatgtgctgctggaggaggtggtgaaggacaccaccaacaagaagaccaccacccccaagagcagccagagggtgctgctggaccaggagtgtgtgttccaggcccagagcaagtggaagggggccggcaagttcatcctgaagctgaaggagcaggtgcaggccagccgggaggacaagaagaagggcatcagctttgccagcgagctgaagaagctgaccaagagcaccaagcagccccggggcctgaccagccccagccagctgctgaccagcgagagcatccagaccaaggaggagaagcctgtgggcggcctgagcagcagtgacaccatggactaccggcagtag

SEQ ID NO: 164116 - DNA, 6939 bp, synthetic construct
  misc_feature 1..6939: note = Description of Artificial Sequence: Synthetic coding sequence
  source 1..6939: mol_type = other DNA
atgaccagcgaggagatgacagcctctgtgctgatccctgtgacccagaggaaggtggtgtctgcccagagcgctgctgatgagagcagcgagaaggtgtctgacatcaacatcagcaaggcccacacagtgagaagaagtggagagaccagccacaccatcagccagctgaacaagctgaaggaggagcccagcggcagcaacctgcccaagatcctgagcatcgcccgggagaagatcgtgtctgatgagaacagcaatgagaagtgctgggagaagatcatgccagacagcgccaagaacctgaacatcaactgcaacaacatcctgaggaaccaccagcacggcctgccccagaggcagttctatgagatgtacaacagcgtggccgaggaggacctgtgcctggagaccggcatccccagccccctggagaggaaggtgtttcctggcatccagctggagctggaccggcccagcatgggcatcagccccctgggcaaccagagcgtcatcattgaaacaggccgggcccacccagacagcagaagagctgtgttccacttccactatgaggtggacaggaggatgtctgacaccttctgcaccctgtctgagaacctgatcctggatgactgtggcaactgtgtgcccctgcccggcggggaggagaagcagaagaagaactacgtggcctacacctgcaagctgatggagctggccaagaactgtgacaacaagaatgagcagctgcagtgtgaccactgtgacaccctgaatgacaagtacttctgctttgagggcagctgtgagaaggtggacatggtgtacagcggggacagcttctgcaggaaggacttcacagacagccaggccgccaagaccttcctgagccactttgaggacttcccagacaactgtgatgatgtggaggaggatgccttcaagagcaagaaggagaggagcaccctgctggtgcggcgcttctgcaagaatgaccgggaggtgaagaagtctgtgtacacaggcacccgggccatcgtgaggaccctgcccagcggccacatcggcctgacagcctggagctacatcgaccagaagagaaatggccccctgctgccctgtggccgggtgatggagccccccagcacagtggagatccggcaggacggcagccagaggctgtctgaggcccagtggtaccccatctacaatgctgtgcggcgggaggagacagaaaatacagtgggcagcctgctgcacttcctgaccaagctgcctgccagcgagacagcccacggccgcatctctgtgggcccctgcctgaagcagtgtgtgcgggacacagtgtgtgagtaccgggccaccctgcagaggaccagcatcagccagtacatcaccggcagcctgctggaggccaccaccagcctgggcgcccggagcggcctgctgagcacctttggaggcagcactggaaggatgatgctgaaggagcggcagcccggccccagcgtggccaacagcaatgccctgcccagcagcagcgctggcatcagcaaggagctgattgacctgcagcccctcatccagtttcctgaggaggtggccagcatcctgatggagcaggagcagaccatctaccgccgggtgctgcctgtggactacctgtgcttcctgacccgggacctgggcaccccagagtgccagagcagcctgccctgcctgaaggccagcatcagcgccagcatcctgaccacccagaatggagagcacaatgccctggaggacctggtgatgaggttcaatgaggtgtcctcctgggtgacctggctgatcctgacagctggctccatggaggagaagcgggaggtgttctcctacctggtgcacgtggccaagtgctgctggaacatgggcaactacaatgctgtgatggagttcctggccggcctgcggagcaggaaggtgctgaagatgtggcagttcatggaccagagcgacatcgagaccatgaggagcctgaaggatgccatggcccagcacgagagcagctgtgagtacaggaaggtggtgacccgggccctgcacatccctggctgcaaggtggtgcccttctgtggggtcttcctgaaggagctgtgtgaggtgctggatggagccagcggcctgatgaagctgtgcccccgctacaacagccaggaggagaccctggagtttgtggccgactacagcggccaggacaacttcctgcagagggtgggccagaatggcctgaagaacagcgagaaggagagcacagtgaacagcatcttccaggtgatccgcagctgcaacagaagcctggagacagatgaggaggacagccccagcgagggcaacagcagcaggaagagcagcctgaaggacaagagccgctggcagttcatcatcggggacctgctggacagcgacaatgacatctttgagcagagcaaggagtatgacagccacggcagcgaggacagccagaaggcctttgaccatggaacagagctgatcccctggtacgtgctgagcatccaggctgatgtgcaccagttcctgctgcagggcgccaccgtcatccactatgaccaggacacccacctgagcgcccgctgcttcctgcagctgcagcctgacaacagcaccctgacctgggtgaagcccaccacagccagccctgccagcagcaaggccaagctgggcgtgctgaacaacacagctgagcccgggaagttccccctgctgggcaatgccggcctgagcagcctgacagagggcgtgctggacctgtttgctgtgaaggctgtgtacatgggccaccctggcatcgacatccacacagtgtgtgtgcagaacaagctgggctccatgttcctgtctgagaccggggtgaccctgctgtatggcctgcagaccacagacaaccggctgctgcactttgtggcccccaagcacacagccaagatgctgttcagcggcctgctggagctgaccagggctgtgaggaagatgaggaagttcccagaccagaggcagcagtggctgaggaagcagtatgtgtccctgtaccaggaggatggccgctatgagggccccaccctggcccatgctgtggagctgtttggaggccgccgctggagcgccaggaaccccagccctggcaccagcgccaagaatgctgagaagcccaacatgcagaggaacaacaccctgggcatcagcaccaccaagaagaagaagaagatcctgatgagaggagagagcggggaggtgacagatgatgagatggccaccaggaaggccaagatgcacaaggagtgccgcagccgcagcggcagtgacccccaggacatcaatgagcaggaggagagcgaggtgaatgccatcgccaacccccccaaccccctgcccagcagaagagcccacagcctgaccacagctggcagccccaacctggccgccggcaccagcagccccatccggcctgtgagcagccctgtgctgagcagcagcaacaagagccccagcagcgcctggagcagcagctcctggcacggccgcatcaagggcggcatgaagggcttccagagcttcatggtgtctgacagcaacatgagctttgtggagtttgtggagctgttcaagagcttctctgtgcgcagcaggaaggacctgaaggacctgtttgatgtgtatgctgtgccctgcaacagaagtggcagcgagagcgcccccctgtacaccaacctgaccattgatgagaacaccagtgacctgcagcctgacctggacctgctgaccagaaatgtgtctgacctgggcctcttcatcaagagcaagcagcagctgagtgacaaccagaggcagatcagtgatgccatcgccgccgccagcatcgtgaccaacggcaccggcatcgagagcaccagcctgggcatcttcggcgtgggcatcctgcagctgaatgacttcctggtgaactgccagggcgagcactgcacctatgatgagatcctgagcatcatccagaagtttgagcccagcatctccatgtgccaccagggcctgatgagctttgagggctttgcccgcttcctgatggacaaggagaactttgccagcaagaatgatgagagccaggagaacatcaaggagctgcagctgcccctgagctactactacatcgagagcagccacaacacctacctgaccggccaccagctgaagggggagagctctgtggagctgtacagccaggtgctgctgcagggctgccgctctgtggagctggactgctgggatggagatgatggcatgcccatcatctaccacggccacaccctgaccaccaagatccccttcaaggaggtggtggaggccatcgacagaagtgccttcatcaacagcgacctgcccatcatcatcagcattgagaaccactgcagcctgccccagcagaggaagatggccgagatcttcaagacagtgtttggagagaagctggtgaccaagttcctgtttgaaacagacttcagtgatgaccccatgctgcccagcccagaccagctgaggaagaaggtgctgctgaagaacaagaagctgaaggcccaccagacccctgtggacatcctgaagcagaaggcccaccagctggcctccatgcaggtgcaggcctacaacggcggcaatgccaaccccaggcctgccaacaatgaggaggaggaggatgaggaggatgaatatgactatgactatgagagcctgagtgatgacaacatcctggaggacaggcctgagaacaagagctgcaatgacaagctgcagtttgagtacaatgaggagatccccaagaggatcaagaaggctgacaacagcgcctgcaacaagggcaaggtgtatgacatggagctgggggaggagttctacctggaccagaacaagaaggagagccggcagatcgcccctgagctgagtgacctggtgatctactgccaggccgtgaagtttcctggcctgagcaccctgaatgccagcggcagcagccggggcaaggagaggaagagcaggaagagcatctttggaaacaaccctggccgcatgagccctggagaaacagccagcttcaacaagaccagcggcaagagcagctgtgagggcatccggcagacctgggaggagagcagcagccccctgaaccccaccaccagcctgagcgccatcatccgcacccccaagtgctaccacatcagcagcctgaatgaaaatgctgccaagaggctgtgccgccgctacagccagaagctgacccagcacacagcctgccagctgctgcggacctacccagctgccaccagaattgacagcagcaaccccaaccccctgatgttctggctgcacggcatccagctggtggccctgaactaccagacagatgacctgcccctgcacctgaatgctgccatgtttgaggccaatggaggctgcggctacgtgctgaagccccctgtgctgtgggacaagaactgccccatgtaccagaagttcagccccctggagcgggacctggacagcatggaccctgctgtgtacagcctgaccatcgtgtctggccagaatgtgtgccccagcaacagcatgggcagcccctgcatcgaggtggatgtgctgggcatgcccctggacagctgccacttccgcaccaagcccatccacaggaacaccctgaaccccatgtggaatgagcagttcctgttccacgtgcactttgaggacctggtgttcctgcgctttgctgtggtggagaacaacagcagcgctgtgacagcccagaggatcatccccctgaaggccctgaagaggggctaccgccacctgcagctgaggaacctgcacaatgaggtgctggagatcagcagcctcttcatcaacagcaggaggatggaggagaacagcagcggcaacaccatgtctgccagctccatgttcaacacagaggagaggaagtgcctgcagacccaccgggtgacagtgcatggagtgcccggccctgagcccttcaccgtcttcaccatcaatggaggcaccaaggccaagcagctgctgcagcagatcctgaccaatgagcaggacatcaagcctgtgaccacagactacttcctgatggaggagaagtacttcatcagcaaggagaagaatgaatgtaggaagcagcccttccagagggccatcggccctgaggaggagatcatgcagatcctgagctcctggttccctgaggagggctacatgggcagaattgtgctgaagacccagcaggagaacctggaggagaagaacatcgtgcaggatgacaaggaggtgatcctgagcagcgaggaggagagcttctttgtgcaggtgcatgatgtgtccccagagcagcccaggacagtcatcaaggccccccgggtgtccacagcccaggatgtgatccagcagaccctgtgcaaggccaagtacagctacagcatcctgagcaaccccaaccccagcgactatgtgctgctggaggaggtggtgaaggacaccaccaacaagaagaccaccacccccaagagcagccagagggtgctgctggaccaggagtgtgtgttccaggcccagagcaagtggaagggggccggcaagttcatcctgaagctgaaggagcaggtgcaggccagccgggaggacaagaagaagggcatcagctttgccagcgagctgaagaagctgaccaagagcaccaagcagccccggggcctgaccagccccagccagctgctgaccagcgagagcatccagaccaaggaggagaagcctgtgggcggcctgagcagcagtgacaccatggactaccggcaggtgaagatcttcaagcaggaggtgaaggagtag

SEQ ID NO: 164117 - DNA, 5985 bp, synthetic construct; identical to SEQ ID NO: 164115
  misc_feature 1..5985: note = Description of Artificial Sequence: Synthetic coding sequence
  source 1..5985: mol_type = other DNA

SEQ ID NO: 164118 - DNA, 4968 bp, synthetic construct
  misc_feature 1..4968: note = Description of Artificial Sequence: Synthetic coding sequence
  source 1..4968: mol_type = other DNA
atgtctgtgatgcagagcggcacccagatgatcaagctgaagaggggcaccaagggcctggtgcggctcttctacctggatgagcacaggacccggctgcgctggaggcccagcaggaagtctgagaaggccaagatcctgattgacagcatctacaaggtgacagagggccggcagagcgagatcttccaccggcaggccgagggcaactttgaccccagctgctgcttcaccatctaccacggcaaccacatggagagcctggacctgatcaccagcaaccctgaggaggcccggacctggatcaccggcctgaagtacctgatggccggcatcagtgatgaggacagcctggccaagaggcagaggacccatgaccagtgggtgaagcagacctttgaggaggccgacaagaatggagatggcctgctgaacatcgaggagatccaccagctgatgcacaagctgaatgtgaacctgcccaggaggaaggtgcggcagatgttccaggaggccgacacagatgagaaccagggcaccctgacctttgaggagttctgtgtgttctacaagatgatgagcctgcggcgggacctgtacctgctgctgctgagctacagcgacaagaaggaccacctgactgtggaggagctggcccagttcctgaaggtggagcagaagatgaacaacgtgaccacagactactgcctggacatcatcaagaagtttgaggtgtctgaggagaacaaggtgaagaatgtgctgggcatcgagggcttcaccaacttcatgaggagccctgcctgtgacatcttcaaccccctgcaccacgaggtgtaccaggacatggaccagcccctgtgcaactactacatcgccagcagccacaacacctacctgactggagaccagctgctgagccagagcaaggtggacatgtatgcccgggtgctgcaggagggctgccgctgtgtggaggtggactgctgggatggcccagatggagagcctgtggtgcaccacggctacaccctgaccagcaagatcctcttcagagatgtggtggagaccatcaacaagcacgcctttgtgaagaatgagttccctgtgatcctgagcattgagaaccactgcagcatccagcagcagaggaagatcgcccagtacctgaagggcatctttggagacaagctggacctgagctctgtggacacaggagagtgcaagcagctgcccagcccccagagcctgaagggcaagatcctggtgaagggcaagaagctgccctaccacctgggagatgatgctgaggagggggaggtgtctgatgaggacagcgcagatgaaattgaagatgagtgcaagttcaagctgcactacagcaatggcaccacagagcaccaggtggagagcttcatcaggaagaagctggagagcctgctgaaggagagccagatccgggacaaggaggaccctgacagcttcaccgtgcgggccctgctgaaggccacccatgagggcctgaatgcccacctgaagcagagcccagatgtgaaggagagcggcaagaagagccacggccgcagcctgatgaccaactttgggaagcacaagaagaccaccaagagccgcagcaagagctacagcacagatgatgaggaggacacccagcagagcacaggcaaggagggcggccagctgtaccgcctgggcagaagaaggaagaccatgaagctgtgccgggagctgagtgacctggtggtgtacaccaacagcgtggccgcccaggacatcgtggatgatggcaccactggaaatgtgctgtccttcagcgagacccgggcccaccaggtggtgcagcagaagtctgagcagttcatgatctacaaccagaagcagctgacccgcatctaccccagcgcctacagaattgacagcagcaacttcaaccccctgccctactggaatgccggctgccagctggtggccctgaactaccagagcgagggccgcatgatgcagctgaacagagccaagttcaaggccaatggaaactgtggctacgtgctgaagccccagcagatgtgcaagggcaccttcaaccccttcagcggggaccccctgcctgccaaccccaagaagcagctgatcctgaaggtgatcagcggccagcagctgcccaagcccccagacagcatgtttggagacagaggagagatcatcgacccctttgtggaggtggagatcatcggcctgcctgtggactgctgcaaggaccagaccagggtggtggatgacaatggcttcaaccctgtgtgggaggagaccctgaccttcaccgtgcacatgcctgagatcgccctggtgcgcttcctggtgtgggaccatgaccccatcggccgggactttgtgggccagaggacagtgaccttcagcagcctggtgcccggctaccgccacgtgtacctggagggcctgacagaggccagcatctttgtgcacatcaccatcaatgagatctacggcaagaaccggcagctgcagggcctgaagggcctcttcaacaagaaccccaggcacagcagcagcgagaacaacagccactacgtgaggaagaggagcattggagaccgcatcctgcggaggacagccagcgccccagccaagggcaggaagaagagcaagatgggcttccaggagatggtggagatcaaggacagcgtgtctgaggccacccgggaccaggatggagtgctgcggaggaccaccaggagcctgcaggcccggcctgtgtccatgcctgtggacaggaacctgctgggcgccctgagcctgcctgtgtctgaaacagccaaggacatcgagggcaaggagaacagcctggccgaggacaaggatggccgcaggaagggcaaggccagcatcaaggacccccacttcctgaacttcaacaagaagctgagcagcagcagcagcgccctgctgcacaaggacaccagccagggcgacaccatcgtgtccacagcccacatgtctgtgactggagagcagctgggcatgagcagcccccggggcggccgcaccaccagcaatgccaccagcaactgccaggagaacccctgccccagcaagagcctgagccccaagcagcacctggccccagaccctgtggtgaaccccacccaggacctgcatggagtgaagatcaaggagaagggcaaccctgaggactttgtggagggcaagagcatcctgagcggctctgtgctgagccacagcaacctggagatcaagaacctggagggcaacagaggcaagggccgggccgccaccagcttcagcctgagtgatgtgtccatgctgtgcagcgacatcccagacctgcacagcacagccatcctgcaggagagcgtcatcagccacctgattgacaacgtgaccctgaccaatgaaaatgagcccggcagcagcatcagcgccctgattggccagtttgatgagaccaacaaccaggccctgactgtggtgagccacctgcacaacacctctgtgatgagcggccactgccccctgcccagcctgggcctgaagatgcccatcaagcacggcttctgcaagggcaagagcaagagcagcttcctgtgcagcagccctgagctgattgccctgagcagcagcgagaccaccaagcacgccaccaacacagtgtatgagaccacctgcacccccatcagcaagaccaagccagatgatgacctgagcagcaaggccaagacagctgccctggagagcaacctgcccggcagccccaacaccagccggggctggctgcccaagagccccaccaagggggaggactgggagaccctgaagagctgcagccctgccagcagcccagacctgaccctggaggatgtgattgctgaccccaccctgtgcttcaacagcggggagagcagcctggtggagattgatggagagagcgagaacctgagcctgaccacctgtgagtacagaagagagggcaccagccagctggccagccccctgaagctgaagtacaaccagggcgtggtggagcacttccagaggggcctgagaaatggctactgcaaggagaccctgcggcccagcgtgcctgagatcttcaacaacatccaggatgtgaagacccagagcatctcctacctggcctaccagggcgccggctttgtgcacaaccacttcagtgacagtgatgccaagatgttccagacctgtgtgccccagcagagcagcgcccaggacatgcacgtgcctgtgcccaagcagctggcccacctgcccctgcctgccctgaagctgcccagcccctgcaagagcaagagcctgggggacctgaccagtgaagatattgcctgcaactttgagagcaagtaccagtgcatcagcaagagctttgtgaccaccggcatccgggacaagaagggcgtgacagtgaagaccaagagcctggagcccattgatgccctgacagagcagctgaggaagctggtgtcctttgaccaggaggacaactgccaggtgctgtacagcaagcaggatgccaaccagctgccccgggccctggtgaggaagctgagcagccgcagccagagccgggtgagaaatattgccagccgggccaaggagaagcaggaggccaacaagcagaaggtgcccaaccccagcaatggagctggggtggtgctgaggaacaagcccagcgcccccaccccagctgtgaacagacacagcacaggcagctacatcgccggctacctgaagaacaccaagggcggcggcctggagggccggggcatccctgagggcgcctgcacagccctgcactacggccacgtggaccagttctgcagcgacaacagcgtgctgcagacagagcccagcagtgatgacaagccagagatctacttcctgctgcggctgtag

SEQ ID NO: 164119 - DNA, 5082 bp, synthetic construct
  misc_feature 1..5082: note = Description of Artificial Sequence: Synthetic coding sequence
  source 1..5082: mol_type = other DNA
atggctgacctggaggtgtacaagaacctgagccctgagaaggtggagcgctgcatgtctgtgatgcagagcggcacccagatgatcaagctgaagaggggcaccaagggcctggtgcggctcttctacctggatgagcacaggacccggctgcgctggaggcccagcaggaagtctgagaaggccaagatcctgattgacagcatctacaaggtgacagagggccggcagagcgagatcttccaccggcaggccgagggcaactttgaccccagctgctgcttcaccatctaccacggcaaccacatggagagcctggacctgatcaccagcaaccctgaggaggcccggacctggatcaccggcctgaagtacctgatggccggcatcagtgatgaggacagcctggccaagaggcagaggacccatgaccagtgggtgaagcagacctttgaggaggccgacaagaatggagatggcctgctgaacatcgaggagatccaccagctgatgcacaagctgaatgtgaacctgcccaggaggaaggtgcggcagatgttccaggaggccgacacagatgagaaccagggcaccctgacctttgaggagttctgtgtgttctacaagatgatgagcctgcggcgggacctgtacctgctgctgctgagctacagcgacaagaaggaccacctgactgtggaggagctggcccagttcctgaaggtggagcagaagatgaacaacgtgaccacagactactgcctggacatcatcaagaagtttgaggtgtctgaggagaacaaggtgaagaatgtgctgggcatcgagggcttcaccaacttcatgaggagccctgcctgtgacatcttcaaccccctgcaccacgaggtgtaccaggacatggaccagcccctgtgcaactactacatcgccagcagccacaacacctacctgactggagaccagctgctgagccagagcaaggtggacatgtatgcccgggtgctgcaggagggctgccgctgtgtggaggtggactgctgggatggcccagatggagagcctgtggtgcaccacggctacaccctgaccagcaagatcctcttcagagatgtggtggagaccatcaacaagcacgcctttgtgaagaatgagttccctgtgatcctgagcattgagaaccactgcagcatccagcagcagaggaagatcgcccagtacctgaagggcatctttggagacaagctggacctgagctctgtggacacaggagagtgcaagcagctgcccagcccccagagcctgaagggcaagatcctggtgaagggcaagaagctgccctaccacctgggagatgatgctgaggagggggaggtgtctgatgaggacagcgcagatgaaattgaagatgagtgcaagttcaagctgcactacagcaatggcaccacagagcaccaggtggagagcttcatcaggaagaagctggagagcctgctgaaggagagccagatccgggacaaggaggaccctgacagcttcaccgtgcgggccctgctgaaggccacccatgagggcctgaatgcccacctgaagcagagcccagatgtgaaggagagcggcaagaagagccacggccgcagcctgatgaccaactttgggaagcacaagaagaccaccaagagccgcagcaagagctacagcacagatgatgaggaggacacccagcagagcacaggcaaggagggcggccagctgtaccgcctgggcagaagaaggaagaccatgaagctgtgccgggagctgagtgacctggtggtgtacaccaacagcgtggccgcccaggacatcgtggatgatggcaccactggaaatgtgctgtccttcagcgagacccgggcccaccaggtggtgcagcagaagtctgagcagttcatgatctacaaccagaagcagctgacccgcatctaccccagcgcctacagaattgacagcagcaacttcaaccccctgccctactggaatgccggctgccagctggtggccctgaactaccagagcgagggccgcatgatgcagctgaacagagccaagttcaaggccaatggaaactgtggctacgtgctgaagccccagcagatgtgcaagggcaccttcaaccccttcagcggggaccccctgcctgccaaccccaagaagcagctgatcctgaaggtgatcagcggccagcagctgcccaagcccccagacagcatgtttggagacagaggagagatcatcgacccctttgtggaggtggagatcatcggcctgcctgtggactgctgcaaggaccagaccagggtggtggatgacaatggcttcaaccctgtgtgggaggagaccctgaccttcaccgtgcacatgcctgagatcgccctggtgcgcttcctggtgtgggaccatgaccccatcggccgggactttgtgggccagaggacagtgaccttcagcagcctggtgcccggctaccgccacgtgtacctggagggcctgacagaggccagcatctttgtgcacatcaccatcaatgagatctacggcaagtggagccccctcatcctgaaccccagctacaccatcctgcacttcctgggcgccaccaagaaccggcagctgcagggcctgaagggcctcttcaacaagaaccccaggcacagcagcagcgagaacaacagccactacgtgaggaagaggagcattggagaccgcatcctgcggaggacagccagcgccccagccaagggcaggaagaagagcaagatgggcttccaggagatggtggagatcaaggacagcgtgtctgaggccacccgggaccaggatggagtgctgcggaggaccaccaggagcctgcaggcccggcctgtgtccatgcctgtggacaggaacctgctgggcgccctgagcctgcctgtgtctgaaacagccaaggacatcgagggcaaggagaacagcctggccgaggacaaggatggccgcaggaagggcaaggccagcatcaaggacccccacttcctgaacttcaacaagaagctgagcagcagcagcagcgccctgctgcacaaggacaccagccagggcgacaccatcgtgtccacagcccacatgtctgtgactggagagcagctgggcatgagcagcccccggggcggccgcaccaccagcaatgccaccagcaactgccaggagaacccctgccccagcaagagcctgagccccaagcagcacctggccccagaccctgtggtgaaccccacccaggacctgcatggagtgaagatcaaggagaagggcaaccctgaggactttgtggagggcaagagcatcctgagcggctctgtgctgagccacagcaacctggagatcaagaacctggagggcaacagaggcaagggccgggccgccaccagcttcagcctgagtgatgtgtccatgctgtgcagcgacatcccagacctgcacagcacagccatcctgcaggagagcgtcatcagccacctgattgacaacgtgaccctgaccaatgaaaatgagcccggcagcagcatcagcgccctgattggccagtttgatgagaccaacaaccaggccctgactgtggtgagccacctgcacaacacctctgtgatgagcggccactgccccctgcccagcctgggcctgaagatgcccatcaagcacggcttctgcaagggcaagagcaagagcagcttcctgtgcagcagccctgagctgattgccctgagcagcagcgagaccaccaagcacgccaccaacacagtgtatgagaccacctgcacccccatcagcaagaccaagccagatgatgacctgagcagcaaggccaagacagctgccctggagagcaacctgcccggcagccccaacaccagccggggctggctgcccaagagccccaccaagggggaggactgggagaccctgaagagctgcagccctgccagcagcccagacctgaccctggaggatgtgattgctgaccccaccctgtgcttcaacagcggggagagcagcctggtggagattgatggagagagcgagaacctgagcctgaccacctgtgagtacagaagagagggcaccagccagctggccagccccctgaagctgaagtacaaccagggcgtggtggagcacttccagaggggcctgagaaatggctactgcaaggagaccctgcggcccagcgtgcctgagatcttcaacaacatccaggatgtgaagacccagagcatctcctacctggcctaccagggcgccggctttgtgcacaaccacttcagtgacagtgatgccaagatgttccagacctgtgtgccccagcagagcagcgcccaggacatgcacgtgcctgtgcccaagcagctggcccacctgcccctgcctgccctgaagctgcccagcccctgcaagagcaagagcctgggggacctgaccagtgaagatattgcctgcaactttgagagcaagtaccagtgcatcagcaagagctttgtgaccaccggcatccgggacaagaagggcgtgacagtgaagaccaagagcctggagcccattgatgccctgacagagcagctgaggaagctggtgtcctttgaccaggaggacaactgccaggtgctgtacagcaagcaggatgccaaccagctgccccgggccctggtgaggaagctgagcagccgcagccagagccgggtgagaaatattgccagccgggccaaggagaagcaggaggccaacaagcagaaggtgcccaaccccagcaatggagctggggtggtgctgaggaacaagcccagcgcccccaccccagctgtgaacagacacagcacaggcagctacatcgccggctacctgaagaacaccaagggcggcggcctggagggccggggcatccctgagggcgcctgcacagccctgcactacggccacgtggaccagttctgcagcgacaacagcgtgctgcagacagagcccagcagtgatgacaagccagagatctacttcctgctgcggctgtag

SEQ ID NO: 164120 - DNA, 4968 bp, synthetic construct; identical to SEQ ID NO: 164118
  misc_feature 1..4968: note = Description of Artificial Sequence: Synthetic coding sequence
  source 1..4968: mol_type = other DNA

SEQ ID NO: 164121 - DNA, 3009 bp, synthetic construct
  misc_feature 1..3009: note = Description of Artificial Sequence: Synthetic coding sequence
  source 1..3009: mol_type = other DNA
atggctgacctggaggtgtacaagaacctgagccctgagaaggtggagcgctgcatgtctgtgatgcagagcggcacccagatgatcaagctgaagaggggcaccaagggcctggtgcggctcttctacctggatgagcacaggacccggctgcgctggaggcccagcaggaagtctgagaaggccaagatcctgattgacagcatctacaaggtgacagagggccggcagagcgagatcttccaccggcaggccgagggcaactttgaccccagctgctgcttcaccatctaccacggcaaccacatggagagcctggacctgatcaccagcaaccctgaggaggcccggacctggatcaccggcctgaagtacctgatggccggcatcagtgatgaggacagcctggccaagaggcagaggacccatgaccagtgggtgaagcagacctttgaggaggccgacaagaatggagatggcctgctgaacatcgaggagatccaccagctgatgcacaagctgaatgtgaacctgcccaggaggaaggtgcggcagatgttccaggaggccgacacagatgagaaccagggcaccctgacctttgaggagttctgtgtgttctacaagatgatgagcctgcggcgggacctgtacctgctgctgctgagctacagcgacaagaaggaccacctgactgtggaggagctggcccagttcctgaaggtggagcagaagatgaacaacgtgaccacagactactgcctggacatcatcaagaagtttgaggtgtctgaggagaacaaggtgaagaatgtgctgggcatcgagggcttcaccaacttcatgaggagccctgcctgtgacatcttcaaccccctgcaccacgaggtgtaccaggacatggaccagcccctgtgcaactactacatcgccagcagccacaacacctacctgactggagaccagctgctgagccagagcaaggtggacatgtatgcccgggtgctgcaggagggctgccgctgtgtggaggtggactgctgggatggcccagatggagagcctgtggtgcaccacggctacaccctgaccagcaagatcctcttcagagatgtggtggagaccatcaacaagcacgcctttgtgaagaatgagttccctgtgatcctgagcattgagaaccactgcagcatccagcagcagaggaagatcgcccagtacctgaagggcatctttggagacaagctggacctgagctctgtggacacaggagagtgcaagcagctgcccagcccccagagcctgaagggcaagatcctggtgaagggcaagaagctgccctaccacctgggagatgatgctgaggagggggaggtgtctgatgaggacagcgcagatgaaattgaagatgagtgcaagttcaagctgcactacagcaatggcaccacagagcaccaggtggagagcttcatcaggaagaagctggagagcctgctgaaggagagccagatccgggacaaggaggaccctgacagcttcaccgtgcgggccctgctgaaggccacccatgagggcctgaatgcccacctgaagcagagcccagatgtgaaggagagcggcaagaagagccacggccgcagcctgatgaccaactttgggaagcacaagaagaccaccaagagccgcagcaagagctacagcacagatgatgaggaggacacccagcagagcacaggcaaggagggcggccagctgtaccgcctgggcagaagaaggaagaccatgaagctgtgccgggagctgagtgacctggtggtgtacaccaacagcgtggccgcccaggacatcgtggatgatggcaccactggaaatgtgctgtccttcagcgagacccgggcccaccaggtggtgcagcagaagtctgagcagttcatgatctacaaccagaagcagctgacccgcatctaccccagcgcctacagaattgacagcagcaacttcaaccccctgccctactggaatgccggctgccagctggtggccctgaactaccagagcgagggccgcatgatgcagctgaacagagccaagttcaaggccaatggaaactgtggctacgtgctgaagccccagcagatgtgcaagggcaccttcaaccccttcagcggggaccccctgcctgccaaccccaagaagcagctgatcctgaaggtgatcagcggccagcagctgcccaagcccccagacagcatgtttggagacagaggagagatcatcgacccctttgtggaggtggagatcatcggcctgcctgtggactgctgcaaggaccagaccagggtggtggatgacaatggcttcaaccctgtgtgggaggagaccctgaccttcaccgtgcacatgcctgagatcgccctggtgcgcttcctggtgtgggaccatgaccccatcggccgggactttgtgggccagaggacagtgaccttcagcagcctggtgcccggctaccgccacgtgtacctggagggcctgacagaggccagcatctttgtgcacatcaccatcaatgagatctacggcaagtggagccccctcatcctgaaccccagctacaccatcctgcacttcctgggcgccaccaagaaccggcagctgcagggcctgaagggcctcttcaacaagaaccccaggcacagcagcagcgagaacaacagccactacgtgaggaagaggagcattggagaccgcatcctgcggaggacagccagcgccccagccaagggcaggaagaagagcaagatgggcttccaggagatggtggagatcaaggacagcgtgtctgaggccacccgggaccaggatggagtgctgcggaggaccaccaggagcctgcaggcccggcctgtgtccatgcctgtggacaggaacctgctgggcgccctgagcctgcctgtgtctgaaacagccaaggacatcgagggcaaggagaacagcctggtgcagatctag

SEQ ID NO: 164122 - DNA, 4968 bp, synthetic construct; identical to SEQ ID NO: 164118
  misc_feature 1..4968: note = Description of Artificial Sequence: Synthetic coding sequence
  source 1..4968: mol_type = other DNA

SEQ ID NO: 164123 - DNA, 3045 bp, synthetic construct
  misc_feature 1..3045: note = Description of Artificial Sequence: Synthetic coding sequence
  source 1..3045: mol_type = other DNA
atggctgacctggaggtgtacaagaacctgagccctgagaaggtggagcgctgcatgtctgtgatgcagagcggcacccagatgatcaagctgaagaggggcaccaagggcctggtgcggctcttctacctggatgagcacaggacccggctgcgctggaggcccagcaggaagtctgagaaggccaagatcctgattgacagcatctacaaggtgacagagggccggcagagcgagatcttccaccggcaggccgagggcaactttgaccccagctgctgcttcaccatctaccacggcaaccacatggagagcctggacctgatcaccagcaaccctgaggaggcccggacctggatcaccggcctgaagtacctgatggccggcatcagtgatgaggacagcctggccaagaggcagaggacccatgaccagtgggtgaagcagacctttgaggaggccgacaagaatggagatggcctgctgaacatcgaggagatccaccagctgatgcacaagctgaatgtgaacctgcccaggaggaaggtgcggcagatgttccaggaggccgacacagatgagaaccagggcaccctgacctttgaggagttctgtgtgttctacaagatgatgagcctgcggcgggacctgtacctgctgctgctgagctacagcgacaagaaggaccacctgactgtggaggagctggcccagttcctgaaggtggagcagaagatgaacaacgtgaccacagactactgcctggacatcatcaagaagtttgaggtgtctgaggagaacaaggtgaagaatgtgctgggcatcgagggcttcaccaacttcatgaggagccctgcctgtgacatcttcaaccccctgcaccacgaggtgtaccaggacatggaccagcccctgtgcaactactacatcgccagcagccacaacacctacctgactggagaccagctgctgagccagagcaaggtggacatgtatgcccgggtgctgcaggagggctgccgctgtgtggaggtggactgctgggatggcccagatggagagcctgtggtgcaccacggctacaccctgaccagcaagatcctcttcagagatgtggtggagaccatcaacaagcacgcctttgtgaagaatgagttccctgtgatcctgagcattgagaaccactgcagcatccagcagcagaggaagatcgcccagtacctgaagggcatctttggagacaagctggacctgagctctgtggacacaggagagtgcaagcagctgcccagcccccagagcctgaagggcaagatcctggtgaagggcaagaagctgccctaccacctgggagatgatgctgaggagggggaggtgtctgatgaggacagcgcagatgaaattgaagatgagtgcaagttcaagctgcactacagcaatggcaccacagagcaccaggtggagagcttcatcaggaagaagctggagagcctgctgaaggagagccagatccgggacaaggaggaccctgacagcttcaccgtgcgggccctgctgaaggccacccatgagggcctgaatgcccacctgaagcagagcccagatgtgaaggagagcggcaagaagagccacggccgcagcctgatgaccaactttgggaagcacaagaagaccaccaagagccgcagcaagagctacagcacagatgatgaggaggacacccagcagagcacaggcaaggagggcggccagctgtaccgcctgggcagaagaaggaagaccatgaagctgtgccgggagctgagtgacctggtggtgtacaccaacagcgtggccgcccaggacatcgtggatgatggcaccactggaaatgtgctgtccttcagcgagacccgggcccaccaggtggtgcagcagaagtctgagcagttcatgatctacaaccagaagcagctgacccgcatctaccccagcgcctacagaattgacagcagcaacttcaaccccctgccctactggaatgccggctgccagctggtggccctgaactaccagagcgagggccgcatgatgcagctgaacagagccaagttcaaggccaatggaaactgtggctacgtgctgaagccccagcagatgtgcaagggcaccttcaaccccttcagcggggaccccctgcctgccaaccccaagaagcagctgatcctgaaggtgatcagcggccagcagctgcccaagcccccagacagcatgtttggagacagaggagagatcatcgacccctttgtggaggtggagatcatcggcctgcctgtggactgctgcaaggaccagaccagggtggtggatgacaatggcttcaaccctgtgtgggaggagaccctgaccttcaccgtgcacatgcctgagatcgccctggtgcgcttcctggtgtgggaccatgaccccatcggccgggactttgtgggccagaggacagtgaccttcagcagcctggtgcccggctaccgccacgtgtacctggagggcctgacagaggccagcatctttgtgcacatcaccatcaatgagatctacggcaagaaccggcagctgcagggcctgaagggcctcttcaacaagaaccccaggcacagcagcagcgagaacaacagccactacgtgaggaagaggagcattggagaccgcatcctgcggaggacagccagcgccccagccaagggcaggaagaagagcaagatgggcttccaggagatggtggagatcaaggacagcgtgtctgaggccacccgggaccaggatggagtgctgcggaggaccaccaggagcctgcaggcccggcctgtgtccatgcctgtggacaggaacctgctgggcgccctgagcctgcctgtgtctgaaacagccaaggacatcgagggcaaggagaacagcctggacagcagcttctgccggcccacagagcaggccaaggccgagatgtgcaaggtgcccttcccccggcagctggagtgtgtgatgaagatggagatcagcgagacctag

SEQ ID NO: 164124 - DNA, 3507 bp, synthetic construct
  misc_feature 1..3507: note = Description of Artificial Sequence: Synthetic coding sequence
  source 1..3507: mol_type = other DNA
atgttccgggaggccgacacagatgaccaccagggcaccctgggctttgaggagttctgtgccttctacaagatgatgagcacccggcgggacctgtacctgctgatgctgacctacagcaaccacaaggaccacctggatgctgccagcctgcagcgcttcctgcaggtggagcagaagatggccggcgtgaccctggagagctgccaggacatcatcgagcagtttgagccctgcccagagaacaagagcaagggcctgctgggcattgatggcttcaccaactacaccaggagccctgctggggacatcttcaaccctgagcaccaccacgtgcaccaggacatgacccagcccctgagccactacttcatcaccagcagccacaacacctacctggtgggggaccagctgatgagccagagccgggtggacatgtatgcctgggtgctgcaggccggctgccgctgtgtggaggtggactgctgggatggcccagatggagagcccatcgtgcaccacggctacaccctgaccagcaagatcctcttcaaggatgtgattgagaccatcaacaagtatgccttcatcaagaatgagtaccctgtgatcctgagcattgagaaccactgcagcgtcatccagcagaagaagatggcccagtacctgacagacatcctgggggacaagctggacctgagctctgtgtccagtgaagatgccaccaccctgcccagcccccagatgctgaagggcaagatcctggtgaagggcaagaagctgcctgccaacatcagtgaagatgctgaggagggggaggtgtctgatgaagattctgcagatgaaattgatgatgactgcaagctgctgaatggagatgccagcaccaacaggaagagggtggagaacacagccaagaggaagctggacagcctcatcaaggagagcaagatccgggactgtgaggaccccaacaacttctctgtgtccaccctgagccccagcggcaagctgggcaggaagagcaaggccgaggaggatgtggagagcggggaggatgctggggccagcagaagaaatggccgcctggtggtgggcagcttcagcaggaggaagaagaagggcagcaagctgaagaaggccgcctctgtggaggagggagatgagggccaggacagccctgggggccagagcagaggagccacccggcagaagaagaccatgaagctgagccgggccctgagtgacctggtgaagtacaccaagtctgtggccacccatgacatcgagatggaggccgccagctcctggcaggtgtcctccttcagcgagaccaaggcccaccagatcctgcagcagaagccagcccagtacctgcgcttcaaccagcagcagctgagccgcatctaccccagcagctacagagtggacagcagcaactacaacccccagcccttctggaatgccggctgccagatgggcgtcttcaaccccaacagcgaggaccccctgcccggccagctgaagaagcagctggtgctgcgcatcatcagcggccagcagctgcccaagccccgggacagcatgctgggggacagaggagagatcatcgacccctttgtggaggtggagatcatcggcctgcctgtggactgcagccgggagcagaccagggtggtggatgacaatggcttcaaccccacctgggaggagaccctggtgttcatggtgcacatgcctgagatcgccctggtgcgcttcctggtgtgggaccatgaccccatcggccgggacttcatcggccagaggaccctggccttcagctccatgatgcctggctaccgccacgtgtacctggagggcatggaggaggccagcatctttgtgcacgtggccgtgtctgacatcagcggcaaggtgaagcaggccctgggcctgaagggcctcttcctgcggggccccaagccaggcagcctggacagccatgctgctggccggcccccagcccggcccagcgtgtcccagaggatcctgcggaggacagccagcgcccccaccaagagccagaagccaggaagaagaggcttccctgagctggtgctgggcacccgggacaccggcagcaaaggagtggctgatgatgtggtgcccccaggccctggccctgcccctgaggccccagcccaggagggccctggcagcggcagcccccgggacacccggcccctgagcacccagaggcccctgccccccctgtgcagcctggagaccatcgccgaggagcccgcccctggccctggccccccacctcctgctgctgtgcccaccagcagcagccagggccggcccccctaccccactggacctggggccaacgtggccagccccctggaggacacagaggagccccgggacagccggccccggccctgcaatggagagggcgctgggggcgcctatgaaagagcccctggcagccagacagatggccgcagccagcccaggaccctgggccacctgcctgtgatccggcgggtgaagtctgagggccaggtgcccacagagcccctgggcggctggaggcccctggccgcccccttccctgccccagctgtgtacagtgatgccactggaagtgaccccctgtggcagaggctggagccctgtggccaccgggacagcgtgagcagcagcagctccatgagcagcagtgacaccgtcatcgacctgagcctgcccagcctgggcctgggccgcagccgggagaacctggccggggcccacatgggccgcctgcccccccggccccacagcgccagcgctgcccggccagacctgccccctgtgaccaagagcaagagcaaccccaacctgcgggccaccggccagaggcctcccatcccagatgagctgcagcccaggagcctggcccccaggatggccggcctgcccttccggcccccctggggctgcctgagcctggtgggcgtgcaggactgccctgtggccgccaagagcaagagcctgggggacctgacagcagatgactttgcccccagctttgaaggaggcagccggcggctgagccacagcctgggcctgcccggcggcaccaggagagtgtctggccctggggtgagaagagacaccctgacagagcagctgcgctggctgactgtgttccagcaggccggggacatcaccagccccaccagcctgggccctgctggggagggcgtggccggcggccctggctttgtgcggcgcagcagcagccgcagccacagccgggtgcgggccatcgccagccgggcccggcaggcccaggagcggcagcagaggctgcagggcctgggccggcagggccccccagaggaggagcggggcaccccagagggcgcctgcagcgtgggccacgagggctctgtggatgccccagcccccagcaagggggccctgggccctgccagcgctgctgctgagaacctggtgctgctgcggctgtag

SEQ ID NO: 164125 - DNA, 1500 bp, synthetic construct
  misc_feature 1..1500: note = Description of Artificial Sequence: Synthetic coding sequence
  source 1..1500: mol_type = other DNA
atgggcgccatgcaggagggcatgcagatggtgaagctgcggggcggcagcaagggcctggtgcgcttctactacctggatgagcacaggagctgcatccgctggaggcccagcaggaagaatgagaaggccaagatcagcattgacagcatccaggaggtgtctgagggccggcagagcgaggtgttccagcgctacccagatggcagcttcatcatcgacccctttgtggaggtggagatcatcggcctgcctgtggactgcagccgggagcagaccagggtggtggatgacaatggcttcaaccccacctgggaggagaccctggtgttcatggtgcacatgcctgagatcgccctggtgcgcttcctggtgtgggaccatgaccccatcggccgggacttcatcggccagaggaccctggccttcagctccatgatgcctggctaccgccacgtgtacctggagggcatggaggaggccagcatctttgtgcacgtggccgtgtctgacatcagcggcaaggtgaagcaggccctgggcctgaagggcctcttcctgcggggccccaagccaggcagcctggacagccatgctgctggccggcccccagcccggcccagcgtgtcccagaggatcctgcggaggacagccagcgcccccaccaagagccagaagccaggaagaagaggcttccctgagctggtgctgggcacccgggacaccggcagcaaaggagtggctgatgatgtggtgcccccaggccctggccctgcccctgaggccccagcccaggagggccctggcagcggcagcccccggggcaaggccccagctgctgtggccgagaagagccctgtgcgggtgcggcccccccgggtgctggatggccctggccctgctggcatggccgccacctgcatgaagtgtgtggtgggcagctgtgccggcgtgaacacaggaggcctgcagcgggagcggccccccagccctggccctgccagccggcaggccgccatccggcagcagccccgggcccgggctgacagcctgggcgccccctgctgcggcctggacccccacgccatccctggccgcagccgggaggcccccaagggccctggggcctggaggcagggccctgggggcagcggctccatgagcagtgacagcagcagcccagacagccctggcatccctgagaggagcccccgctggccagagggcgcctgccggcagcccggggccctgcagggcgagatgtctgccctgtttgcccagaagctggaggagatccgcagcaagagccccatgttttctgctgggaagcccctgctgccctgtgtggtgctgccccacgcccctggcatggccggccctggcagccctgctgctgccagcgcctggacagtgagcccccgggtgctggtgctggtggccctgtacccctggcactgcctgcggggcaccctgctgccctggctggcctgtggcccctag

SEQ ID NO: 164126 - DNA, 3177 bp, synthetic construct
  misc_feature 1..3177: note = Description of Artificial Sequence: Synthetic coding sequence
  source 1..3177: mol_type = other DNA
atggccggcatcagtgatgaggacagcctggcccggcggcagaggacccgggaccagtggctgaagcagacctttgatgaggccgacaagaatggagatggcagcctgagcatcggggaggtgctgcagctgctgcacaagctgaatgtgaacctgccccggcagagggtgaagcagatgttccgggaggccgacacagatgaccaccagggcaccctgggctttgaggagttctgtgccttctacaagatgatgagcacccggcgggacctgtacctgctgatgctgacctacagcaaccacaaggaccacctggatgctgccagcctgcagcgcttcctgcaggtggagcagaagatggccggcgtgaccctggagagctgccaggacatcatcgagcagtttgagccctgcccagagaacaagagcaagggcctgctgggcattgatggcttcaccaactacaccaggagccctgctggggacatcttcaaccctgagcaccaccacgtgcaccaggacatgacccagcccctgagccactacttcatcaccagcagccacaacacctacctggtgggggaccagctgatgagccagagccgggtggacatgtatgcctgggtgctgcaggccggctgccgctgtgtggaggtggactgctgggatggcccagatggagagcccatcgtgcaccacggctacaccctgaccagcaagatcctcttcaaggatgtgattgagaccatcaacaagtatgccttcatcaagaatgagtaccctgtgatcctgagcattgagaaccactgcagcgtcatccagcagaagaagatggcccagtacctgacagacatcctgggggacaagctggacctgagctctgtgtccagtgaagatgccaccaccctgcccagcccccagatgctgaagggcaagatcctggtgaagggcaagaagctgcctgccaacatcagtgaagatgctgaggagggggaggtgtctgatgaggacagcgcagatgaaattgatgatgactgcaagctgctgaatggagatgccagcaccaacaggaagagggtggagaacacagccaagaggaagctggacagcctcatcaaggagagcaagatccgggactgtgaggaccccaacaacttctctgtgtccaccctgagccccagcggcaagctgggcaggaagagcaaggccgaggaggatgtggagagcggagaagatgctggggccagcagaagaaatggccgcctggtggtgggcagcttcagcaggaggaagaagaagggcagcaagctgaagaaggccgcctctgtggaggagggagatgagggccaggacagccctgggggccagagcagaggagccacccggcagaagaagaccatgaagctgagccgggccctgagtgacctggtgaagtacaccaagtctgtggccacccatgacatcgagatggaggccgccagctcctggcaggtgagcagcttcagcgagaccaaggcccaccagatcctgcagcagaagccagcccagtacctgcgcttcaaccagcagcagctgagccgcatctaccccagcagctacagagtggacagcagcaactacaacccccagcccttctggaatgccggctgccagatggtggccctgaactaccagagcgagggccgcatgctgcagctgaacagagccaagttcagcgccaacggcggctgcggctacgtgctgaagccaggctgcatgtgccagggcgtcttcaaccccaacagcgaggaccccctgcccggccagctgaagaagcagctggtgctgcgcatcatcagcggccagcagctgcccaagccccgggacagcatgctgggggacagaggagagatcatcgacccctttgtggaggtggagatcatcggcctgcctgtggactgcagccgggagcagaccagggtggtggatgacaatggcttcaaccccacctgggaggagaccctggtgttcatggtgcacatgcctgagatcgccctggtgcgcttcctggtgtgggaccatgaccccatcggccgggacttcatcggccagaggaccctggccttcagctccatgatgcctggctacagacatgtgtacctggagggcatggaggaggccagcatctttgtgcacgtggccgtgtctgacatcagcggcaaggtgaagcaggccctgggcctgaagggcctcttcctgcggggccccaagccaggcagcctggacagccacgccgccggccggcccccagcccggcccagcgtgtcccagaggatcctgcggaggacagccagcgcccccaccaagagccagaagccaggccggcggggcttccctgagctggtgctgggcacccgggacaccggcagcaagggcgtggctgatgatgtggtgcccccaggccctggccctgcccctgaggccccagcccaggagggccctggcagcggcagcccccggggcaaggccccagctgctgtggccgagaagagccctgtgcgggtgcggcccccccgggtgctggatggccctggccctgctggcatggccgccacctgcatgaagtgtgtggtgggcagctgtgccggcgtgaacacaggaggcctgcagcgggagaggcctcccagccctggccctgccagccggcaggccgccatccggcagcagccccgggcccgggctgacagcctgggcgccccctgctgcggcctggacccccacgccatccctggccgcagccgggaggcccccaagggccctggggcctggaggcagggccctgggggcagcggctccatgagcagtgacagcagcagcccagacagccctggcatccctgagaggagcccccgctggccagagggcgcctgccggcagcccggggccctgcagggcgagatgtctgccctgtttgcccagaagctggaggagatccgcagcaagagccccatgttttctgctgggaagcccctgctgccctgtgtggtgctgccccacgcccctggcatggccggccctggcagccctgctgctgccagcgcctggacagtgagcccccgggtgctggtgctggtggccctgtacccctggcactgcctgcggggcaccctgctgccctggctggcctgtggcccctag

SEQ ID NO: 164127 - DNA, 1494 bp, synthetic construct
  misc_feature 1..1494: note = Description of Artificial Sequence: Synthetic coding sequence
  source 1..1494: mol_type = other DNA
atgggcgccatgcaggagggcatgcagatggtgaagctgcggggcggcagcaagggcctggtgcgcttctactacctggatgagcacaggagctgcatccgctggaggcccagcaggaagaatgagaaggccaagatcagcattgacagcatccaggaggtgtctgagggccggcagagcgaggtgttccagcgctacccagatggcagctttgacccctttgtggaggtggagatcatcggcctgcctgtggactgcagccgggagcagaccagggtggtggatgacaatggcttcaaccccacctgggaggagaccctggtgttcatggtgcacatgcctgagatcgccctggtgcgcttcctggtgtgggaccatgaccccatcggccgggacttcatcggccagaggaccctggccttcagctccatgatgcctggctaccgccacgtgtacctggagggcatggaggaggccagcatctttgtgcacgtggccgtgtctgacatcagcggcaaggtgaagcaggccctgggcctgaagggcctcttcctgcggggccccaagccaggcagcctggacagccatgctgctggccggcccccagcccggcccagcgtgtcccagaggatcctgcggaggacagccagcgcccccaccaagagccagaagccaggaagaagaggcttccctgagctggtgctgggcacccgggacaccggcagcaaaggagtggctgatgatgtggtgcccccaggccctggccctgcccctgaggccccagcccaggagggccctggcagcggcagcccccggggcaaggccccagctgctgtggccgagaagagccctgtgcgggtgcggcccccccgggtgctggatggccctggccctgctggcatggccgccacctgcatgaagtgtgtggtgggcagctgtgccggcgtgaacacaggaggcctgcagcgggagcggccccccagccctggccctgccagccggcaggccgccatccggcagcagccccgggcccgggctgacagcctgggcgccccctgctgcggcctggacccccacgccatccctggccgcagccgggaggcccccaagggccctggggcctggaggcagggccctgggggcagcggctccatgagcagtgacagcagcagcccagacagccctggcatccctgagaggagcccccgctggccagagggcgcctgccggcagcccggggccctgcagggcgagatgtctgccctgtttgcccagaagctggaggagatccgcagcaagagccccatgttttctgctgggaagcccctgctgccctgtgtggtgctgccccacgcccctggcatggccggccctggcagccctgctgctgccagcgcctggacagtgagcccccgggtgctggtgctggtggccctgtacccctggcactgcctgcggggcaccctgctgccctggctggcctgtggcccctag

SEQ ID NO: 164128 - DNA, 4251 bp, synthetic construct
  misc_feature 1..4251: note = Description of Artificial Sequence: Synthetic coding sequence
  source 1..4251: mol_type = other DNA
atgagcggcccctggcccagcccagacagcaggaccaagggcaccgtggcctggctggccgaggtgctgctgtgggtgggcggctctgtggtgctgagcagcgagtggcagctgggccccctggtggagcgctgcatgggcgccatgcaggagggcatgcagatggtgaagctgcggggcggcagcaagggcctggtgcgcttctactacctggatgagcacaggagctgcatccgctggaggcccagcaggaagaatgagaaggccaagatcagcattgacagcatccaggaggtgtctgagggccggcagagcgaggtgttccagcgctacccagatggcagctttgaccccaactgctgcttcagcatctaccacggcagccaccgggagagcctggacctggtgtccaccagcagcgaggtggcccggacctgggtgacaggcctgcgctacctgatggccggcatcagtgatgaggacagcctggcccggcggcagaggacccgggaccagtggctgaagcagacctttgatgaagctgacaagaatggagatggcagcctgagcattggagaggtgctgcagctgctgcacaagctgaatgtgaacctgccccggcagagggtgaagcagatgttccgggaggccgacacagatgaccaccagggcaccctgggctttgaggagttctgtgccttctacaagatgatgagcacccggcgggacctgtacctgctgatgctgacctacagcaaccacaaggaccacctggatgctgccagcctgcagcgcttcctgcaggtggagcagaagatggccggcgtgaccctggagagctgccaggacatcatcgagcagtttgagccctgcccagagaacaagagcaagggcctgctgggcattgatggcttcaccaactacaccaggagccctgctggggacatcttcaaccctgagcaccaccacgtgcaccaggacatgacccagcccctgagccactacttcatcaccagcagccacaacacctacctggtgggggaccagctgatgagccagagccgggtggacatgtatgcctgggtgctgcaggccggctgccgctgtgtggaggtggactgctgggatggcccagatggagagcccatcgtgcaccacggctacaccctgaccagcaagatcctcttcaaggatgtgattgagaccatcaacaagtatgccttcatcaagaatgagtaccctgtgatcctgagcattgagaaccactgcagcgtcatccagcagaagaagatggcccagtacctgacagacatcctgggggacaagctggacctgagctctgtgtccagtgaagatgccaccaccctgcccagcccccagatgctgaagggcaagatcctggtgaagggcaagaagctgcctgccaacatcagtgaagatgctgaggagggggaggtgtctgatgaagattctgcagatgaaattgatgatgactgcaagctgctgaatggagatgccagcaccaacaggaagagggtggagaacacagccaagaggaagctggacagcctcatcaaggagagcaagatccgggactgtgaggaccccaacaacttctctgtgtccaccctgagccccagcggcaagctgggcaggaagagcaaggccgaggaggatgtggagagcggggaggatgctggggccagcagaagaaatggccgcctggtggtgggcagcttcagcaggaggaagaagaagggcagcaagctgaagaaggccgcctctgtggaggagggagatgagggccaggacagccctgggggccagagcagaggagccacccggcagaagaagaccatgaagctgagccgggccctgagtgacctggtgaagtacaccaagtctgtggccacccatgacatcgagatggaggccgccagctcctggcaggtgtcctccttcagcgagaccaaggcccaccagatcctgcagcagaagccagcccagtacctgcgcttcaaccagcagcagctgagccgcatctaccccagcagctacagagtggacagcagcaactacaacccccagcccttctggaatgccggctgccagatggtggccctgaactaccagagcgagggccgcatgctgcagctgaacagagccaagttcagcgccaatggaggctgcggctacgtgctgaagccaggctgcatgtgccagggcgtcttcaaccccaacagcgaggaccccctgcccggccagctgaagaagcagctggtgctgcgcatcatcagcggccagcagctgcccaagccccgggacagcatgctgggggacagaggagagatcatcgacccctttgtggaggtggagatcatcggcctgcctgtggactgcagccgggagcagaccagggtggtggatgacaatggcttcaaccccacctgggaggagaccctggtgttcatggtgcacatgcctgagatcgccctggtgcgcttcctggtgtgggaccatgaccccatcggccgggacttcatcggccagaggaccctggccttcagctccatgatgcctggctaccgccacgtgtacctggagggcatggaggaggccagcatctttgtgcacgtggccgtgtctgacatcagcggcaaggtgaagcaggccctgggcctgaagggcctcttcctgcggggccccaagccaggcagcctggacagccatgctgctggccggcccccagcccggcccagcgtgtcccagaggatcctgcggaggacagccagcgcccccaccaagagccagaagccaggaagaagaggcttccctgagctggtgctgggcacccgggacaccggcagcaaaggagtggctgatgatgtggtgcccccaggccctggccctgcccctgaggccccagcccaggagggccctggcagcggcagcccccgggacacccggcccctgagcacccagaggcccctgccccccctgtgcagcctggagaccatcgccgaggagcccgcccctggccctggccccccacctcctgctgctgtgcccaccagcagcagccagggccggcccccctaccccactggacctggggccaacgtggccagccccctggaggacacagaggagccccgggacagccggccccggccctgcaatggagagggcgctgggggcgcctatgaaagagcccctggcagccagacagatggccgcagccagcccaggaccctgggccacctgcctgtgatccggcgggtgaagtctgagggccaggtgcccacagagcccctgggcggctggaggcccctggccgcccccttccctgccccagctgtgtacagtgatgccactggaagtgaccccctgtggcagaggctggagccctgtggccaccgggacagcgtgagcagcagcagctccatgagcagcagtgacaccgtcatcgacctgagcctgcccagcctgggcctgggccgcagccgggagaacctggccggggcccacatgggccgcctgcccccccggccccacagcgccagcgctgcccggccagacctgccccctgtgaccaagagcaagagcaaccccaacctgcgggccaccggccagaggcctcccatcccagatgagctgcagcccaggagcctggcccccaggatggccggcctgcccttccggcccccctggggctgcctgagcctggtgggcgtgcaggactgccctgtggccgccaagagcaagagcctgggggacctgacagcagatgactttgcccccagctttgaaggaggcagccggcggctgagccacagcctgggcctgcccggcggcaccaggagagtgtctggccctggggtgagaagagacaccctgacagagcagctgcgctggctgactgtgttccagcaggccggggacatcaccagccccaccagcctgggccctgctggggagggcgtggccggcggccctggctttgtgcggcgcagcagcagccgcagccacagccgggtgcgggccatcgccagccgggcccggcaggcccaggagcggcagcagaggctgcagggcctgggccggcagggccccccagaggaggagcggggcaccccagagggcgcctgcagcgtgggccacgagggctctgtggatgccccagcccccagcaagggggccctgggccctgccagcgctgctgctgagaacctggtgctgctgcggctgtag

SEQ ID NO: 164129 - DNA, 4143 bp, synthetic construct
  misc_feature 1..4143: note = Description of Artificial Sequence: Synthetic coding sequence
  source 1..4143: mol_type = other DNA
atgagcggcccctggcccagcccagacagcaggaccaagggcaccgtggcctggctggccgaggtgctgctgtgggtgggcggctctgtggtgctgagcagcgagtggcagctgggccccctggtggagcgctgcatgggcgccatgcaggagggcatgcagatggtgaagctgcggggcggcagcaagggcctggtgcgcttctactacctggatgagcacaggagctgcatccgctggaggcccagcaggaagaatgagaaggccaagatcagcattgacagcatccaggaggtgtctgagggccggcagagcgaggtgttccagcgctacccagatggcagctttgaccccaactgctgcttcagcatctaccacggcagccaccgggagagcctggacctggtgtccaccagcagcgaggtggcccggacctgggtgacaggcctgcgctacctgatggccggcatcagtgatgaggacagcctggcccggcggcagaggacccgggaccagtggctgaagcagacctttgatgaagctgacaagaatggagatggcagcctgagcattggagaggtgctgcagctgctgcacaagctgaatgtgaacctgccccggcagagggtgaagcagatgttccgggaggccgacacagatgaccaccagggcaccctgggctttgaggagttctgtgccttctacaagatgatgagcacccggcgggacctgtacctgctgatgctgacctacagcaaccacaaggaccacctggatgctgccagcctgcagcgcttcctgcaggtggagcagaagatggccggcgtgaccctggagagctgccaggacatcatcgagcagtttgagccctgcccagagaacaagagcaagggcctgctgggcattgatggcttcaccaactacaccaggagccctgctggggacatcttcaaccctgagcaccaccacgtgcaccaggacatgacccagcccctgagccactacttcatcaccagcagccacaacacctacctggtgggggaccagctgatgagccagagccgggtggacatgtatgcctgggtgctgcaggccggctgccgctgtgtggaggtggactgctgggatggcccagatggagagcccatcgtgcaccacggctacaccctgaccagcaagatcctcttcaaggatgtgattgagaccatcaacaagtatgccttcatcaagaatgagtaccctgtgatcctgagcattgagaaccactgcagcgtcatccagcagaagaagatggcccagtacctgacagacatcctgggggacaagctggacctgagctctgtgtccagtgaagatgccaccaccctgcccagcccccagatgctgaagggcaagatcctggtgaagggcaagaagctgcctgccaacatcagtgaagatgctgaggagggggaggtgtctgatgaagattctgcagatgaaattgatgatgactgcaagctgctgaatggagatgccagcaccaacaggaagagggtggagaacacagccaagaggaagctggacagcctcatcaaggagagcaagatccgggactgtgaggaccccaacaacttctctgtgtccaccctgagccccagcggcaagctgggcaggaagagcaaggccgaggaggatgtggagagcggggaggatgctggggccagcagaagaaatggccgcctggtggtgggcagcttcagcaggaggaagaagaagggcagcaagctgaagaaggccgcctctgtggaggagggagatgagggccaggacagccctgggggccagagcagaggagccacccggcagaagaagaccatgaagctgagccgggccctgagtgacctggtgaagtacaccaagtctgtggccacccatgacatcgagatggaggccgccagctcctggcaggtgtcctccttcagcgagaccaaggcccaccagatcctgcagcagaagccagcccagtacctgcgcttcaaccagcagcagctgagccgcatctaccccagcagctacagagtggacagcagcaactacaacccccagcccttctggaatgccggctgccagatgggcgtcttcaaccccaacagcgaggaccccctgcccggccagctgaagaagcagctggtgctgcgcatcatcagcggccagcagctgcccaagccccgggacagcatgctgggggacagaggagagatcatcgacccctttgtggaggtggagatcatcggcctgcctgtggactgcagccgggagcagaccagggtggtggatgacaatggcttcaaccccacctgggaggagaccctggtgttcatggtgcacatgcctgagatcgccctggtgcgcttcctggtgtgggaccatgaccccatcggccgggacttcatcggccagaggaccctggccttcagctccatgatgcctggctaccgccacgtgtacctggagggcatggaggaggccagcatctttgtgcacgtggccgtgtctgacatcagcggcaaggtgaagcaggccctgggcctgaagggcctcttcctgcggggccccaagccaggcagcctggacagccatgctgctggccggcccccagcccggcccagcgtgtcccagaggatcctgcggaggacagccagcgcccccaccaagagccagaagccaggaagaagaggcttccctgagctggtgctgggcacccgggacaccggcagcaaaggagtggctgatgatgtggtgcccccaggccctggccctgcccctgaggccccagcccaggagggccctggcagcggcagcccccgggacacccggcccctgagcacccagaggcccctgccccccctgtgcagcctggagaccatcgccgaggagcccgcccctggccctggccccccacctcctgctgctgtgcccaccagcagcagccagggccggcccccctaccccactggacctggggccaacgtggccagccccctggaggacacagaggagccccgggacagccggccccggccctgcaatggagagggcgctgggggcgcctatgaaagagcccctggcagccagacagatggccgcagccagcccaggaccctgggccacctgcctgtgatccggcgggtgaagtctgagggccaggtgcccacagagcccctgggcggctggaggcccctggccgcccccttccctgccccagctgtgtacagtgatgccactggaagtgaccccctgtggcagaggctggagccctgtggccaccgggacagcgtgagcagcagcagctccatgagcagcagtgacaccgtcatcgacctgagcctgcccagcctgggcctgggccgcagccgggagaacctggccggggcccacatgggccgcctgcccccccggccccacagcgccagcgctgcccggccagacctgccccctgtgaccaagagcaagagcaaccccaacctgcgggccaccggccagaggcctcccatcccagatgagctgcagcccaggagcctggcccccaggatggccggcctgcccttccggcccccctggggctgcctgagcctggtgggcgtgcaggactgccctgtggccgccaagagcaagagcctgggggacctgacagcagatgactttgcccccagctttgaaggaggcagccggcggctgagccacagcctgggcctgcccggcggcaccaggagagtgtctggccctggggtgagaagagacaccctgacagagcagctgcgctggctgactgtgttccagcaggccggggacatcaccagccccaccagcctgggccctgctggggagggcgtggccggcggccctggctttgtgcggcgcagcagcagccgcagccacagccgggtgcgggccatcgccagccgggcccggcaggcccaggagcggcagcagaggctgcagggcctgggccggcagggccccccagaggaggagcggggcaccccagagggcgcctgcagcgtgggccacgagggctctgtggatgccccagcccccagcaagggggccctgggccctgccagcgctgctgctgagaacctggtgctgctgcggctgtag

SEQ ID NO: 164130 - DNA, 2136 bp, synthetic construct
  misc_feature 1..2136: note = Description of Artificial Sequence: Synthetic coding sequence
  source 1..2136: mol_type = other DNA
tgagccctgaactaccagagcgagggccgcatgctgcagctgaacagagccaagttcagcgccaacggcggctgcggctacgtgctgaagccaggctgcatgtgccagggcgtcttcaaccccaacagcgaggaccccctgcccggccagctgaagaagcagctggtgctgcgcatcatcagcggccagcagctgcccaagccccgggacagcatgctgggggacagaggagagatcatcgacccctttgtggaggtggagatcatcggcctgcctgtggactgcagccgggagcagaccagggtggtggatgacaatggcttcaaccccacctgggaggagaccctggtgttcatggtgcacatgcctgagatcgccctggtgcgcttcctggtgtgggaccatgaccccatcggccgggacttcatcggccagaggaccctggccttcagctccatgatgcctggctacagacatgtgtacctggagggcatggaggaggccagcatctttgtgcacgtggccgtgtctgacatcagcggcaaggtgaagcaggccctgggcctgaagggcctcttcctgcggggccccaagccaggcagcctggacagccacgccgccggccggcccccagcccggcccagcgtgtcccagaggatcctgcggaggacagccagcgcccccaccaagagccagaagccaggccggcggggcttccctgagctggtgctgggcacccgggacaccggcagcaagggcgtggctgatgatgtggtgcccccaggccctggccctgcccctgaggccccagcccaggagggccctggcagcggcagcccccgggacacccggcccctgagcacccagaggcccctgccccccctgtgcagcctggagaccatcgccgaggagcccgcccctggccctggccccccacctcctgctgctgtgcccaccagcagcagccagggccggcccccctaccccaccggccctggggccaacgtggccagccccctggaggacacagaggagccccgggacagccggccccggccctgcaatggagagggcgccggcggggcctatgagcgggcccctggcagccagacagatggccgcagccagcccaggaccctgggccacctgcccgtcatcagaagagtgaagtctgagggccaggtgcccacagagcccctgggcggctggaggcccctggccgcccccttccctgccccagctgtgtacagtgatgccaccggcagtgaccccctgtggcagaggctggagccctgtggccaccgggacagcgtgagcagcagcagctccatgagcagcagtgacacagtgattgacctgagcctgcccagcctgggcctgggccgcagccgggagaacctggccggggcccacatgggccgcctgcccccccggccccacagcgccagcgctgcccggccagacctgccccctgtgaccaagagcaagagcaaccccaacctgcgggccaccggccagaggcctcccatcccagatgagctgcagcccaggagcctggcccccaggatggccggcctgcccttccggcccccctggggctgcctgagcctggtgggcgtgcaggactgccctgtggccgccaagagcaagagcctgggggacctgacagcagatgactttgcccccagctttgagggcggcagccggcggctgagccacagcctgggcctgcccggcggcacccggcgggtgtctggccctggggtgcggcgggacaccctgacagagcagctgcgctggctgaccgtcttccagcaggccggggacatcaccagccccaccagcctgggccctgctggggagggcgtggccggcggccctggctttgtgagaagaagcagcagccgcagccacagccgggtgcgggccatcgccagccgggcccggcaggcccaggagcggcagcagaggctgcagggcctgggccggcagggccccccagaggaggagcggggcaccccagagggcgcctgcagcgtgggccacgagggctctgtggatgccccagcccccagcaaaggagccctgggccctgccagcgctgctgctgagaacctggtgctgctgcggctgtag

SEQ ID NO: 164131 - DNA, 3390 bp, synthetic construct
  misc_feature 1..3390: note = Description of Artificial Sequence: Synthetic coding sequence
  source 1..3390: mol_type = other DNA
atggaggagcccggccccccaggcggcctgagccaggaccaggtggagcgctgcatgggcgccatgcaggagggcatgcagatggtgaagctgcggggcggcagcaagggcctggtgcgcttctactacctggatgagcacaggagctgcatccgctggaggcccagcaggaagaatgagaaggccaagatcagcattgacagcatccaggaggtgtctgagggccggcagagcgaggtgttccagcgctacccagatggcagctttgaccccaactgctgcttcagcatctaccacggcagccaccgggagagcctggacctggtgtccaccagcagcgaggtggcccggacctgggtgacaggcctgcgctacctgatggccggcatcagtgatgaggacagcctggcccggcggcagaggacccgggaccagtggctgaagcagacctttgatgaggccgacaagaatggagatggcagcctgagcatcggggaggtgctgcagctgctgcacaagctgaatgtgaacctgccccggcagagggtgaagcagatgttccgggaggccgacacagatgaccaccagggcaccctgggctttgaggagttctgtgccttctacaagatgatgagcacccggcgggacctgtacctgctgatgctgacctacagcaaccacaaggaccacctggatgctgccagcctgcagcgcttcctgcaggtggagcagaagatggccggcgtgaccctggagagctgccaggacatcatcgagcagtttgagccctgcccagagaacaagagcaagggcctgctgggcattgatggcttcaccaactacaccaggagccctgctggggacatcttcaaccctgagcaccaccacgtgcaccaggacatgacccagcccctgagccactacttcatcaccagcagccacaacacctacctggtgggggaccagctgatgagccagagccgggtggacatgtatgcctgggtgctgcaggccggctgccgctgtgtggaggtggactgctgggatggcccagatggagagcccatcgtgcaccacggctacaccctgaccagcaagatcctcttcaaggatgtgattgagaccatcaacaagtatgccttcatcaagaatgagtaccctgtgatcctgagcattgagaaccactgcagcgtcatccagcagaagaagatggcccagtacctgacagacatcctgggggacaagctggacctgagctctgtgtccagtgaagatgccaccaccctgcccagcccccagatgctgaagggcaagatcctggtgaagggcaagaagctgcctgccaacatcagtgaagatgctgaggagggggaggtgtctgatgaggacagcgcagatgaaattgatgatgactgcaagctgctgaatggagatgccagcaccaacaggaagagggtggagaacacagccaagaggaagctggacagcctcatcaaggagagcaagatccgggactgtgaggaccccaacaacttctctgtgtccaccctgagccccagcggcaagctgggcaggaagagcaaggccgaggaggatgtggagagcggagaagatgctggggccagcagaagaaatggccgcctggtggtgggcagcttcagcaggaggaagaagaagggcagcaagctgaagaaggccgcctctgtggaggagggagatgagggccaggacagccctgggggccagagcagaggagccacccggcagaagaagaccatgaagctgagccgggccctgagtgacctggtgaagtacaccaagtctgtggccacccatgacatcgagatggaggccgccagctcctggcaggtgagcagcttcagcgagaccaaggcccaccagatcctgcagcagaagccagcccagtacctgcgcttcaaccagcagcagctgagccgcatctaccccagcagctacagagtggacagcagcaactacaacccccagcccttctggaatgccggctgccagatggtggccctgaactaccagagcgagggccgcatgctgcagctgaacagagccaagttcagcgccaacggcggctgcggctacgtgctgaagccaggctgcatgtgccagggcgtcttcaaccccaacagcgaggaccccctgcccggccagctgaagaagcagctggtgctgcgcatcatcagcggccagcagctgcccaagccccgggacagcatgctgggggacagaggagagatcatcgacccctttgtggaggtggagatcatcggcctgcctgtggactgcagccgggagcagaccagggtggtggatgacaatggcttcaaccccacctgggaggagaccctggtgttcatggtgcacatgcctgagatcgccctggtgcgcttcctggtgtgggaccatgaccccatcggccgggacttcatcggccagaggaccctggccttcagctccatgatgcctggctacagacatgtgtacctggagggcatggaggaggccagcatctttgtgcacgtggccgtgtctgacatcagcggcaaggtgaagcaggccctgggcctgaagggcctcttcctgcggggccccaagccaggcagcctggacagccacgccgccggccggcccccagcccggcccagcgtgtcccagaggatcctgcggaggacagccagcgcccccaccaagagccagaagccaggccggcggggcttccctgagctggtgctgggcacccgggacaccggcagcaagggcgtggctgatgatgtggtgcccccaggccctggccctgcccctgaggccccagcccaggagggccctggcagcggcagcccccggggcaaggccccagctgctgtggccgagaagagccctgtgcgggtgcggcccccccgggtgctggatggccctggccctgctggcatggccgccacctgcatgaagtgtgtggtgggcagctgtgccggcgtgaacacaggaggcctgcagcgggagaggcctcccagccctggccctgccagccggcaggccgccatccggcagcagccccgggcccgggctgacagcctgggcgccccctgctgcggcctggacccccacgccatccctggccgcagccgggaggcccccaagggccctggggcctggaggcagggccctgggggcagcggctccatgagcagtgacagcagcagcccagacagccctggcatccctgagaggagcccccgctggccagagggcgcctgccggcagcccggggccctgcagggcgagatgtctgccctgtttgcccagaagctggaggagatccgcagcaagagccccatgttttctgctgtgaggaactag

SEQ ID NO: 164132 - DNA, 1827 bp, synthetic construct
  misc_feature 1..1827: note = Description of Artificial Sequence: Synthetic coding sequence
  source 1..1827: mol_type = other DNA
atggagatgcgctggttcctgagcaagatccaggatgacttccggggcggcaagatcaacctggagaagacccagaggctgctggagaagctggacatccgctgcagctacatccacgtgaagcagatcttcaaggacaatgaccggctgaagcagggccgcatcaccatcgaggagttccgggccatctaccgcatcatcacccaccgggaggagatcatcgagatcttcaacacctacagcgagaacaggaagatcctgctggccagcaacctggcccagttcctgacccaggagcagtatgctgctgagatgagcaaggccatcgcctttgagatcatccagaagtatgagcccatcgaggaggtgaggaaggcccaccagatgagcctggagggcttcacccgctacatggacagccgggagtgcctgctcttcaagaatgaatgtaggaaggtgtaccaggacatgacccaccccctgaatgactacttcatcagcagcagccacaacacctacctggtgtctgaccagctgctgggccccagcgacctgtggggctacgtgtctgccctggtgaagggctgccgctgcctggagattgactgctgggatggagcccagaatgaacctgtggtgtaccacggctacaccctgaccagcaagctgctcttcaagacagtcatccaggccatccacaagtatgccttcatgaccagtgactaccctgtggtgctgagcctggagaaccactgcagcacagcccagcaggaggtgatggctgacaacctgcaggccaccttcggggagagcctgctgagtgacatgctggatgacttcccagacaccctgcccagccctgaggccctgaagttcaagatcctggtgaagaacaagaagattggcaccctgaaggagacccatgagaggaaaggaagtgacaagagaggagacaaccaggacaaggagaccggggtgaagaagctgcccggggtgatgctgttcaagaagaagaagaccaggaagctgaagatcgccctggccctgagtgacctggtgatctacaccaaggccgagaagttcaagagcttccagcacagccggctgtaccagcagttcaatgaaaacaacagcattggagagacccaggccaggaagctgagcaagctgcgggtgcatgagttcatcttccacaccaggaagttcatcacccgcatctaccccaaggccaccagggctgacagcagcaacttcaacccccaggagttctggaacatcggctgccagatggtggccctgaacttccagaccccaggcctgcccatggacctgcagaatggcaagttcctggacaatggaggcagcggctacatcctgaagccccacttcctgcgggagagcaagagctacttcaaccccagcaacatcaaggagggcatgcccatcaccctgaccatccgcctcatcagcggcatccagctgcccctgacccacagcagcagcaacaagggggacagcctggtgatcatcgaggtgtttggagtgcccaatgaccagatgaagcagcagaccagggtcatcaagaagaatgccttcagcccccgctggaatgagaccttcaccttcatcatccacgtgcctgagctggccctgatccgctttgtggtggagggccagggcctgattgctggaaatgagttcctgggccagtacaccctgcccctgctgtgcatgaacaagggctaccgccgcatccccctcttcagcaggatgggagagagcctggagcccgccagcctgtttgtgtatgtgtggtacgtgaggtag

SEQ ID NO: 164133 - DNA, 1242 bp, synthetic construct
  misc_feature 1..1242: note = Description of Artificial Sequence: Synthetic coding sequence
  source 1..1242: mol_type = other DNA
atgcgctggttcctgagcaagatccaggatgacttccggggcggcaagatcaacctggagaagacccagaggctgctggagaagctggacatccgctgcagctacatccacgtgaagcagatcttcaagaccagtgactaccctgtggtgctgagcctggagaaccactgcagcacagcccagcaggaggtgatggctgacaacctgcaggccacctttggagagagcctgctgagtgacatgctggatgacttcccagacaccctgcccagccctgaggccctgaagttcaagatcctggtgaagaacaagaagattggcaccctgaaggagacccatgagaggaagggcagtgacaagagaggagacaaccaggacaaggagactggagtgaagaagctgcccggggtgatgctgttcaagaagaagaagaccaggaagctgaagatcgccctggccctgagtgacctggtgatctacaccaaggccgagaagttcaagagcttccagcacagccggctgtaccagcagttcaatgaaaacaacagcatcggggagacccaggccaggaagctgagcaagctgcgggtgcatgagttcatcttccacaccaggaagttcatcacccgcatctaccccaaggccaccagggctgacagcagcaacttcaacccccaggagttctggaacatcggctgccagatggtggccctgaacttccagaccccaggcctgcccatggacctgcagaatggcaagttcctggacaatggaggcagcggctacatcctgaagccccacttcctgcgggagagcaagagctacttcaaccccagcaacatcaaggagggcatgcccatcaccctgaccatccgcctcatcagcggcatccagctgcccctgacccacagcagcagcaacaagggggacagcctggtgatcatcgaggtgtttggagtgcccaatgaccagatgaagcagcagaccagggtcatcaagaagaatgccttcagcccccgctggaatgagaccttcaccttcatcatccacgtgcctgagctggccctgatccgctttgtggtggagggccagggcctgattgctggaaatgagttcctgggccagtacaccctgcccctgctgtgcatgaacaagggctaccgccgcatccccctcttcagcaggatgggagagagcctggagcccgccagcctgtttgtgtatgtgtggtacgtgaggtag

SEQ ID NO: 164134 - DNA, 1821 bp, synthetic construct
  misc_feature 1..1821: note = Description of Artificial Sequence: Synthetic coding sequence
  source 1..1821: mol_type = other DNA
atgcgctggttcctgagcaagatccaggatgacttccggggcggcaagatcaacctggagaagacccagaggctgctggagaagctggacatccgctgcagctacatccacgtgaagcagatcttcaaggacaatgaccggctgaagcagggccgcatcaccatcgaggagttccgggccatctaccgcatcatcacccaccgggaggagatcatcgagatcttcaacacctacagcgagaacaggaagatcctgctggccagcaacctggcccagttcctgacccaggagcagtatgctgctgagatgagcaaggccatcgcctttgagatcatccagaagtatgagcccatcgaggaggtgaggaaggcccaccagatgagcctggagggcttcacccgctacatggacagccgggagtgcctgctcttcaagaatgaatgtaggaaggtgtaccaggacatgacccaccccctgaatgactacttcatcagcagcagccacaacacctacctggtgtctgaccagctgctgggccccagcgacctgtggggctacgtgtctgccctggtgaagggctgccgctgcctggagattgactgctgggatggagcccagaatgaacctgtggtgtaccacggctacaccctgaccagcaagctgctcttcaagacagtcatccaggccatccacaagtatgccttcatgaccagtgactaccctgtggtgctgagcctggagaaccactgcagcacagcccagcaggaggtgatggctgacaacctgcaggccaccttcggggagagcctgctgagtgacatgctggatgacttcccagacaccctgcccagccctgaggccctgaagttcaagatcctggtgaagaacaagaagattggcaccctgaaggagacccatgagaggaaaggaagtgacaagagaggagacaaccaggacaaggagaccggggtgaagaagctgcccggggtgatgctgttcaagaagaagaagaccaggaagctgaagatcgccctggccctgagtgacctggtgatctacaccaaggccgagaagttcaagagcttccagcacagccggctgtaccagcagttcaatgaaaacaacagcattggagagacccaggccaggaagctgagcaagctgcgggtgcatgagttcatcttccacaccaggaagttcatcacccgcatctaccccaaggccaccagggctgacagcagcaacttcaacccccaggagttctggaacatcggctgccagatggtggccctgaacttccagaccccaggcctgcccatggacctgcagaatggcaagttcctggacaatggaggcagcggctacatcctgaagccccacttcctgcgggagagcaagagctacttcaaccccagcaacatcaaggagggcatgcccatcaccctgaccatccgcctcatcagcggcatccagctgcccctgacccacagcagcagcaacaagggggacagcctggtgatcatcgaggtgtttggagtgcccaatgaccagatgaagcagcagaccagggtcatcaagaagaatgccttcagcccccgctggaatgagaccttcaccttcatcatccacgtgcctgagctggccctgatccgctttgtggtggagggccagggcctgattgctggaaatgagttcctgggccagtacaccctgcccctgctgtgcatgaacaagggctaccgccgcatccccctcttcagcaggatgggagagagcctggagcccgccagcctgtttgtgtatgtgtggtacgtgaggtag

SEQ ID NO: 164135 - DNA, 1248 bp, synthetic construct
  misc_feature 1..1248: note = Description of Artificial Sequence: Synthetic coding sequence
  source 1..1248: mol_type = other DNA
atggagatgcgctggttcctgagcaagatccaggatgacttccggggcggcaagatcaacctggagaagacccagaggctgctggagaagctggacatccgctgcagctacatccacgtgaagcagatcttcaagaccagtgactaccctgtggtgctgagcctggagaaccactgcagcacagcccagcaggaggtgatggctgacaacctgcaggccacctttggagagagcctgctgagtgacatgctggatgacttcccagacaccctgcccagccctgaggccctgaagttcaagatcctggtgaagaacaagaagattggcaccctgaaggagacccatgagaggaagggcagtgacaagagaggagacaaccaggacaaggagactggagtgaagaagctgcccggggtgatgctgttcaagaagaagaagaccaggaagctgaagatcgccctggccctgagtgacctggtgatctacaccaaggccgagaagttcaagagcttccagcacagccggctgtaccagcagttcaatgaaaacaacagcatcggggagacccaggccaggaagctgagcaagctgcgggtgcatgagttcatcttccacaccaggaagttcatcacccgcatctaccccaaggccaccagggctgacagcagcaacttcaacccccaggagttctggaacatcggctgccagatggtggccctgaacttccagaccccaggcctgcccatggacctgcagaatggcaagttcctggacaatggaggcagcggctacatcctgaagccccacttcctgcgggagagcaagagctacttcaaccccagcaacatcaaggagggcatgcccatcaccctgaccatccgcctcatcagcggcatccagctgcccctgacccacagcagcagcaacaagggggacagcctggtgatcatcgaggtgtttggagtgcccaatgaccagatgaagcagcagaccagggtcatcaagaagaatgccttcagcccccgctggaatgagaccttcaccttcatcatccacgtgcctgagctggccctgatccgctttgtggtggagggccagggcctgattgctggaaatgagttcctgggccagtacaccctgcccctgctgtgcatgaacaagggctaccgccgcatccccctcttcagcaggatgggagagagcctggagcccgccagcctgtttgtgtatgtgtggtacgtgaggtag

SEQ ID NO: 164136 - DNA, 1212 bp, synthetic construct
  misc_feature 1..1212: note = Description of Artificial Sequence: Synthetic coding sequence
  source 1..1212: mol_type = other DNA
atggacagcagagaatgtctgctcttcaagaatgaatgtaggaaggtgtaccaggacatgacccaccccctgaatgactacttcatcagcagcagccacaacacctacctggtgtctgaccagctgctgggccccagcgacctgtggggctacgtgtctgccctggtgaagggctgccgctgcctggagattgactgctgggatggagcccagaatgaacctgtggtgtaccacggctacaccctgaccagcaagctgctcttcaagacagtcatccaggccatccacaagtatgccttcatgaccagtgactaccctgtggtgctgagcctggagaaccactgcagcacagcccagcaggaggtgatggctgacaacctgcaggccacctttggagagagcctgctgagtgacatgctggatgacttcccagacaccctgcccagccctgaggccctgaagttcaagatcctggtgaagaacaagaagattggcaccctgaaggagacccatgagaggaagggcagtgacaagagaggagacaaccaggacaaggagactggagtgaagaagctgcccggggtgatgctgttcaagaagaagaagaccaggaagctgaagatcgccctggccctgagtgacctggtgatctacaccaaggccgagaagttcaagagcttccagcacagccggctgtaccagcagttcaatgaaaacaacagcatcggggagacccaggccaggaagctgagcaagctgcgggtgcatgagttcatcttccacaccaggaagttcatcacccgcatctaccccaaggccaccagggctgacagcagcaacttcaacccccaggagttctggaacatcggctgccagatggtggccctgaacttccagaccccaggcctgcccatggacctgcagaatggcaagttcctggacaatggaggcagcggctacatcctgaagccccacttcctgcgggagagcaagagctacttcaaccccagcaacatcaaggagggcatgcccatcaccctgaccatccgcctcatcagcggcatccagctgcccctgacccacagcagcagcaacaagggggacagcctggtgatcatcgaggtgtttggagtgcccaatgaccagatgaagcagcagaccagggtcatcaagaagaatggccagggcaacatggtgatcatcccagcctag

SEQ ID NO: 164137 - DNA, 3387 bp, synthetic construct
  misc_feature 1..3387: note = Description of Artificial Sequence: Synthetic coding sequence
  source 1..3387: mol_type = other DNA
atggctgactgtgtgcggggctgggccgctgtgggcggggccctgcccaccagccctggccccagcctgggcgccaagggggccctgaaggccggcgtgggagaagatggagtgggcggcggccgcctggtgcacggccgggcccgctatgacagcggcggcgtgtccaatggagactgcagcctgggcgtgtctggagatgaggcccgggccagccccacccggggcccccggggcgtggccctggcccccaccccatctgctgtggtgtgcaccctgccccgggagagcaagccaggcggcctgccccggcgcagcagcatcatcaaggatggcaccaagcagaagcgggagaggaagaagacagtgtccttcagctccatgcccacagagaagaagatcagcagcgccagtgactgcatcaacagcatggtggagggcagcgagctgaagaaggtgcgcagcaacagccgcatctaccaccgctacttcctgctggatgctgacatgcagagcctgcgctgggagcccagcaagaaggacagcgagaaggccaagattgacatcaagagcatcaaggaggtgaggacaggcaagaacacagacatcttccgcagcaatggcatcagtgaccagatcagcgaggactgtgccttcagcgtcatctatggagaaaattatgagagcctggacctggtggccaacagcgcagatgtggccaacatctgggtgacaggcctgcgctacctgatctcctatggcaagcacaccctggacatgctggagagcagccaggacaacatgaggacctcctgggtgtcccagatgttcagcgagattgatgtggacaacctgggccacatcaccctgtgcaatgctgtgcagtgcatccggaacctgaaccctggcctgaagaccagcaagattgagctgaagttcaaggagctgcacaagagcaaggacaaggccggcacagaggtgaccaaggaggagttcatcgaggtgttccacgagctgtgcaccaggcctgagatctacttcctgctggtgcagttcagcagcaacaaggagttcctggacaccaaggacctgatgatgttcctggaggccgagcagggcgtggcccacatcaatgaggagatcagcctggagatcatccacaagtatgagcccagcaaggagggccaggagaagggctggctgagcattgatggcttcaccaactacctgatgagcccagactgctacatctttgatcctgagcacaagaaggtgtgccaggacatgaagcagcccctgagccactacttcatcaacagcagccacaacacctacctgattgaggaccagttccggggccccagcgacatcaccggctacatccgggccctgaagatgggctgccgctctgtggagctggatgtgtgggatggccctgacaatgaacctgtgatctacacaggccacaccatgaccagccagatcgtgttccgctctgtgattgacatcatcaacaagtatgccttctttgccagcgagtaccccctcatcctgtgcctggagaaccactgcagcatcaagcagcagaaggtgatggtgcagcacatgaagaagctgctgggggacaagctgtacaccaccagccccaacgtggaggagagctacctgcccagcccagatgtgctgaagggcaagatcctgatcaaggccaagaagctgagcagcaactgcagcggcgtggagggagatgtgacagatgaagatgagggcgctgagatgagccagaggatgggcaaggagaacatggagcagcccaacaacgtgcctgtgaagcgcttccagctgtgcaaggagctgtctgagctggtgtccatctgcaagtctgtgcagttcaaggagttccaggtgtccttccaggtgcagaagtactgggaggtgtgcagcttcaatgaggtgctggccagcaaatatgccaatgaaaatcctggggactttgtgaactacaacaagcgcttcctggcccgggtcttccccagccccatgagaattgacagcagcaacatgaacccccaggacttctggaagtgtggctgccagatcgtggccatgaacttccagaccccaggcctgatgatggacctgaacatcggctggttccggcagaatggaaactgtggctacgtgctgcggcctgccatcatgagggaggaggtgtccttcttcagcgccaacaccaaggacagcgtgcctggggtgagcccccagctgctgcacatcaagatcatcagcggccagaacttccccaagcccaagggcagcggggccaagggagatgtggtggacccctacgtgtatgtggagatccacggcatcccagctgactgtgccgagcagaggaccaagacagtgcaccagaatggagatgcccccatctttgatgagagctttgagttccagatcaacctgcctgagctggccatggtgcgctttgtggtgctggatgatgactacatcggagatgagttcatcggccagtacaccatcccctttgaatgtctgcagacaggctacagacatgtgcccctgcagagcctgaccggggaggtgctggcccacgccagcctgtttgtgcacgtggccatcaccaacagaagaggaggcggcaagccccacaagaggggcctgtctgtgaggaagggcaagaagagccgggagtatgccagcctgcggaccctgtggatcaagacagtggatgaggtgttcaagaatgcccagccccccatcagagatgccacagacctgcgggagaacatgcagaatgctgtggtgtccttcaaggagctgtgtggcctgagctctgtggccaacctgatgcagtgcatgctggccgtgagcccccgcttcctgggccctgacaacacccccctggtggtgctgaacctgtctgagcagtaccccaccatggagctgcagggcatcgtgcctgaggtgctgaagaagatcgtgaccacctatgacatgatgatccagagcctgaaggccctgattgaaaatgctgatgctgtgtatgagaagatcgtgcactgccagaaggccgccatggagttccacgagcacctgcacagcatcggcaccaaggagggcctgaaggagaggaagctgcagaaggctgtggagagcttcacctggaacatcaccatcctgaagggccaggccgacctgctgaagtatgccaagaatgagaccctggagaacctgaagcagatccactttgctgctgtgtcctgtggcctgaacaagccaggcacagaaaatgctgatgtgcagaagccccggcgcagcctggaggtgattcctgagaaggccaatgatgagaccggggagtag

SEQ ID NO: 164138 - DNA, 2883 bp, synthetic construct
  misc_feature 1..2883: note = Description of Artificial Sequence: Synthetic coding sequence
  source 1..2883: mol_type = other DNA
atgcccacagagaagaagatcagcagcgccagtgactgcatcaacagcatggtggagggcagcgagctgaagaaggtgcgcagcaacagccgcatctaccaccgctacttcctgctggatgctgacatgcagagcctgcgctgggagcccagcaagaaggacagcgagaaggccaagattgacatcaagagcatcaaggaggtgaggacaggcaagaacacagacatcttccgcagcaatggcatcagtgaccagatcagcgaggactgtgccttcagcgtcatctacggggagaactatgagagcctggacctggtggccaacagcgcagatgtggccaacatctgggtgacaggcctgcgctacctgatctcctatggcaagcacaccctggacatgctggagagcagccaggacaacatgaggacctcctgggtgtcccagatgttttctgaaattgatgtggacaacctgggccacatcaccctgtgcaatgctgtgcagtgcatccggaacctgaaccctggcctgaagaccagcaagattgagctgaagttcaaggagctgcacaagagcaaggacaaggccggcacagaggtgaccaaggaggagttcatcgaggtgttccacgagctgtgcaccaggcctgagatctacttcctgctggtgcagttcagcagcaacaaggagttcctggacaccaaggacctgatgatgttcctggaggccgagcagggcgtggcccacatcaatgaggagatcagcctggagatcatccacaagtatgagcccagcaaggagggccaggagaagggctggctgagcattgatggcttcaccaactacctgatgagcccagactgctacatctttgatcctgagcacaagaaggtgtgccaggacatgaagcagcccctgagccactacttcatcaacagcagccacaacacctacctgattgaggaccagttccggggccccagcgacatcaccggctacatccgggccctgaagatgggctgccgctctgtggagctggatgtgtgggatggccctgacaatgagcccgtcatctacacaggccacaccatgaccagccagatcgtgttccgcagcgtcatcgacatcatcaacaagtatgccttctttgccagcgagtaccccctcatcctgtgcctggagaaccactgcagcatcaagcagcagaaggtgatggtgcagcacatgaagaagctgctgggggacaagctgtacaccaccagccccaacgtggaggagagctacctgcccagcccagatgtgctgaagggcaagatcctgatcaaggccaagaagctgagcagcaactgcagcggcgtggagggagatgtgacagatgaagatgaaggagctgagatgagccagaggatgggcaaggagaacatggagcagcccaacaacgtgcctgtgaagcgcttccagctgtgcaaggagctgtctgagctggtgtccatctgcaagtctgtgcagttcaaggagttccaggtgtccttccaggtgcagaagtactgggaggtgtgcagcttcaatgaggtgctggccagcaaatatgccaatgaaaatcctggggactttgtgaactacaacaagcgcttcctggcccgggtcttccccagccccatgagaattgacagcagcaacatgaacccccaggacttctggaagtgtggctgccagatcgtggccatgaacttccagaccccaggcctgatgatggacctgaacatcggctggttccggcagaatggaaactgtggctacgtgctgcggcctgccatcatgagggaggaggtgtccttcttcagcgccaacaccaaggacagcgtgcctggggtgagcccccagctgctgcacatcaagatcatcagcggccagaacttccccaagcccaagggcagcggggccaagggagatgtggtggacccctacgtgtatgtggagatccacggcatcccagctgactgtgccgagcagaggaccaagacagtgcaccagaatggagatgcccccatctttgatgagagctttgagttccagatcaacctgcctgagctggccatggtgcgctttgtggtgctggatgatgactacatcggagatgagttcatcggccagtacaccatcccctttgagtgcctgcagacaggctaccgccacgtgcccctgcagagcctgactggagaggtgctggcccacgccagcctgtttgtgcacgtggccatcaccaacagaagaggaggcggcaagccccacaagaggggcctgtctgtgaggaagggcaagaagagccgggagtatgccagcctgcggaccctgtggatcaagacagtggatgaggtgttcaagaatgcccagccccccatcagagatgccacagacctgcgggagaacatgcagaatgctgtggtgtccttcaaggagctgtgtggcctgagctctgtggccaacctgatgcagtgcatgctggccgtgagcccccgcttcctgggccctgacaacacccccctggtggtgctgaacctgtctgagcagtaccccaccatggagctgcagggcatcgtgcctgaggtgctgaagaagatcgtgaccacctatgacatgatgatccagagcctgaaggccctgattgaaaatgctgatgctgtgtatgagaagatcgtgcactgccagaaggccgccatggagttccacgagcacctgcacagcatcggcaccaaggagggcctgaaggagaggaagctgcagaaggctgtggagagcttcacctggaacatcaccatcctgaagatcaggaagacaggccgccgcagcatctttgtgccccagacccccatcatggtgtag

SEQ ID NO: 164139 - DNA, 3006 bp, synthetic construct
  misc_feature 1..3006: note = Description of Artificial Sequence: Synthetic coding sequence
  source 1..3006: mol_type = other DNA
atgcccacagagaagaagatcagcagcgccagtgactgcatcaacagcatggtggagggcagcgagctgaagaaggtgcgcagcaacagccgcatctaccaccgctacttcctgctggatgctgacatgcagagcctgcgctgggagcccagcaagaaggacagcgagaaggccaagattgacatcaagagcatcaaggaggtgaggacaggcaagaacacagacatcttccgcagcaatggcatcagtgaccagatcagcgaggactgtgccttcagcgtcatctacggggagaactatgagagcctggacctggtggccaacagcgcagatgtggccaacatctgggtgacaggcctgcgctacctgatctcctatggcaagcacaccctggacatgctggagagcagccaggacaacatgaggacctcctgggtgtcccagatgttttctgaaattgatgtggacaacctgggccacatcaccctgtgcaatgctgtgcagtgcatccggaacctgaaccctggcctgaagaccagcaagattgagctgaagttcaaggagctgcacaagagcaaggacaaggccggcacagaggtgaccaaggaggagttcatcgaggtgttccacgagctgtgcaccaggcctgagatctacttcctgctggtgcagttcagcagcaacaaggagttcctggacaccaaggacctgatgatgttcctggaggccgagcagggcgtggcccacatcaatgaggagatcagcctggagatcatccacaagtatgagcccagcaaggagggccaggagaagggctggctgagcattgatggcttcaccaactacctgatgagcccagactgctacatctttgatcctgagcacaagaaggtgtgccaggacatgaagcagcccctgagccactacttcatcaacagcagccacaacacctacctgattgaggaccagttccggggccccagcgacatcaccggctacatccgggccctgaagatgggctgccgctctgtggagctggatgtgtgggatggccctgacaatgagcccgtcatctacacaggccacaccatgaccagccagatcgtgttccgcagcgtcatcgacatcatcaacaagtatgccttctttgccagcgagtaccccctcatcctgtgcctggagaaccactgcagcatcaagcagcagaaggtgatggtgcagcacatgaagaagctgctgggggacaagctgtacaccaccagccccaacgtggaggagagctacctgcccagcccagatgtgctgaagggcaagatcctgatcaaggccaagaagctgagcagcaactgcagcggcgtggagggagatgtgacagatgaagatgaaggagctgagatgagccagaggatgggcaaggagaacatggagcagcccaacaacgtgcctgtgaagcgcttccagctgtgcaaggagctgtctgagctggtgtccatctgcaagtctgtgcagttcaaggagttccaggtgtccttccaggtgcagaagtactgggaggtgtgcagcttcaatgaggtgctggccagcaaatatgccaatgaaaatcctggggactttgtgaactacaacaagcgcttcctggcccgggtcttccccagccccatgagaattgacagcagcaacatgaacccccaggacttctggaagtgtggctgccagatcgtggccatgaacttccagaccccaggcctgatgatggacctgaacatcggctggttccggcagaatggaaactgtggctacgtgctgcggcctgccatcatgagggaggaggtgtccttcttcagcgccaacaccaaggacagcgtgcctggggtgagcccccagctgctgcacatcaagatcatcagcggccagaacttccccaagcccaagggcagcggggccaagggagatgtggtggacccctacgtgtatgtggagatccacggcatcccagctgactgtgccgagcagaggaccaagacagtgcaccagaatggagatgcccccatctttgatgagagctttgagttccagatcaacctgcctgagctggccatggtgcgctttgtggtgctggatgatgactacatcggagatgagttcatcggccagtacaccatcccctttgagtgcctgcagacaggctaccgccacgtgcccctgcagagcctgactggagaggtgctggcccacgccagcctgtttgtgcacgtggccatcaccaacagaagaggaggcggcaagccccacaagaggggcctgtctgtgaggaagggcaagaagagccgggagtatgccagcctgcggaccctgtggatcaagacagtggatgaggtgttcaagaatgcccagccccccatcagagatgccacagacctgcgggagaacatgcagaatgctgtggtgtccttcaaggagctgtgtggcctgagctctgtggccaacctgatgcagtgcatgctggccgtgagcccccgcttcctgggccctgacaacacccccctggtggtgctgaacctgtctgagcagtaccccaccatggagctgcagggcatcgtgcctgaggtgctgaagaagatcgtgaccacctatgacatgatgatccagagcctgaaggccctgattgaaaatgctgatgctgtgtatgagaagatcgtgcactgccagaaggccgccatggagttccacgagcacctgcacagcatcggcaccaaggagggcctgaaggagaggaagctgcagaaggctgtggagagcttcacctggaacatcaccatcctgaagggccaggccgacctgctgaagtatgccaagaatgagaccctggagaacctgaagcagatccactttgctgctgtgtcctgtggcctgaacaagccaggcacagaaaatgctgatgtgcagaagcccaggaggagcctggaggtgattcctgagaaggccaatgatgaaacaggagagtag

SEQ ID NO: 164140 - DNA, 3006 bp, synthetic construct; identical to SEQ ID NO: 164139
  misc_feature 1..3006: note = Description of Artificial Sequence: Synthetic coding sequence
  source 1..3006: mol_type = other DNA

SEQ ID NO: 164141 - DNA, 2802 bp, synthetic construct
  misc_feature 1..2802: note = Description of Artificial Sequence: Synthetic coding sequence
  source 1..2802: mol_type = other DNA
atgacagccaccccagagagcctcttccccactggagatgagctggacagcagccagctgcagatggagagtgatgaggtggacaccctgaaggagggggaggaccctgctgacaggatgcaccccttcctggccatctatgagctgcagagcctgaaggtgcaccccctggtgtttgcccctggggtgcctgtgacagcccaggtggtgggcacagagcgctacaccagcggcagcaaggtgggcacctgcaccctgtacagcgtgcggctgacccatggagacttctcctggaccaccaagaagaagtaccgccacttccaggagctgcaccgggacctgctgcggcacaaggtgctgatgagcctgctgcccctggccaggtttgctgtggcctacagccctgccagagatgctggcaaccgggagatgcccagcctgccccgggccggccctgagggcagcaccaggcatgctgccagcaagcagaagtacctggagaactacctgaaccggctgctgaccatgtccttctacagaaactaccacgccatgacagagttcctggaggtgtcccagctgtccttcatcccagacctgggcaggaagggcctggagggcatgatcaggaagaggtctgggggccaccgggtgcccggcctgacctgctgcggccgggaccaggtgtgctaccgctggagcaagcgctggctggtggtgaaggacagcttcctgctgtacatgtgcctggagaccggggccatcagctttgtgcagctgtttgatcctggctttgaggtgcaggtgggcaagaggagcacagaggcccggcatggagtgagaattgacaccagccacaggagcctcatcctgaagtgcagcagctaccggcaggcccgctggtgggcccaggagatcacagagctggcccagggccctggccgggacttcctgcagctgcacagacatgacagctatgccccacccaggcctggcaccctggcccgctggtttgtgaatggagctggctactttgctgctgtggctgatgccatcctgcgggcccaggaggagatcttcatcacagactggtggctgagccctgaggtgtacctgaagaggcctgcccacagtgatgactggaggctggacatcatgctgaagaggaaggccgaggagggcgtgcgggtgtccatcctgctcttcaaggaggtggagctggccctgggcatcaacagcggctacagcaagagggccctgatgctgctgcaccccaacatcaaggtgatgaggcacccagaccaggtgaccctgtgggcccaccacgagaagctgctggtggtggaccaggtggtggccttcctgggcggcctggacctggcctacggccgctgggatgacctgcactaccgcctgacagacctgggggacagcagcgagagcgctgccagccagccccccacccccaggccagacagccctgccaccccagacctgagccacaaccagttcttctggctgggcaaggactacagcaacctgatcaccaaggactgggtgcagctggaccggccctttgaggacttcatcgaccgggagaccacccccaggatgccctggagagatgtgggcgtggtggtgcacggcctgcctgcccgggacctggcccggcacttcatccagcgctggaacttcaccaagaccaccaaggccaagtacaagacccccacctacccctacctgctgcccaagagcaccagcacagccaaccagctgcccttcaccctgcccggcggccagtgcaccaccgtgcaggtgctgcggtctgtggaccgctggagcgctggcaccctggagaacagcatcctgaatgcctacctgcacaccatccgggagagccagcacttcctgtacatcgagaaccagttcttcatcagctgcagtgatggccgcacagtgctgaacaaggtgggagatgaaattgtggaccgcatcctgaaggcccacaagcagggctggtgctacagagtgtatgtgctgctgcccctgctgcccggctttgaaggagacatcagcactggaggcggcaacagcatccaggccatcctgcacttcacctaccgcaccctgtgccgcggggagtacagcatcctgcaccggctgaaggccgccatgggcacagcctggagggactacatcagcatctgtggcctgcggacccatggagagctgggcggccaccctgtgtctgagctgatctacatccacagcaaggtgctgattgctgatgacagaactgtcatcatcggcagcgccaacatcaatgacaggagcctgctgggcaagagggacagcgagctggccgtgctgattgaggacacagaaacagagcccagcctgatgaatggagctgagtaccaggccggccgctttgccctgagcctgaggaagcactgcttcggggtcatcctgggcgccaacaccaggccagacctggacctgcgggaccccatctgtgatgacttcttccagctgtggcaggacatggccgagagcaatgccaacatctatgagcagatcttccgctgcctgcccagcaatgccaccaggagcctgcggaccctgcgggagtatgtggccgtggagcccctggccaccgtgtccccacccctggcccggtctgagctgacccaggtgcagggccacctggtgcacttccccctgaagttcctggaggatgagagcctgctgccccccctgggcagcaaggagggcatgatccccctggaggtgtggacctag

SEQ ID NO: 164142 - DNA, 2769 bp, synthetic construct
  misc_feature 1..2769: note = Description of Artificial Sequence: Synthetic coding sequence
  source 1..2769: mol_type = other DNA
atgacagccaccccagagagcctcttccccactggagatgagctggacagcagccagctgcagatggagagtgatgaggtggacaccctgaaggagggggaggaccctgctgacaggatgcaccccttcctggccatctatgagctgcagagcctgaaggtgcaccccctggtgtttgcccctggggtgcctgtgacagcccaggtggtgggcacagagcgctacaccagcggcagcaaggtgggcacctgcaccctgtacagcgtgcggctgacccatggagacttctcctggaccaccaagaagaagtaccgccacttccaggagctgcaccgggacctgctgcggcacaaggtgctgatgagcctgctgcccctggccaggtttgctgtggcctacagccctgccagagatgctggcaaccgggagatgcccagcctgccccgggccggccctgagggcagcaccaggcatgctgccagcaagcagaagtacctggagaactacctgaaccggctgctgaccatgtccttctacagaaactaccacgccatgacagagttcctggaggtgtcccagctgtccttcatcccagacctgggcaggaagggcctggagggcatgatcaggaagaggtctgggggccaccgggtgcccggcctgacctgctgcggccgggaccaggtgtgctaccgctggagcaagcgctggctggtggtgaaggacagcttcctgctgtacatgtgcctggagaccggggccatcagctttgtgcagctgtttgatcctggctttgaggtgcaggtgggcaagaggagcacagaggcccggcatggagtgagaattgacaccagccacaggagcctcatcctgaagtgcagcagctaccggcaggcccgctggtgggcccaggagatcacagagctggcccagggccctggccgggacttcctgcagctgcacagacatgacagctatgccccacccaggcctggcaccctggcccgctggtttgtgaatggagctggctactttgctgctgtggctgatgccatcctgcgggcccaggaggagatcttcatcacagactggtggctgagccctgaggtgtacctgaagaggcctgcccacagtgatgactggaggctggacatcatgctgaagaggaaggccgaggagggcgtgcgggtgtccatcctgctcttcaaggaggtggagctggccctgggcatcaacagcggctacagcaagagggccctgatgctgctgcaccccaacatcaaggtgatgaggcacccagaccaggtgaccctgtgggcccaccacgagaagctgctggtggtggaccaggtggtggccttcctgggcggcctggacctggcctacggccgctgggatgacctgcactaccgcctgacagacctgggggacagcagcgagagcgctgccagccagccccccacccccaggccagacagccctgccaccccagacctgagccacaaccagttcttctggctgggcaaggactacagcaacctgatcaccaaggactgggtgcagctggaccggccctttgaggacttcatcgaccgggagaccacccccaggatgccctggagagatgtgggcgtggtggtgcacggcctgcctgcccgggacctggcccggcacttcatccagcgctggaacttcaccaagaccaccaaggccaagtacaagacccccacctacccctacctgctgcccaagagcaccagcacagccaaccagctgcccttcaccctgcccggcggccagtgcaccaccgtgcaggtgctgcggtctgtggaccgctggagcgctggcaccctggagaacagcatcctgaatgcctacctgcacaccatccgggagagccagcacttcctgtacatcgagaaccagttcttcatcagctgcagtgatggccgcacagtgctgaacaaggtgggagatgaaattgtggaccgcatcctgaaggcccacaagcagggctggtgctacagagtgtatgtgctgctgcccctgctgcccggctttgaaggagacatcagcactggaggcggcaacagcatccaggccatcctgcacttcacctaccgcaccctgtgccgcggggagtacagcatcctgcaccggctgaaggccgccatgggcacagcctggagggactacatcagcatctgtggcctgcggacccatggagagctgggcggccaccctgtgtctgagctgatctacatccacagcaaggtgctgattgctgatgacagaactgtcatcatcggcagcgccaacatcaatgacaggagcctgctgggcaagagggacagcgagctggccgtgctgattgaggacacagaaacagagcccagcctgatgaatggagctgagtaccaggccggcagcgtcatcctgggcgccaacaccaggccagacctggacctgcgggaccccatctgtgatgacttcttccagctgtggcaggacatggccgagagcaatgccaacatctatgagcagatcttccgctgcctgcccagcaatgccaccaggagcctgcggaccctgcgggagtatgtggccgtggagcccctggccaccgtgagcccccccctggcccggtctgagctgacccaggtgcagggccacctggtgcacttccccctgaagttcctggaggatgagagcctgctgccccccctgggcagcaaggagggcatgatccccctggaggtgtggacctag

SEQ ID NO: 164143 - DNA, 957 bp, synthetic construct
  misc_feature 1..957: note = Description of Artificial Sequence: Synthetic coding sequence
  source 1..957: mol_type = other DNA
atggacaagcagaacagccagatgaatgccagccaccctgagaccaacctgcctgtgggctacccaccccagtacccacccacagccttccagggccccccaggctacagcggctacccaggcccccaggtgtcctacccacctcctcctgctggccacagcggccctggccctgctggcttccctgtgcccaaccagcctgtgtacaaccagcctgtgtacaaccagcctgtgggcgctgctggggtgccctggatgcctgccccccagccccccctgaactgccccccaggcctggagtacctgagccagattgaccagatcctgatccaccagcagatcgagctgctggaggtgctgactggatttgagaccaacaacaagtatgagatcaagaacagctttggccagagggtgtactttgctgctgaggacacagactgctgcaccaggaactgctgcggccccagccggcccttcaccctgcgcatcatcgacaacatgggccaggaggtgatcaccctggagcggcccctgcgctgcagcagctgctgctgcccctgctgcctgcaggagattgagatccaggcccctcctggggtgcccatcggctacgtgatccagacctggcacccctgcctgcccaagttcaccatccagaatgagaagagagaagatgtgctgaagatcagcggcccctgtgtggtgtgcagctgctgcggagatgtggactttgagatcaagagcctggatgagcagtgtgtggtgggcaagatcagcaagcactggacaggcatcctgcgggaggccttcacagatgctgacaactttggcatccagttccccctggacctggatgtgaagatgaaggctgtgatgattggagcctgcttcctgattgacttcatgttctttgagagcacaggcagccaggagcagaagtctggagtgtggtag

SEQ ID NO: 164144 - DNA, 93 bp, synthetic construct
  misc_feature 1..93: note = Description of Artificial Sequence: Synthetic coding sequence
  source 1..93: mol_type = other DNA
atgaaggctgtgatgattggagcctgcttcctgattgacttcatgttctttgagagcacaggcagccaggagcagaagtctggagtgtggtag

SEQ ID NO: 164145 - DNA, 750 bp, synthetic construct
  misc_feature 1..750: note = Description of Artificial Sequence: Synthetic coding sequence
  source 1..750: mol_type = other DNA
atggacaagcagaacagccagatgaatgccagccaccctgagaccaacctgcctgtgggctacccaccccagtacccacccacagccttccagggccccccaggctacagcggctacccaggcccccaggtgtcctacccacctcctcctgctggccacagcggccctggccctgctggcttccctgtgcccaaccagcctgtgtacaaccagcctgtgtacaaccagcctgtgggcgctgctggggtgccctggatgcctgccccccagccccccctgaactgccccccaggcctggagtacctgagccagattgaccagatcctgatccaccagcagatcgagctgctggaggtgctgactggatttgagaccaacaacaagtatgagatcaagaacagctttggccagagggtgtactttgctgctgaggacacagactgctgcaccaggaactgctgcggccccagccggcccttcaccctgcgcatcatcgacaacatgggccaggaggtgatcaccctggagcggcccctgcgctgcagcagctgctgctgcccctgctgcctgcaggagattgagatccaggcccctcctggggtgcccatcggctacgtgatccagacctggcacccctgcctgcccaagttcaccatccagaatgagaagagagaagatgtgctgaagatcagcggcccctgtgtggtgtgcagctgctgcggagatgtggactttgagatcaagagctag

SEQ ID NO: 164146 - DNA, 675 bp, synthetic construct
  misc_feature 1..675: note = Description of Artificial Sequence: Synthetic coding sequence
  source 1..675: mol_type = other DNA
atgcctgcccctcctccacccctgaactgccccccaggcctggagtacctgagccagattgacatgatcctgatccaccagcagatcgagctgctggaggtgctcttctcctttgagagcagcaacatgtatgagatcaagaacagctttggccagaggatctactttgctgctgaggacaccaacttctgcatccggaactgctgcggccgcagccggcccttcaccctgcgcatcacagacaacgtgggccgggaggtgatcaccctggagcggcccctgcgctgcaactgctgctgctgcccctgctgcctgcaggagattgagatccaggcccctcctggggtgcctgtgggctacgtgacccagacctggcacccctgcctgaccaagttcaccatcaagaaccagaagcgggaggatgtgctgaagatcagcggcccctgcatcgtgtgcagctgcatcgccggcgtggactttgagatcaccagcctggatgagcagatcgtggtgggccgcatcagcaagcactggagcggcttcctgcgggaggccttcacagatgctgacaactttggcatccagttcccccgggacctggatgtgaagatgaaggctgtgatgattggagcctgcttcctgattgactacatgttctttgagaggaccaggtag

SEQ ID NO: 164147 - DNA, 486 bp, synthetic construct
  misc_feature 1..486: note = Description of Artificial Sequence: Synthetic coding sequence
  source 1..486: mol_type = other DNA
atgcctgcccctcctccacccctgaactgccccccaggcctggagtacctgagccagattgacatgatcctgatccaccagcagatcgagctgctggaggtgctcttctcctttgagagcagcaacatgtatgagatcaagaacagctttggccagaggatctactttgctgctgaggacaccaacttctgcatccggaactgctgcggccgcagccggcccttcaccctgcgcatcacagacaacgtgggccgggaggtgatcaccctggagcggcccctgcgctgcaactgctgctgctgcccctgctgcctgcaggagattgagatccaggcccctcctggggtgcctgtgggctacgtgacccagacctggcacccctgcctgaccaagttcaccatcaagaaccagaagcgggaggatgtgctgaagatcagcggcccctgcatcgtgtgcagctgcatcgccggcgtggactttgaatag

SEQ ID NO: 164148 - DNA, 894 bp, synthetic construct
  misc_feature 1..894: note = Description of Artificial Sequence: Synthetic coding sequence
  source 1..894: mol_type = other DNA
atgaggtcctggaacagcctcttctgcctgaacagcagcaggcctcctggccacatcgtgtaccccaagcaccaggccggccacacaggcaagcaggccgaccacctgggcagccaggccttctacccaggccggcagcacgactacctggtgcccccagctggaacagctggcatccctgtgcagaaccagcccggccggcctgagggcgtgccctggatgcctgcccctcctccacccctgaactgccccccaggcctggagtacctgagccagattgacatgatcctgatccaccagcagatcgagctgctggaggtgctcttctcctttgagagcagcaacatgtatgagatcaagaacagctttggccagaggatctactttgctgctgaggacaccaacttctgcatccggaactgctgcggccgcagccggcccttcaccctgcgcatcacagacaacgtgggccgggaggtgatcaccctggagcggcccctgcgctgcaactgctgctgctgcccctgctgcctgcaggagattgagatccaggcccctcctggggtgcctgtgggctacgtgacccagacctggcacccctgcctgaccaagttcaccatcaagaaccagaagagagaagatgtgctgaagatcagcggcccctgcatcgtgtgcagctgcatcgccggcgtggactttgagatcaccagcctggatgagcagatcgtggtgggccgcatcagcaagcactggagcggcttcctgcgggaggccttcacagatgctgacaactttggcatccagttcccccgggacctggatgtgaagatgaaggctgtgatgattggagcctgcttcctgattgactacatgttctttgagaggaccaggtag

SEQ ID NO: 164149 - DNA, 951 bp, synthetic construct
  misc_feature 1..951: note = Description of Artificial Sequence: Synthetic coding sequence
  source 1..951: mol_type = other DNA
gtgtctgcccacctgcgcttcttcctggccatcatcctgcgggacagcggcctgtgggccgagtggaggatgaagcccttccagatccacctgcccggccccccaggccacatcgtgtaccccaagcaccaggccggccacacaggcaagcaggccgaccacctgggcagccaggccttctacccaggccggcagcacgactacctggtgcccccagctggaacagctggcatccctgtgcagaaccagcccggccggcctgagggcgtgccctggatgcctgcccctcctccacccctgaactgccccccaggcctggagtacctgagccagattgacatgatcctgatccaccagcagatcgagctgctggaggtgctcttctcctttgagagcagcaacatgtatgagatcaagaacagctttggccagaggatctactttgctgctgaggacaccaacttctgcatccggaactgctgcggccgcagccggcccttcaccctgcgcatcacagacaacgtgggccgggaggtgatcaccctggagcggcccctgcgctgcaactgctgctgctgcccctgctgcctgcaggagattgagatccaggcccctcctggggtgcctgtgggctacgtgacccagacctggcacccctgcctgaccaagttcaccatcaagaaccagaagcgggaggatgtgctgaagatcagcggcccctgcatcgtgtgcagctgcatcgccggcgtggactttgagatcaccagcctggatgagcagatcgtggtgggccgcatcagcaagcactggagcggcttcctgcgggaggccttcacagatgctgacaactttggcatccagttcccccgggacctggatgtgaagatgaaggctgtgatgattggagcctgcttcctgattgactacatgttctttgagaggaccaggtag

SEQ ID NO: 164150 - DNA, 888 bp, synthetic construct
  misc_feature 1..888: note = Description of Artificial Sequence: Synthetic coding sequence
  source 1..888: mol_type = other DNA
atggccggctacctgccccccaagggctacgcccccagccccccaccaccctaccctgtgaccccaggctacccagagcccgccctgcaccctggccctggccaggcccctgtgcctgcccaggtgcctgccccagcccctggctttgccctcttccccagccctggccctgtggccctgggcagcgctgcccccttcctgcccctgcccggggtgcccagcggcctggagttcctggtgcagattgaccagatcctgatccaccagaaggccgagcgggtggagaccttcctgggctgggagacctgcaacagatatgagctgcggagcggggccggccagcccctgggccaggccgctgaggagagcaactgctgtgcccggctgtgctgcggggcccggcggcccctgcgggtgcggctggccgaccccggggaccgggaggtgctgcggctgctgcggcccctgcactgcggctgcagctgctgcccctgtggcctgcaggagatggaggtgcaggcccctcctggcaccaccatcggccacgtgctgcagacctggcaccccttcctgcccaagttcagcatccaggatgctgaccggcagacagtgctgcgggtggtgggcccctgctggacctgtggctgcggcacagacaccaactttgaggtgaagaccagagatgagagccgctctgtgggccgcatcagcaagcagtggggcggcctggtgcgggaggccctgacagatgctgatgactttggcctgcagttccccctggacctggatgtgcgggtgaaggctgtgctgctgggcgccaccttcctgattgactacatgttctttgagaagaggggcggggccggccccagcgctgtgaccagctag

SEQ ID NO: 164151 - DNA, 672 bp, synthetic construct
  misc_feature 1..672: note = Description of Artificial Sequence: Synthetic coding sequence
  source 1..672: mol_type = other DNA
atggccggctacctgccccccaagggctacgcccccagccccccaccaccctaccctgtgaccccaggctacccagagcccgccctgcaccctggccctggccaggcccctgtgcctgcccaggtgcctgccccagcccctggctttgccctcttccccagccctggccctgtggccctgggcagcgctgcccccttcctgcccctgcccggggtgcccagcggcctggagttcctggtgcagattgaccagatcctgatccaccagaaggccgagcgggtggagaccttcctgggctggaggcctgtgattggcatgaactgtgccctgggccctggcagcccctgggtgcggcggccccggcgggccacagctgcccctgtgtgtgctgtggccccagctggccgctgtgtgtctgcctggcccaccccaggcaccgtgcgctgctgcgtgtgcagcgcccgctgcaccgtggccgctgctgctgcccctgtggccagccgccgctggaagtaccgcctgcaccaggccccacccctggccacctgctaccggcccggcatccccagcagccccagcagccccagcaggatgcccatcgcccggcagagctgtgagtggtggggccctgctggccctgtggccgtggcccagacccccaccctgaggtag

SEQ ID NO: 164152 - DNA, 888 bp, synthetic construct; identical to SEQ ID NO: 164150
  misc_feature 1..888: note = Description of Artificial Sequence: Synthetic coding sequence
  source 1..888: mol_type = other DNA

SEQ ID NO: 164153 - DNA, 888 bp, synthetic construct; identical to SEQ ID NO: 164150
  misc_feature 1..888: note = Description of Artificial Sequence: Synthetic coding sequence
  source 1..888: mol_type = other DNA

SEQ ID NO: 164154 - DNA, 990 bp, synthetic construct
  misc_feature 1..990: note = Description of Artificial Sequence: Synthetic coding sequence
  source 1..990: mol_type = other DNA
atgtctggagtggtgcccacagcccctgagcagcctgctggggagatggagaaccagaccaagcccccagaccccaggccagatgcccctcctgagtacaacagccacttcctgcccggccccccaggcacagctgtgcccccacccaccggctacccaggcggcctgcccatgggctactacagcccccagcagcccagcaccttccccctgtaccagcctgtgggcggcatccaccctgtgcgctaccagcccgggaagtaccccatgcccaaccagagcgtgcccatcacctggatgcctggccccacccccatggccaactgccccccaggcctggagtacctggtgcagctggacaacatccacgtgctgcagcactttgagcccctggagatgatgacctgctttgagaccaacaacagatatgacatcaagaacaacagcgaccagatggtgtacatcgtgacagaggacacagatgacttcaccagaaatgcctaccgcaccctgcggccctttgtgctgcgggtgacagactgcatgggccgggagatcatgaccatgcagaggcccttccgctgcacctgctgctgcttctgctgccccagcgcccggcaggagctggaggtgcagtgccccccaggagtgaccatcggctttgtggccgagcactggaacctgtgcagagctgtgtacagcatccagaatgagaagaaggaaaatgtgatgagggtgcggggcccctgcagcacctacggctgcggcagtgacagcgtgtttgaggtgaagagcctggatggcatcagcaacatcggcagcatcatcaggaagtggaatggcctgctgagcgccatggctgatgctgaccactttgacatccacttccccctggacctggatgtgaagatgaaggccatgatctttggagcctgcttcctgattgacttcatgtactttgagaggagccccccccagaggagcaggtag

SEQ ID NO: 164155 - DNA, 720 bp, synthetic construct
  misc_feature 1..720: note = Description of Artificial Sequence: Synthetic coding sequence
  source 1..720: mol_type = other DNA
atgtctggagtggtgcccacagcccctgagcagcctgctggggagatggagaaccagaccaagcccccagaccccaggccagatgcccctcctgagtacaacagccacttcctgcccggccccccaggcacagctgtgcccccacccaccggctacccaggcggcctgcccatgggctactacagcccccagcagcccagcaccttccccctgtaccagcctgtgggcggcatccaccctgtgcgctaccagcccgggaagtaccccatgcccaaccagagcgtgcccatcacctggatgcctggccccacccccatggccaactgccccccaggcctggagtacctggtgcagctggaggtgcagtgccccccaggagtgaccatcggctttgtggccgagcactggaacctgtgcagagctgtgtacagcatccagaatgagaagaaggaaaatgtgatgagggtgcggggcccctgcagcacctacggctgcggcagtgacagcgtgtttgaggtgaagagcctggatggcatcagcaacatcggcagcatcatcaggaagtggaatggcctgctgagcgccatggctgatgctgaccactttgacatccacttccccctggacctggatgtgaagatgaaggccatgatctttggagcctgcttcctgattgacttcatgtactttgagaggagccccccccagaggagcaggtag

SEQ ID NO: 164156 - DNA, 990 bp, synthetic construct; identical to SEQ ID NO: 164154
  misc_feature 1..990: note = Description of Artificial Sequence: Synthetic coding sequence
  source 1..990: mol_type = other DNA

SEQ ID NO: 164157 - DNA, 789 bp, synthetic construct
  misc_feature 1..789: note = Description of Artificial Sequence: Synthetic coding sequence
  source 1..789: mol_type = other DNA
atgtctggagtggtgcccacagcccctgagcagcctgctggggagatggagaaccagaccaagcccccagaccccaggccagatgcccctcctgagtacaacagccacttcctgcccggccccccaggcacagctgtgcccccacccaccggctacccaggcggcctgcccatgggctactacagcccccagcagcccagcaccttccccctgtaccagcctgtgggcggcatccaccctgtgcgctaccagcccgggaagtaccccatgcccaaccagagcgtgcccatcacctggatgcctggccccacccccatggccaactgccccccaggcctggagtacctggtgcagctggacaacatccacgtgctgcagcactttgagcccctggagatgatgacctgctttgagaccaacaacagatatgacatcaagaacaacagcgaccagatggtgtacatcgtgacagaggacacagatgacttcaccagaaatgcctaccgcaccctgcggccctttgtgctgcgggtgacagactgcatgggccgggagatcatgaccatgcagaggcccttccgctgcacctgctgctgcttctgctgccccagcgcccggcaggagctggaggtgcagtgccccccaggagtgaccatcggctttgtggccgagcactggaacctgtgcagagctgtgtacagcatccagaatgagaagaaggaaaatgtgatgagggtgcggggcccctgcagcacctacggctgcggcagtgacagcgtgtttgaatag

SEQ ID NO: 164158 - DNA, 627 bp, synthetic construct
  misc_feature 1..627: note = Description of Artificial Sequence: Synthetic coding sequence
  source 1..627: mol_type = other DNA
atgtctggagtggtgcccacagcccctgagcagcctgctggggagatggagaaccagaccaagcccccagaccccaggccagatgcccctcctgagtacaacagccacttcctgcccggccccccaggcacagctgtgcccccacccaccggctacccaggcggcctgcccatgggctactacagcccccagcagcccagcaccttccccctgtaccagcctgtgggcggcatccaccctgtgcgctaccagcccgggaagtaccccatgcccaaccagagcgtgcccatcacctggatgcctggccccacccccatggccaactgccccccaggcctggagtacctggtgcagctggacaacatccacgtgctgcagcactttgagcccctggagatgatgacctgctttgagaccaacaacagatatgacatcaagaacaacagcgaccagatggtgtacatcgtgacagaggacacagatgacttcaccagaaatgcctaccgcaccctgcggccctttgtgctgcgggtgacagactgcatgggccgggagatcatgaccatgcagaggcccttccgctgcacctgctgctgcttctgctgccccagcgcccggcaggagtag

SEQ ID NO: 164159 - DNA, 429 bp, synthetic construct
  misc_feature 1..429: note = Description of Artificial Sequence: Synthetic coding sequence
  source 1..429: mol_type = other DNA
atgtctggagtggtgcccacagcccctgagcagcctgctggggagatggagaaccagaccaagcccccagaccccaggccagatgcccctcctgagtacaacagccacttcctgcccggccccccaggcacagctgtgcccccacccaccggctacccaggcggcctgcccatgggctactacagcccccagcagcccagcaccttccccctgtaccagcctgtgggcggcatccaccctgtgcgctaccagcccgggaagtaccccatgcccaaccagagcgtgcccatcacctggatgcctggccccacccccatggccaactgccccccaggcctggagtacctggtgcagctggacaacatccacgtgctgcagcactttgagcccctggagatgatgacctgctttgagaccaacaacagatag

SEQ ID NO: 164160 - DNA, 990 bp, synthetic construct; identical to SEQ ID NO: 164154
  misc_feature 1..990: note = Description of Artificial Sequence: Synthetic coding sequence
  source 1..990: mol_type = other DNA

SEQ ID NO: 164161 - DNA, 297 bp, synthetic construct
  misc_feature 1..297: note = Description of Artificial Sequence: Synthetic coding sequence
  source 1..297: mol_type = other DNA
atgtctggagtggtgcccacagcccctgagcagcctgctggggagatggagaaccagaccaagcccccagaccccaggccagatgcccctcctgagtacaacagccacttcctgcccggccccccaggcacagctgtgcccccacccaccggctacccaggcggcctgcccatgggctactacagcccccagcagcccagcaccttccccctgtaccagcctgtgggcggcatccaccctgtgcgctaccagcccgggaagtaccccatgcccaaccagagcgtgcccatcacctag

SEQ ID NO: 164162 - DNA, 675 bp, synthetic construct
  misc_feature 1..675: note = Description of Artificial Sequence: Synthetic coding sequence
  source 1..675: mol_type = other DNA
atggagaaccagaccaagcccccagaccccaggccagatgcccctcctgagtacaacagccacttcctgcccggccccccaggcacagctgtgcccccacccaccggctacccaggcggcctgcccatgggctactacagcccccagcagcccagcaccttccccctgtaccagcctgtgggcggcatccaccctgtgcgctaccagcccgggaagtaccccatgcccaaccagagcgtgcccatcacctggatgcctggccccacccccatggccaactgccccccaggcctggagtacctggtgcagctggaggtgcagtgccccccaggagtgaccatcggctttgtggccgagcactggaacctgtgcagagctgtgtacagcatccagaatgagaagaaggaaaatgtgatgagggtgcggggcccctgcagcacctacggctgcggcagtgacagcgtgtttgaggtgaagagcctggatggcatcagcaacatcggcagcatcatcaggaagtggaatggcctgctgagcgccatggctgatgctgaccactttgacatccacttccccctggacctggatgtgaagatgaaggccatgatctttggagcctgcttcctgattgacttcatgtactttgagaggagccccccccagaggagcaggtag

SEQ ID NO: 164163 - DNA, 1326 bp, synthetic construct
  misc_feature 1..1326: note = Description of Artificial Sequence: Synthetic coding sequence
  source 1..1326: mol_type = other DNA
atggccctgtttggagccctcttcctggccctgctggccggggcccatgctgagttccctggctgcaagatccgggtgaccagcaaggccctggagctggtgaagcaggagggcctgcgcttcctggagcaggagctggagaccatcaccatcccagacctgcggggcaaggagggccacttctactacaacatcagcgaggtgaaggtgacagagctgcagctgaccagcagcgagctggacttccagccccagcaggagctgatgctgcagatcaccaatgccagcctgggcctgcgcttccggcggcagctgctgtactggttcctgaaggtgtatgacttcctgagcaccttcatcaccagcggcatgaggttcctgctgaaccagcagatctgccctgtgctgtaccacgccggcaccgtgctgctgaacagcctgctggacacagtgcctgtgcgcagctctgtggatgagctggtgggcatcgactacagcctgatgaaggaccctgtggccagcaccagcaacctggacatggacttccggggggccttcttccccctgacagagaggaactggagcctgcccaacagagctgtggagccccagctgcaggaggaggagaggatggtgtatgtggccttcagcgagttcttctttgattctgccatggagagctacttccgggccggggccctgcagctgctgctggtgggggacaaggtgccccatgacctggacatgctgctgcgggccacctacttcggcagcatcgtgctgctgagccctgctgtgattgacagccccctgaagctggagctgcgggtgctggccccaccccgctgcaccatcaagcccagcggcaccaccatctctgtgacagcctctgtgaccatcgccctggtgcccccagaccagcctgaggtgcagctgagctccatgaccatggatgcccggctgagcgccaagatggccctgcggggcaaggccctgcggacccagctggacctgcggcgcttccgcatctacagcaaccacagcgccctggagagcctggccctgatccccctgcaggcccccctgaagaccatgctgcagatcggcgtgatgcccatgctgaatgaaagaacctggaggggcgtgcagatccccctgcctgagggcatcaactttgtgcatgaggtggtgaccaaccacgccggcttcctgaccatcggggctgacctgcactttgccaagggcctgcgggaggtgattgagaagaacagaccagcagatgtgcgggccagcacagcccccacccccagcacagctgctgtgtag

SEQ ID NO: 164164 - DNA, 1482 bp, synthetic construct
  misc_feature 1..1482: note = Description of Artificial Sequence: Synthetic coding sequence
  source 1..1482: mol_type = other DNA
atggccctgtttggagccctcttcctggccctgctggccggggcccatgctgagttccctggctgcaagatccgggtgaccagcaaggccctggagctggtgaagcaggagggcctgcgcttcctggagcaggagctggagaccatcaccatcccagacctgcggggcaaggagggccacttctactacaacatcagcgaggtgaaggtgacagagctgcagctgaccagcagcgagctggacttccagccccagcaggagctgatgctgcagatcaccaatgccagcctgggcctgcgcttccggcggcagctgctgtactggttcttctatgatggcggctacatcaatgccagcgctgagggcgtgtccatcagaacaggcctggagctgagccgggaccctgctggccgcatgaaggtgtccaatgtgtcctgccaggcctctgtgtccaggatgcatgctgcctttggaggcaccttcaagaaggtgtatgacttcctgagcaccttcatcaccagcggcatgaggttcctgctgaaccagcagatctgccctgtgctgtaccacgccggcaccgtgctgctgaacagcctgctggacacagtgcctgtgcgcagctctgtggatgagctggtgggcatcgactacagcctgatgaaggaccctgtggccagcaccagcaacctggacatggacttccggggggccttcttccccctgacagagaggaactggagcctgcccaacagagctgtggagccccagctgcaggaggaggagaggatggtgtatgtggccttcagcgagttcttctttgattctgccatggagagctacttccgggccggggccctgcagctgctgctggtgggggacaaggtgccccatgacctggacatgctgctgcgggccacctacttcggcagcatcgtgctgctgagccctgctgtgattgacagccccctgaagctggagctgcgggtgctggccccaccccgctgcaccatcaagcccagcggcaccaccatctctgtgacagcctctgtgaccatcgccctggtgcccccagaccagcctgaggtgcagctgagctccatgaccatggatgcccggctgagcgccaagatggccctgcggggcaaggccctgcggacccagctggacctgcggcgcttccgcatctacagcaaccacagcgccctggagagcctggccctgatccccctgcaggcccccctgaagaccatgctgcagatcggcgtgatgcccatgctgaatgaaagaacctggaggggcgtgcagatccccctgcctgagggcatcaactttgtgcatgaggtggtgaccaaccacgccggcttcctgaccatcggggctgacctgcactttgccaagggcctgcgggaggtgattgagaagaacagaccagcagatgtgcgggccagcacagcccccacccccagcacagctgctgtgtag

SEQ ID NO: 164165 - DNA, 1482 bp, synthetic construct; identical to SEQ ID NO: 164164
  misc_feature 1..1482: note = Description of Artificial Sequence: Synthetic coding sequence
  source 1..1482: mol_type = other DNA

SEQ ID NO: 164166 - DNA, 1542 bp, synthetic construct
  misc_feature 1..1542: note = Description of Artificial Sequence: Synthetic coding sequence
  source 1..1542: mol_type = other DNA
atgggcctgagcggcagtgacaacagctgtgaccccaccccacctcctggccccctggccatggccctgtttggagccctcttcctggccctgctggccggggcccatgctgagttccctggctgcaagatccgggtgaccagcaaggccctggagctggtgaagcaggagggcctgcgcttcctggagcaggagctggagaccatcaccatcccagacctgcggggcaaggagggccacttctactacaacatcagcgaggtgaaggtgacagagctgcagctgaccagcagcgagctggacttccagccccagcaggagctgatgctgcagatcaccaatgccagcctgggcctgcgcttccggcggcagctgctgtactggttcttctatgatggcggctacatcaatgccagcgctgagggcgtgtccatcagaacaggcctggagctgagccgggaccctgctggccgcatgaaggtgtccaatgtgtcctgccaggcctctgtgtccaggatgcatgctgcctttggaggcaccttcaagaaggtgtatgacttcctgagcaccttcatcaccagcggcatgaggttcctgctgaaccagcagatctgccctgtgctgtaccacgccggcaccgtgctgctgaacagcctgctggacacagtgcctgtgcgcagctctgtggatgagctggtgggcatcgactacagcctgatgaaggaccctgtggccagcaccagcaacctggacatggacttccggggggccttcttccccctgacagagaggaactggagcctgcccaacagagctgtggagccccagctgcaggaggaggagaggatggtgtatgtggccttcagcgagttcttctttgattctgccatggagagctacttccgggccggggccctgcagctgctgctggtgggggacaaggtgccccatgacctggacatgctgctgcgggccacctacttcggcagcatcgtgctgctgagccctgctgtgattgacagccccctgaagctggagctgcgggtgctggccccaccccgctgcaccatcaagcccagcggcaccaccatctctgtgacagcctctgtgaccatcgccctggtgcccccagaccagcctgaggtgcagctgagctccatgaccatggatgcccggctgagcgccaagatggccctgcggggcaaggccctgcggacccagctggacctgcggcgcttccgcatctacagcaaccacagcgccctggagagcctggccctgatccccctgcaggcccccctgaagaccatgctgcagatcggcgtgatgcccatgctgaatgaaagaacctggaggggcgtgcagatccccctgcctgagggcatcaactttgtgcatgaggtggtgaccaaccacgccggcttcctgaccatcggggctgacctgcactttgccaagggcctgcgggaggtgattgagaagaacagaccagcagatgtgcgggccagcacagcccccacccccagcacagctgctgtgtag

SEQ ID NO: 164167 - DNA, 1218 bp, synthetic construct
  misc_feature 1..1218: note = Description of Artificial Sequence: Synthetic coding sequence
  source 1..1218: mol_type = other DNA
atgctgcagatcaccaatgccagcctgggcctgcgcttccggcggcagctgctgtactggttcttctatgatggcggctacatcaatgccagcgctgagggcgtgtccatcagaacaggcctggagctgagccgggaccctgctggccgcatgaaggtgtccaatgtgtcctgccaggcctctgtgtccaggatgcatgctgcctttggaggcaccttcaagaaggtgtatgacttcctgagcaccttcatcaccagcggcatgaggttcctgctgaaccagcagatctgccctgtgctgtaccacgccggcaccgtgctgctgaacagcctgctggacacagtgcctgtgcgcagctctgtggatgagctggtgggcatcgactacagcctgatgaaggaccctgtggccagcaccagcaacctggacatggacttccggggggccttcttccccctgacagagaggaactggagcctgcccaacagagctgtggagccccagctgcaggaggaggagaggatggtgtatgtggccttcagcgagttcttctttgattctgccatggagagctacttccgggccggggccctgcagctgctgctggtgggggacaaggtgccccatgacctggacatgctgctgcgggccacctacttcggcagcatcgtgctgctgagccctgctgtgattgacagccccctgaagctggagctgcgggtgctggccccaccccgctgcaccatcaagcccagcggcaccaccatctctgtgacagcctctgtgaccatcgccctggtgcccccagaccagcctgaggtgcagctgagctccatgaccatggatgcccggctgagcgccaagatggccctgcggggcaaggccctgcggacccagctggacctgcggcgcttccgcatctacagcaaccacagcgccctggagagcctggccctgatccccctgcaggcccccctgaagaccatgctgcagatcggcgtgatgcccatgctgaatgaaagaacctggaggggcgtgcagatccccctgcctgagggcatcaactttgtgcatgaggtggtgaccaaccacgccggcttcctgaccatcggggctgacctgcactttgccaagggcctgcgggaggtgattgagaagaacagaccagcagatgtgcgggccagcacagcccccacccccagcacagctgctgtgtag

SEQ ID NO: 164168 - DNA, 1197 bp, synthetic construct
  misc_feature 1..1197: note = Description of Artificial Sequence: Synthetic coding sequence
  source 1..1197: mol_type = other DNA
atggccctgtttggagccctcttcctggccctgctggccggggcccatgctgagttccctggctgcaagatccgggtgaccagcaaggccctggagctggtgaagcaggagggcctgcgcttcctggagcaggagctggagaccatcaccatcccagacctgcggggcaaggagggccacttctactacaacatcagcgagaaggtgtatgacttcctgagcaccttcatcaccagcggcatgaggttcctgctgaaccagcagatctgccctgtgctgtaccacgccggcaccgtgctgctgaacagcctgctggacacagtgcctgtgcgcagctctgtggatgagctggtgggcatcgactacagcctgatgaaggaccctgtggccagcaccagcaacctggacatggacttccggggggccttcttccccctgacagaaagaaactggagcctgcccaacagagctgtggagccccagctgcaggaggaggagaggatggtgtatgtggccttcagcgagttcttctttgacagcgccatggagagctacttccgggccggggccctgcagctgctgctggtgggggacaaggtgccccatgacctggacatgctgctgcgggccacctacttcggcagcatcgtgctgctgagccctgctgtgattgacagccccctgaagctggagctgcgggtgctggccccaccccgctgcaccatcaagcccagcggcaccaccatctctgtgacagcctctgtgaccatcgccctggtgcccccagaccagcctgaggtgcagctgagctccatgaccatggatgcccggctgagcgccaagatggccctgcggggcaaggccctgcggacccagctggacctgcggcgcttccgcatctacagcaaccacagcgccctggagagcctggccctgatccccctgcaggcccccctgaagaccatgctgcagattggagtgatgcccatgctgaatgaaagaacctggaggggcgtgcagatccccctgcctgagggcatcaactttgtgcatgaggtggtgaccaaccacgccggcttcctgaccatcggggctgacctgcactttgccaagggcctgcgggaggtgattgagaagaacagaccagcagatgtgcgggccagcacagcccccacccccagcacagctgctgtgtag

SEQ ID NO: 164169 - DNA, 2343 bp, synthetic construct
  misc_feature 1..2343: note = Description of Artificial Sequence: Synthetic coding sequence
  source 1..2343: mol_type = other DNA
atggccccctacagcctgctggtgacccggctgcagaaggccctgggcgtgcggcagtaccacgtggcctctgtgctgtgccagagggccaaggtggccatgagccactttgagcccaatgagtacatccactatgacctgctggagaagaacatcaacatcgtgaggaagaggctgaaccggcccctgaccctgtctgagaagatcgtgtatggccacctggatgatcctgccagccaggagattgaaagaggcaagagctacctgcggctgcggccagacagagtggccatgcaggatgccacagcccagatggccatgctgcagttcatcagcagcggcctgagcaaggtggccgtgcccagcaccatccactgtgaccacctgattgaggcccaggtgggcggggagaaggacctgcggcgggccaaggacatcaaccaggaggtgtacaacttcctggccacagctggggccaagtatggagtgggcttctggaagccaggcagcggcatcatccaccagatcatcctggagaactatgcctacccaggagtgctgctgattggaacagacagccacaccccaaatggaggcggcctgggcggcatctgcatcggcgtgggcggcgcagatgctgtggatgtgatggccggcatcccctgggagctgaagtgccccaaggtgattggagtgaagctgaccggcagcctgagcggctggagcagccccaaggatgtgatcctgaaggtggccggcatcctgactgtgaagggcggcactggagccatcgtggagtaccacggccctggggtggacagcatcagctgcaccggcatggccaccatctgcaacatgggcgctgagatcggggccaccacctctgtgttcccctacaaccacaggatgaagaagtacctgagcaagacaggaagagaagatattgccaacctggctgatgagttcaaggaccacctggtgcctgaccccggctgccactatgaccagctgattgagatcaacctgtctgagctgaagccccacatcaatggccccttcaccccagacctggcccaccctgtggccgaggtgggcaaggtggccgagaaggagggctggcccctggacatccgggtgggcctcatcggcagctgcaccaacagcagctatgaggacatgggccgctctgctgctgtggccaagcaggccctggcccacggcctgaagtgcaagagccagttcaccatcaccccaggcagcgagcagatccgggccaccatcgagagagatggctacgcccagatcctgcgggacctgggcggcatcgtgctggccaatgcctgtggcccctgcatcggccagtgggacaggaaggacatcaagaagggggagaagaacaccatcgtgaccagctacaacagaaacttcaccggcagaaatgatgccaaccctgagacccacgcctttgtgaccagccctgagatcgtgacagccctggccatcgccggcaccctgaagttcaaccctgagacagactacctgactggaacagatggcaagaagttccggctggaggccccagatgctgatgagctgcccaagggggagtttgatcctggccaggacacctaccagcacccccccaaggacagcagcggccagcacgtggatgtgagccccaccagccagaggctgcagctgctggagccctttgacaagtgggatggcaaggacctggaggacctgcagatcctgatcaaggtgaagggcaagtgcaccacagaccacatctctgctgctggcccctggctgaagttccggggccacctggacaacatcagcaacaacctgctgattggagccatcaacattgaaaatggcaaggccaacagcgtgagaaatgctgtgacccaggagtttggacctgtgcctgacacagcccgctactacaagaagcacggcatccgctgggtggtgattggagatgaaaattatggagagggcagcagccgggagcacgccgccctggagcccaggcacctgggcggccgggccatcatcaccaagagctttgcccgcatccacgagaccaacctgaagaagcagggcctgctgcccctgacctttgctgaccctgctgactacaacaagatccaccctgtggacaagctgaccatccagggcctgaaggacttcacccctgggaagcccctgaagtgcatcatcaagcaccccaacggcacccaggagaccatcctgctgaaccacaccttcaatgagacccagatcgagtggttccgggccggcagcgccctgaacaggatgaaggagctgcagcagtag

SEQ ID NO: 164170 - DNA, 741 bp, synthetic construct
  misc_feature 1..741: note = Description of Artificial Sequence: Synthetic coding sequence
  source 1..741: mol_type = other DNA
atggccgcccctggccctgccctgtgcctgtttgatgtggatggcaccctgacagccccccggcagaagatcaccaaggagatggatgacttcctgcagaagctgcggcagaagatcaagattggagtggtgggcggcagtgactttgagaaggtgcaggagcagctgggcaatgatgtggtggagaagtatgactatgtgtttcctgaaaatggcctggtggcctacaaggatggcaagctgctgtgccggcagaacatccagagccacctgggggaggccctgatccaggacctgatcaactactgcctgagctacatcgccaagatcaagctgcccaagaagaggggcaccttcatcgagttcagaaatggcatgctgaatgtgagccccatcggccgcagctgcagccaggaggagcgcatcgagttctatgagctggacaagaaggagaacatccggcagaagtttgtggccgacctgaggaaggagtttgctgggaagggcctgaccttcagcatcggcggccagatcagctttgatgtgtttcctgatggctgggacaagcgctactgcctgcggcacgtggagaatgatggctacaagaccatctacttctttggagacaagaccatgcctggaggaaatgaccacgagatcttcacagaccccaggaccatgggctacagcgtgacagcccctgaggacacccggcgcatctgtgagctgctcttctcctag

SEQ ID NO: 164171 - DNA, 366 bp, synthetic construct
  misc_feature 1..366: note = Description of Artificial Sequence: Synthetic coding sequence
  source 1..366: mol_type = other DNA
atgctgaatgtgagccccatcggccgcagctgcagccaggaggagagaattgagttctatgagctggacaagaaggagaacatccggcagaagtttgtggccgacctgaggaaggagtttgctgggaagggcctgaccttcagcattggaggccagatcagctttgatgtgtttcctgatggctgggacaagcgctactgcctgcggcacgtggagaatgatggctacaagaccatctacttcttcggggacaagaccatgcctggaggaaatgaccacgagatcttcacagaccccaggaccatgggctacagcgtgacagcccctgaggacacccggcgcatctgtgagctgctcttctcctag

SEQ ID NO: 164172 - DNA, 492 bp, synthetic construct
  misc_feature 1..492: note = Description of Artificial Sequence: Synthetic coding sequence
  source 1..492: mol_type = other DNA
atgatgaacatccagagccacctgggggaggccctgatccaggacctgatcaactactgcctgagctacatcgccaagatcaagctgcccaagaagaggggcaccttcatcgagttcagaaatggcatgctgaatgtgagccccatcggccgcagctgcagccaggaggagagaattgagttctatgagctggacaagaaggagaacatccggcagaagtttgtggccgacctgaggaaggagtttgctgggaagggcctgaccttcagcattggaggccagatcagctttgatgtgtttcctgatggctgggacaagcgctactgcctgcggcacgtggagaatgatggctacaagaccatctacttcttcggggacaagaccatgcctggaggaaatgaccacgagatcttcacagaccccaggaccatgggctacagcgtgacagcccctgaggacacccggcgcatctgtgagctgctcttctcctag

SEQ ID NO: 164173 - DNA, 579 bp, synthetic construct
  misc_feature 1..579: note = Description of Artificial Sequence: Synthetic coding sequence
  source 1..579: mol_type = other DNA
atggcccccctgggcggggccccccggctggtgctgctcttcagcggcaagaggaagagcggcaaggactttgtgacagaggccctgcagagccggctgggcgcagatgtgtgtgctgtgctgcggctgagcggccccctgaaggagcagtatgcccaggagcacggcctgaacttccagaggctgctggacaccagcacctacaaggaggccttcaggaaggacatgatccgctggggcgaggagaagaggcaggccgaccccggcttcttctgcaggaagatcgtggagggcatcagccagcccatctggctggtgtctgacacccggcgggtgtctgacatccagtggttccgggaggcctacggggctgtgacccagacagtgcgggtggtggccctggagcagagccggcagcagaggggctgggtgttcaccccaggagtggatgatgctgagagtgaatgtggcctggacaactttggagactttgactgggtgattgaaaatcatggagtggagcagaggctggaggagcagctggagaacctgattgagttcatccgcagccggctgtag

SEQ ID NO: 164174 - DNA, 615 bp, synthetic construct
  misc_feature 1..615: note = Description of Artificial Sequence: Synthetic coding sequence
  source 1..615: mol_type = other DNA
atggagcccaaggccagctgcccagctgctgcccccctgatggagaggaagttccacgtgctggtgggcgtgactggatctgtggccgccctgaagctgcccctgctggtgtccaagctgctggacatccctggcctggaggtggccgtggtgaccacagagcgggccaagcacttctacagcccccaggacatccctgtgaccctgtacagtgatgctgatgagtgggagatctggaagagcagaagtgaccctgtgctgcacatcgacctgcggcgctgggccgacctgctgctggtggcccccctggatgccaacaccctgggcaaggtggccagcggcatctgtgacaacctgctgacctgtgtgatgagggcctgggacaggagcaagcccctgctcttctgcccagccatgaacacagccatgtgggagcaccccatcacagcccagcaggtggaccagctgaaggccttcggctacgtggagatcccctgtgtggccaagaagctggtgtgtggagatgagggcctgggcgccatggccgaggtgggcaccatcgtggacaaggtgaaggaggtgctcttccagcacagcggcttccagcagagctag

SEQ ID NO: 164175 - DNA, 171 bp, synthetic construct
  misc_feature 1..171: note = Description of Artificial Sequence: Synthetic coding sequence
  source 1..171: mol_type = other DNA
atggccgagatggaccctgtggccgagttcccccagcccccaggggccgcccgctgggccgaggccctgctgcgctgcttcacctggctgcggctgtgccagatctccatgttcctgagcctgaagtgcctgaacaccaggagcagccacctgggcgcccactgcaggtag

SEQ ID NO: 164176 - DNA, 642 bp, synthetic construct
  misc_feature 1..642: note = Description of Artificial Sequence: Synthetic coding sequence
  source 1..642: mol_type = other DNA
atggccgagatggaccctgtggccgagttcccccagcccccaggggccgcccgctgggccgaggtgatggccaggtttgctgcccggctgggcgcccagggcagaagagtggtgctggtgaccagcggcggcaccaaggtgcccctggaggcccggcctgtgcgcttcctggacaacttcagcagcggccggcggggggccaccagcgctgaggccttcctggccgccggctacggcgtgctcttcctgtaccgggcccggagcgccttcccctatgcccaccgcttccccccccagacctggctgagcgccctgcggcccagcggccctgccctgagcggcctgctgagcctggaggccgaggagaatgccctgcccggctttgctgaggccctgcggagctaccaggaggccgctgctgctggcaccttcctggccgtggagttcaccaccctggccgactacctgcacctgctgcaggccgccgcccaggccctgaaccccctgggccccagcgccatgttctacctggccgctgctgtgtctgacttctacgtgcctgtgtctgagatgcctgagcacaagatccagagcagcggcggccccctgcaggtgatgggcgccagcctgcctgagatctag

SEQ ID NO: 164177 - DNA, 936 bp, synthetic construct
  misc_feature 1..936: note = Description of Artificial Sequence: Synthetic coding sequence
  source 1..936: mol_type = other DNA
atggccgagatggaccctgtggccgagttcccccagcccccaggggccgcccgctgggccgaggtgatggccaggtttgctgcccggctgggcgcccagggcagaagagtggtgctggtgaccagcggcggcaccaaggtgcccctggaggcccggcctgtgcgcttcctggacaacttcagcagcggccggcggggggccaccagcgctgaggccttcctggccgccggctacggcgtgctcttcctgtaccgggcccggagcgccttcccctatgcccaccgcttccccccccagacctggctgagcgccctgcggcccagcggccctgccctgagcggcctgctgagcctggaggccgaggagaatgccctgcccggctttgctgaggccctgcggagctaccaggaggccgctgctgctggcaccttcctggccgtggagttcaccaccctggccgactacctgcacctgctgcaggccgccgcccaggccctgaaccccctgggccccagcgccatgttctacctggccgctgctgtgtctgacttctacgtgcctgtgtctgagatgcctgagcacaagatccagagcagcggcggccccctgcagatcaccatgaagatggtgcccaagctgctgagccccctggtgaaggactgggcccccaaggccttcatcatctccttcaagctggagacagatcctgccatcgtcatcaacagagccaggaaggccctggagatctaccagcaccaggtggtggtggccaacatcctggagagccggcagagctttgtgttcatcgtgaccaaggacagcgagaccaagctgctgctgtctgaggaggagattgaaaaaggagtggagattgaggagaagatcgtggacaacctgcagagccgccacacagccttcatcggggacaggaactag

SEQ ID NO: 164178 - DNA, 417 bp, synthetic construct
  misc_feature 1..417: note = Description of Artificial Sequence: Synthetic coding sequence
  source 1..417: mol_type = other DNA
atgttctacctggccgctgctgtgtctgacttctacgtgcctgtgtctgagatgcctgagcacaagatccagagcagcggcggccccctgcagatcaccatgaagatggtgcccaagctgctgagccccctggtgaaggactgggcccccaaggccttcatcatctccttcaagctggagacagatcctgccatcgtcatcaacagagccaggaaggccctggagatctaccagcaccaggtggtggtggccaacatcctggagagccggcagagctttgtgttcatcgtgaccaaggacagcgagaccaagctgctgctgtctgaggaggagattgagaagggcgtggagattgaggagaagatcgtggacaacctgcagagccgccacacagccttcatcggggacagaaattag

SEQ ID NO: 164179 - DNA, 417 bp, synthetic construct; identical to SEQ ID NO: 164178
  misc_feature 1..417: note = Description of Artificial Sequence: Synthetic coding sequence
  source 1..417: mol_type = other DNA

SEQ ID NO: 164180 - DNA, 393 bp, synthetic construct
  misc_feature 1..393: note = Description of Artificial Sequence: Synthetic coding sequence
  source 1..393: mol_type = other DNA
atggccgagtatggcaccctgctgcaggacctgaccaacaacatcaccctggaggacctggagcagctgaagagcgcctgcaaggaggacatccccagcgagaagtctgaggagatcaccactggaagtgcctggttctccttcctggagagccacaacaagctggacaaggacaacctgagctacatcgagcacatctttgagatcagcagaagaccagacctgctgaccatggtggtggactaccgcaccagggtgctgaagatcagcgaggaggatgagctggacaccaagctgacccgcatccccagcgccaagaagtacaaggacatcatccggcagcccagcgaggaggagatcatcaagctggcccccccacccaagaaggcctag

SEQ ID NO: 164181 - DNA, 456 bp, synthetic construct
  misc_feature 1..456: note = Description of Artificial Sequence: Synthetic coding sequence
  source 1..456: mol_type = other DNA
atggaggatgagggcaacaagctgtgccaggccccaccctggccaggccagaccagccctgtgatggccgagtatggcaccctgctgcaggacctgaccaacaacatcaccctggaggacctggagcagctgaagagcgcctgcaaggaggacatccccagcgagaagtctgaggagatcaccaccggcagcgcctggttctccttcctggagagccacaacaagctggacaaggacaacctgagctacatcgagcacatctttgagatcagccggcggccagacctgctgaccatggtggtggactaccgcaccagggtgctgaagatcagtgaagaagatgagctggacaccaagctgacccgcatccccagcgccaagaagtacaaggacatcatccggcagcccagcgaggaggagatcatcaagctggcccccccacccaagaaggcctag

SEQ ID NO: 164182 - DNA, 327 bp, synthetic construct
  misc_feature 1..327: note = Description of Artificial Sequence: Synthetic coding sequence
  source 1..327: mol_type = other DNA
atggccgagtatggcaccctgctgcaggacctgaccaacaacatcaccctggaggacctggagcagctgaagagcgcctgcaaggaggacatccccagcgagaagaacaacctgagctacatcgagcacatctttgagatcagcagaagaccagacctgctgaccatggtggtggactaccgcaccagggtgctgaagatcagcgaggaggatgagctggacaccaagctgacccgcatccccagcgccaagaagtacaaggacatcatccggcagcccagcgaggaggagatcatcaagctggcccccccacccaagaaggcctag

SEQ ID NO: 164183 - DNA, 1554 bp, synthetic construct
  misc_feature 1..1554: note = Description of Artificial Sequence: Synthetic coding sequence
  source 1..1554: mol_type = other DNA
atggagctggaggagctgggcatccgggaggagtgtggggtgtttggctgcatcgccagcggggagtggcccacccagctggatgtgccccacgtgatcaccctgggcctggtgggcctgcagcaccggggccaggagagcgctggcatcgtgaccagtgatggcagctctgtgcccaccttcaagagccacaagggcatgggcctggtgaaccacgtgttcacagaggacaacctgaagaagctgtatgtgagcaacctgggcatcggccacaccaggtatgccaccactggaaaatgtgagctggagaactgccagccctttgtggtggagaccctgcacggcaagattgctgtggcccacaacggggagctggtgaatgctgcccggctgaggaagaagctgctgcggcacggcatcggcctgagcaccagcagtgacagcgagatgatcacccagctgctggcctacaccccaccccaggagcaggatgacaccccagactgggtggcccgcatcaagaacctgatgaaggaggcccccacagcctacagcctgctgatcatgcacagagatgtgatctatgctgtgcgggacccctacggcaaccggcccctgtgcatcggccgcctcatccctgtgtctgacatcaatgacaaggagaagaagaccagcgagacagagggctgggtggtgagcagcgagagctgcagcttcctgagcatcggggcccgctactaccgggaggtgctgcccggggagatcgtggagatcagccgccacaacgtgcagaccctggacatcatcagccgctctgagggcaaccctgtggccttctgcatctttgaatatgtgtactttgcccggccagacagcatgtttgaggaccagatggtgtacacagtgcgctaccgctgtggccagcagctggccatcgaggcccctgtggatgctgacctggtgtccacagtgcctgagagcgccaccccagctgccctggcctatgctggaaaatgtggcctgccctacgtggaggtgctgtgcaagaaccgctacgtgggccgcaccttcatccagcccaacatgaggctgcggcagctgggcgtggccaagaagtttggagtgctgagtgacaacttcaagggcaagagaattgtgctggtggatgacagcatcgtgcggggcaacaccatcagccccatcatcaagctgctgaaggagagcggggccaaggaggtgcacatccgggtggccagcccccccatcaagtacccctgcttcatgggcatcaacatccccaccaaggaggagctgattgccaacaagccagagtttgaccacctggccgagtacctgggcgccaacagcgtggtgtacctgtctgtggagggcctggtgtcctctgtgcaggagggcatcaagttcaagaagcagaaggagaagaagcatgacatcatgatccaggagaatggaaatggcctggagtgctttgagaagagcggccactgcacagcctgcctgaccgggaagtaccctgtggagctggagtggtag

SEQ ID NO: 164184 - DNA, 657 bp, synthetic construct
  misc_feature 1..657: note = Description of Artificial Sequence: Synthetic coding sequence
  source 1..657: mol_type = other DNA
atggagctgctgatcatgatcaatgcctgcaagatcgccagcgccagccgggtgacagctgtgatcccctgcttcccctatgcccggcaggacaagaaggacaagggcttctttgacatccctgtggacaacctgtatgcagagcctgctgtgctgaagtggatccgggagaacatcagcgagtggaggaactgcaccatcgtgtccccagatgctgggggcgccaagagggtgaccagcattgctgaccggctgaatgtggactttgccctgatccacaaggagaggaagaaggccaatgaggtggacaggatggtgctggtgggagatgtgaaggacagagtggccatcctggtggatgacatggctgacacctgtggcaccatctgccacgccgctgacaagctgctgtctgctggggccaccagggtgtatgccatcctgacccacggcatcttcagcggccctgccatcagccgcatcaacaatgcctgctttgaggccgtggtggtgaccaacaccatcccccaggaggacaagatgaagcactgcagcaagatccaggtgattgacatctccatgatcctggccgaggccatccggaggacccacaatggagagagcgtgtcctacctgttcagccacgtgcccctgtag

SEQ ID NO: 164185 - DNA, 507 bp, synthetic construct
  misc_feature 1..507: note = Description of Artificial Sequence: Synthetic coding sequence
  source 1..507: mol_type = other DNA
atgcccaacatcaagatcttcagcggcagcagccaccaggacctgagccagaagattgctgaccggctgggcctggagctgggcaaggtggtgaccaagaagttcagcaaccaggagacctgtgtggagatcggggagagcgtgagaggagaagatgtgtacatcgtgcagagcggctgtggggagatcaatgacaacctgatggagctgctgatcatgatcaatgcctgcaagatcgccagcgccagccgggtgacagctgtgatcccctgcttcccctatgcccggcaggacaagaaggacaagagccgggcccccatcagcgccaagctggtggccaacatgctgtctgtggccggggctgaccacatcatcaccatggacctgcacgccagccagatccaggtgtctgtggaggccaagtactggtgcctgaagggcggcaggaagggcctgatgatgctgaagacagctgagaagcccaagatcatgcccaagtacatctag

SEQ ID NO: 164186 - DNA, 756 bp, synthetic construct
  misc_feature 1..756: note = Description of Artificial Sequence: Synthetic coding sequence
  source 1..756: mol_type = other DNA
atggagctgctgatcatgatcaatgcctgcaagatcgccagcgccagccgggtgacagctgtgatcccctgcttcccctatgcccggcaggacaagaaggacaagagccgggcccccatcagcgccaagctggtggccaacatgctgtctgtggccggggctgaccacatcatcaccatggacctgcacgccagccagatccagggcttctttgacatccctgtggacaacctgtatgcagagcctgctgtgctgaagtggatccgggagaacatcagcgagtggaggaactgcaccatcgtgtccccagatgctggaggagccaagagggtgaccagcattgctgaccggctgaatgtggactttgccctgatccacaaggagaggaagaaggccaatgaggtggacaggatggtgctggtgggagatgtgaaggacagagtggccatcctggtggatgacatggctgacacctgtggcaccatctgccacgccgctgacaagctgctgtctgctggggccaccagggtgtatgccatcctgacccacggcatcttcagcggccctgccatcagccgcatcaacaatgcctgctttgaagctgtggtggtgaccaacaccatcccccaggaggacaagatgaagcactgcagcaagatccaggtgattgacatctccatgatcctggccgaggccatccggaggacccacaacggggagagcgtgtcctacctgttcagccacgtgcccctgtag

SEQ ID NO: 164187 - DNA, 957 bp, synthetic construct
  misc_feature 1..957: note = Description of Artificial Sequence: Synthetic coding sequence
  source 1..957: mol_type = other DNA
atgcccaacatcaagatcttcagcggcagcagccaccaggacctgagccagaagattgctgaccggctgggcctggagctgggcaaggtggtgaccaagaagttcagcaaccaggagacctgtgtggagatcggggagagcgtgagaggagaagatgtgtacatcgtgcagagcggctgtggggagatcaatgacaacctgatggagctgctgatcatgatcaatgcctgcaagatcgccagcgccagccgggtgacagctgtgatcccctgcttcccctatgcccggcaggacaagaaggacaagagccgggcccccatcagcgccaagctggtggccaacatgctgtctgtggccggggctgaccacatcatcaccatggacctgcacgccagccagatccagggcttctttgacatccctgtggacaacctgtatgcagagcctgctgtgctgaagtggatccgggagaacatcagcgagtggaggaactgcaccatcgtgtccccagatgctgggggcgccaagagggtgaccagcattgctgaccggctgaatgtggactttgccctgatccacaaggagaggaagaaggccaatgaggtggacaggatggtgctggtgggagatgtgaaggacagagtggccatcctggtggatgacatggctgacacctgtggcaccatctgccacgccgctgacaagctgctgtctgctggggccaccagggtgtatgccatcctgacccacggcatcttcagcggccctgccatcagccgcatcaacaatgcctgctttgaggccgtggtggtgaccaacaccatcccccaggaggacaagatgaagcactgcagcaagatccaggtgattgacatctccatgatcctggccgaggccatccggaggacccacaatggagagagcgtgtcctacctgttcagccacgtgcccctgtag

SEQ ID NO: 164188 - DNA, 957 bp, synthetic construct; identical to SEQ ID NO: 164187
  misc_feature 1..957: note = Description of Artificial Sequence: Synthetic coding sequence
  source 1..957: mol_type = other DNA

SEQ ID NO: 164189 - DNA, 957 bp, synthetic construct
  misc_feature 1..957: note = Description of Artificial Sequence: Synthetic coding sequence
  source 1..957: mol_type = other DNA
acccccaacatcaagatcttcagcggcagcagccaccaggacctgagccagaagattgctgaccggctgggcctggagctgggcaaggtggtgaccaagaagttcagcaaccaggagacctgtgtggagattgatgaatctgtgagaggagaagatgtgtacatcgtgcagagcggctgtggggagatcaatgacagcctgatggagctgctgatcatgatcaatgcctgcaagatcgccagcgccagccgggtgacagctgtgatcccctgcttcccctatgcccggcaggacaagaaggacaagagccgcagccccatcagcgccaagctggtggccaacatgctgagcattgctggagctgaccacatcatcaccatggacctgcacgccagccagatccagggcttctttgacatccctgtggacaacctgtatgcagagcccaccgtgctgaagtggatccgggagaacatccctgagtggaagaactgcatcatcgtgtccccagatgctgggggcgccaagagggtgaccagcattgctgaccagctgaatgtggactttgccctgatccacaaggagaggaagaaggccaatgaggtggactgcatcgtgctggtgggagatgtgaatgacagagtggccatcctggtggatgacatggctgacacctgtgtgaccatctgcctggccgctgacaagctgctgtctgctggggccaccagggtgtatgccatcctgacccacggcatcttcagcggccctgccatcagccgcatcaacacagcctgctttgaggccgtggtggtgaccaacaccatcccccaggatgagaagatgaagcactgcagcaagatccgggtcatcgacatctccatgatcctggccgaggccatccggaggacccacaatggagagagcgtgtcctacctgttcagccacgtgcccctgtag

SEQ ID NO: 164190 - DNA, 957 bp, synthetic construct
  misc_feature 1..957: note = Description of Artificial Sequence: Synthetic coding sequence
  source 1..957: mol_type = other DNA
atgcccaacatcgtgctcttcagcggcagcagccaccaggacctgagccagagggtggccgaccggctgggcctggagctgggcaaggtggtgaccaagaagttcagcaaccaggagacctctgtggagatcggggagagcgtgagaggagaagatgtgtacatcatccagagcggctgtggggagatcaatgacaacctgatggagctgctgatcatgatcaatgcctgcaagatcgccagcagcagccgggtgacagctgtgatcccctgcttcccctatgcccggcaggacaagaaggacaagagccgggcccccatcagcgccaagctggtggccaacatgctgtctgtggccggggctgaccacatcatcaccatggacctgcacgccagccagatccagggcttctttgacatccctgtggacaacctgtatgcagagcctgctgtgctgcagtggatcagagaaaatattgctgagtggaagaactgcatcatcgtgtccccagatgctgggggcgccaagagggtgaccagcattgctgaccggctgaatgtggagtttgccctgatccacaaggagaggaagaaggccaatgaggtggacaggatggtgctggtgggagatgtgaaggacagagtggccatcctggtggatgacatggctgacacctgtggcaccatctgccacgccgctgacaagctgctgtctgctggggccaccaaggtgtatgccatcctgacccacggcatcttcagcggccctgccatcagccgcatcaacaatgctgcctttgaggccgtggtggtgaccaacaccatcccccaggaggacaagatgaagcactgcaccaagatccaggtgattgacatctccatgatcctggccgaggccatccggaggacccacaatggagagagcgtgtcctacctgttcagccacgtgcccctgtag

SEQ ID NO: 164191 - DNA, 966 bp, synthetic construct
  misc_feature 1..966: note = Description of Artificial Sequence: Synthetic coding sequence
  source 1..966: mol_type = other DNA
atgcccaacatcgtgctcttcagcggcagcagccaccaggacctgagccagagggtggccgaccggctgggcctggagctgggcaaggtggtgaccaagaagttcagcaaccaggagacctctgtggagatcggggagagcgtgagaggagaagatgtgtacatcatccagagcggctgtggggagatcaatgacaacctgatggagctgctgatcatgatcaatgcctgcaagatcgccagcagcagccgggtgacagctgtgatcccctgcttcccctatgcccggcaggacaagaaggacaaggtgggggagagccgggcccccatcagcgccaagctggtggccaacatgctgtctgtggccggggctgaccacatcatcaccatggacctgcacgccagccagatccagggcttctttgacatccctgtggacaacctgtatgcagagcctgctgtgctgcagtggatccgggagaacattgctgagtggaagaactgcatcatcgtgtccccagatgctggaggagccaagagggtgaccagcattgctgaccggctgaatgtggagtttgccctgatccacaaggagaggaagaaggccaatgaggtggacaggatggtgctggtgggagatgtgaaggacagagtggccatcctggtggatgacatggctgacacctgtggcaccatctgccacgccgctgacaagctgctgtctgctggggccaccaaggtgtatgccatcctgacccacggcatcttcagcggccctgccatcagccgcatcaacaatgctgcctttgaagctgtggtggtgaccaacaccatcccccaggaggacaagatgaagcactgcaccaagatccaggtgattgacatctccatgatcctggccgaggccatccggaggacccacaacggggagagcgtgtcctacctgttcagccacgtgcccctgtag

SEQ ID NO: 164192 - DNA, 849 bp, synthetic construct
  misc_feature 1..849: note = Description of Artificial Sequence: Synthetic coding sequence
  source 1..849: mol_type = other DNA
atggagctgctgatcatggcctatgccctgaagacagcctgtgccaggaacatcattggagtcatcccctacttcccctacagcaagcagagcaagatgaggaagaggggcagcatcgtgtgcaagctgctggcctccatgctggccaaggccggcctgacccacatcatcaccatggacctgcaccagaaggagatccagggcttcttctccttccctgtggacaacctgcgggccagccccttcctgctgcagtacatccaggaggagatccccaactacagaaatgctgtgattgtggccaagagcccagatgctgccaagagggcccagagctatgcagagcggctgcggctgggcctggccgtcatccatggagaggcccagtgcacagagctggacatggatgatggccgccacagcccccccatggtgaagaatgccaccgtgcaccctggcctggagctgcccctgatgatggccaaggagaagccacccatcaccgtggtgggagatgtgggcggcagaattgccatcatcgtggatgacatcattgatgatgtggagagctttgtggccgctgctgagatcctgaaggagcggggggcctacaagatctacgtgatggccacccacggcatcctgtctgctgaggccccccggctgattgaggagagctctgtggatgaggtggtggtgaccaacacagtgccccatgaggtgcagaagctgcagtgccccaagatcaagacagtggacatcagcctcatcctgtctgaggccatccgccgcatccacaatggagagagcatggcctacctgttcaggaacatcaccgtggatgactag

SEQ ID NO: 164193 - DNA, 1158 bp, synthetic construct
  misc_feature 1..1158: note = Description of Artificial Sequence: Synthetic coding sequence
  source 1..1158: mol_type = other DNA
atgcccaagaagctgctgctgctgcccccacccagcgccagcagcgccttccgggtgccccgggcccggcctgtgcccccaccagccatgaatgctgccaggacaggctacagagtcttcagcgccaacagcacagctgcctgcacagagctggccaagaggatcacagagcggctgggcgctgagctgggcaagtctgtggtgtaccaggagaccaatggagagaccagggtggagatcaaggagagcgtgcggggccaggacatcttcatcatccagaccatccccagagatgtgaacacagctgtgatggagctgctgatcatggcctatgccctgaagacagcctgtgccaggaacatcatcggggtcatcccctacttcccctacagcaagcagagcaagatgaggaagaggggcagcatcgtgtgcaagctgctggcctccatgctggccaaggccggcctgacccacatcatcaccatggacctgcaccagaaggagatccagggcttcttctccttccctgtggacaacctgcgggccagccccttcctgctgcagtacatccaggaggagatccccaactacagaaatgctgtgattgtggccaagagcccagatgctgccaagagggcccagagctatgcagagcggctgcggctgggcctggccgtcatccacggggaggcccagtgcacagagctggacatggatgatggccgccacagcccccccatggtgaagaatgccaccgtgcaccctggcctggagctgcccctgatgatggccaaggagaagccacccatcaccgtggtgggagatgtgggcggccgcatcgccatcatcgtggatgacatcattgatgatgtggagagctttgtggccgctgctgagatcctgaaggagcggggggcctacaagatctacgtgatggccacccacggcatcctgtctgctgaggcccccaggctcatcgaggagagctctgtggatgaggtggtggtgaccaacacagtgccccatgaggtgcagaagctgcagtgccccaagatcaagacagtggacatcagcctcatcctgtctgaggccatccgccgcatccacaacggggagagcatggcctacctgttcaggaacatcaccgtggatgactag

SEQ ID NO: 164194 - DNA, 1110 bp, synthetic construct
  misc_feature 1..1110: note = Description of Artificial Sequence: Synthetic coding sequence
  source 1..1110: mol_type = other DNA
atgttctgtgtgaccccacctgagctggagaccaagatgaacatcaccaagggcggcctggtgctcttcagcgccaacagcaacagcagctgcatggagctgagcaagaagattgctgagcggctgggcgtggagatgggcaaggtgcaggtgtaccaggagcccaaccgggagaccagggtgcagatccaggagagcgtgcggggcaaggatgtgttcatcatccagacagtgtccaaggatgtgaacaccaccatcatggagctgctgatcatggtgtatgcctgcaagaccagctgtgccaagagcatcattggagtcatcccctacttcccctacagcaagcagtgcaagatgaggaagaggggcagcatcgtgtccaagctgctggcctccatgatgtgcaaggccggcctgacccacctgatcaccatggacctgcaccagaaggagatccagggcttcttcaacatccctgtggacaacctgcgggccagccccttcctgctgcagtacatccaggaggagatcccagactacagaaatgctgtgattgtggccaagagccctgccagcgccaagagggcccagagctttgctgagcggctgcggctgggcattgctgtgattcatggagaggcccaggatgctgagagtgacctggtggatggccgccacagcccccccatggtgcgctctgtggccgccatccaccccagcctggagatccccatgctgatccccaaggagaagccacccatcaccgtggtgggagatgtgggcggccgcatcgccatcatcgtggatgacatcattgatgatgtggacagcttcctggccgctgctgagaccctgaaggagcggggggcctacaagatctttgtgatggccacccacggcctgctgagcagtgatgccccccggcgcatcgaggagagcgccattgatgaggtggtggtgaccaacaccatcccccatgaggtgcagaagctgcagtgccccaagatcaagacagtggacatctccatgatcctgtctgaggccatccgccgcatccacaacggggagagcatgagctacctgttcagaaatattggcctggatgactag

SEQ ID NO: 164195 - DNA, 1110 bp, synthetic construct; identical to SEQ ID NO: 164194
  misc_feature 1..1110: note = Description of Artificial Sequence: Synthetic coding sequence
  source 1..1110: mol_type = other DNA

SEQ ID NO: 164196 - DNA, 807 bp, synthetic construct
  misc_feature 1..807: note = Description of Artificial Sequence: Synthetic coding sequence
  source 1..807: mol_type = other DNA
atgttctgtgtgaccccacctgagctggagaccaagatgaacatcaccaagggcggcctggtgctcttcagcgccaacagcaacagcagctgcatggagctgagcaagaagattgctgagcggctgggcgtggagatgggcaaggtgcaggtgtaccaggagcccaaccgggagaccagggtgcagatccaggagagcgtgcggggcaaggatgtgttcatcatccagacagtgtccaaggatgtgaacaccaccatcatggagctgctgatcatggtgtatgcctgcaagaccagctgtgccaagagcatcattggagtcatcccctacttcccctacagcaagcagtgcaagatgaggaagaggggcagcatcgtgtccaagctgctggcctccatgatgtgcaaggccggcctgacccacctgatcaccatggacctgcaccagaaggagatccagggcttcttcaacatccctgtggacaacctgcgggccagccccttcctgctgcagtacatccaggaggagatcccagactacagaaatgctgtgattgtggccaagagccctgccagcgccaagagggcccagagctttgctgagcggctgcggctgggcattgctgtgattcatggagaggcccaggatgctgagagtgacctggtggatggccgccacagcccccccatggtgcgctctgtggccgccatccaccccagcctggagatccccatgctgatccccaaggagaagccacccatcaccgtggtgggagatgtgggcggccgcatcgccatcatcgtgtag

SEQ ID NO: 164197 - DNA, 585 bp, synthetic construct
  misc_feature 1..585: note = Description of Artificial Sequence: Synthetic coding sequence
  source 1..585: mol_type = other DNA
atgttctgtgtgaccccacctgagctggagaccaagatgaacatcaccaagggcggcctggtgctcttcagcgccaacagcaacagcagctgcatggagctgagcaagaagattgctgagcggctgggcgtggagatgggcaaggtgcaggtgtaccaggagcccaaccgggagaccagggtgcagatccaggagagcgtgcggggcaaggatgtgttcatcatccagacagtgtccaaggatgtgaacaccaccatcatggagctgctgatcatggtgtatgcctgcaagaccagctgtgccaagagcatcattggagtcatcccctacttcccctacagcaagcagtgcaagatgaggaagaggggcagcatcgtgtccaagctgctggcctccatgatgtgcaaggccggcctgacccacctgatcaccatggacctgcaccagaaggagatccagggcttcttcaacatccctgtggacaacctgcgggccagccccttcctgctgcagtacatccaggaggagatcccagactacagaaatgctgtgattgtggccaagagccctgccagcgccaagtag

SEQ ID NO: 164198 - DNA, 990 bp, synthetic construct
  misc_feature 1..990: note = Description of Artificial Sequence: Synthetic coding sequence
  source 1..990: mol_type = other DNA
atgttctgtgtgaccccacctgagctggagaccaagatgaacatcaccaagggcggcctggtgctcttcagcgccaacagcaacagcagctgcatggagctgagcaagaagattgctgaagatgtgaacaccaccatcatggagctgctgatcatggtgtatgcctgcaagaccagctgtgccaagagcatcattggagtcatcccctacttcccctacagcaagcagtgcaagatgaggaagaggggcagcatcgtgtccaagctgctggcctccatgatgtgcaaggccggcctgacccacctgatcaccatggacctgcaccagaaggagatccagggcttcttcaacatccctgtggacaacctgcgggccagccccttcctgctgcagtacatccaggaggagatcccagactacagaaatgctgtgattgtggccaagagccctgccagcgccaagagggcccagagctttgctgagcggctgcggctgggcattgctgtgattcatggagaggcccaggatgctgagagtgacctggtggatggccgccacagcccccccatggtgcgctctgtggccgccatccaccccagcctggagatccccatgctgatccccaaggagaagccacccatcaccgtggtgggagatgtgggcggccgcatcgccatcatcgtggatgacatcattgatgatgtggacagcttcctggccgctgctgagaccctgaaggagcggggggcctacaagatctttgtgatggccacccacggcctgctgagcagtgatgccccccggcgcatcgaggagagcgccattgatgaggtggtggtgaccaacaccatcccccatgaggtgcagaagctgcagtgccccaagatcaagacagtggacatctccatgatcctgtctgaggccatccgccgcatccacaacggggagagcatgagctacctgttcagaaatattggcctggatgactag

SEQ ID NO: 164199 - DNA, 531 bp, synthetic construct
  misc_feature 1..531: note = Description of Artificial Sequence: Synthetic coding sequence
  source 1..531: mol_type = other DNA
atgttctgtgtgaccccacctgagctggagaccaagatgaacatcaccaagggcggcctggtgctcttcagcgccaacagcaacagcagctgcatggagctgagcaagaagattgctgagcggctgggcgtggagatgggcaaggtgcaggtgtaccaggagcccaaccgggagaccagggtgcagatccaggagagcgtgcggggcaaggatgtgttcatcatccagacagtgtccaaggatgtgaacaccaccatcatggagctgctgatcatggtgtatgcctgcaagaccagctgtgccaagagcatcattggagtcatcccctacttcccctacagcaagcagtgcaagatgaggaagaggggcagcatcgtgtccaagctgctggcctccatgatgtgcaaggccggcctgacccacctgatcaccatggacctgcaccagaaggagatccagggcttcttcaacatccctgtggacaacctgcgggccagccccttcctgctgcagtacatccaggaggagtag

SEQ ID NO: 164200 - DNA, 735 bp, synthetic construct
  misc_feature 1..735: note = Description of Artificial Sequence: Synthetic coding sequence
  source 1..735: mol_type = other DNA
atgttctgtgtgaccccacctgagctggagaccaagatgaacatcaccaagggcggcctggtgctcttcagcgccaacagcaacagcagctgcatggagctgagcaagaagattgctgagcggctgggcgtggagatgggcaaggtgcaggtgtaccaggagcccaaccgggagaccagggtgcagatccaggagagcgtgcggggcaaggatgtgttcatcatccagacagtgtccaaggatgtgaacaccaccatcatggagctgctgatcatggtgtatgcctgcaagaccagctgtgccaagagcatcattggagtcatcccctacttcccctacagcaagcagtgcaagatgaggaagaggggcagcatcgtgtccaagctgctggcctccatgatgtgcaaggccggcctgacccacctgatcaccatggacctgcaccagaaggagatccagggcttcttcaacatccctgtggacaacctgcgggccagccccttcctgctgcagtacatccaggaggagatcccagactacagaaatgctgtgattgtggccaagagccctgccagcgccaagagggcccagagctttgctgagcggctgcggctgggcattgctgtgattcatggagaggcccaggatgctgagagtgacctggtggatggccgccacagcccccccatggtgcgctctgtggccgccatccaccccagcctggagatcccctag

SEQ ID NO: 164201 - DNA, 135 bp, synthetic construct
  misc_feature 1..135: note = Description of Artificial Sequence: Synthetic coding sequence
  source 1..135: mol_type = other DNA
atgttctgtgtgaccccacctgagctggagaccaagatgaacatcaccaagggcggcctggtgctcttcagcgccaacagcaacagcagctgcatggagctgagcaagaagattgctgagcggctgggcgtgtag

SEQ ID NO: 164202 - DNA, 807 bp, synthetic construct; identical to SEQ ID NO: 164196
  misc_feature 1..807: note = Description of Artificial Sequence: Synthetic coding sequence
  source 1..807: mol_type = other DNA

SEQ ID NO: 164203 - DNA, 423 bp, synthetic construct
  misc_feature 1..423: note = Description of Artificial Sequence: Synthetic coding sequence
  source 1..423: mol_type = other DNA
atgttctgtgtgaccccacctgagctggagaccaagatgaacatcaccaagggcggcctggtgctcttcagcgccaacagcaacagcagctgcatggagctgagcaagaagattgctgagcggctgggcgtggagatgggcaaggtgcaggtgtaccaggagcccaaccgggagaccagggtgcagatccaggagagcgtgcggggcaaggatgtgttcatcatccagacagtgtccaaggatgtgaacaccaccatcatggagctgctgatcatggtgtatgcctgcaagaccagctgtgccaagagcatcattggagtcatcccctacttcccctacagcaagcagtgcaagatgaggaagaggggcagcatcgtgtccaagctgctggcctccatgatgtgcaaggccggcctgacctag

SEQ ID NO: 164204 - DNA, 807 bp, synthetic construct; identical to SEQ ID NO: 164196
  misc_feature 1..807: note = Description of Artificial Sequence: Synthetic coding sequence
  source 1..807: mol_type = other DNA

SEQ ID NO: 164205 - DNA, 852 bp, synthetic construct
  misc_feature 1..852: note = Description of Artificial Sequence: Synthetic coding sequence
  source 1..852: mol_type = other DNA
atggagctgctgatcatggtgtatgcctgcaagaccagctgtgccaagagcatcattggagtcatcccctacttcccctacagcaagcagtgcaagatgaggaagaggggcagcatcgtgtccaagctgctggcctccatgatgtgcaaggccggcctgacccacctgatcaccatggacctgcaccagaaggagatccagggcttcttcaacatccctgtggacaacctgcgggccagccccttcctgctgcagtacatccaggaggagatcccagactacagaaatgctgtgattgtggccaagagccctgccagcgccaagagggcccagagctttgctgagcggctgcggctgggcattgctgtgattcatggagaggcccaggatgctgagagtgacctggtggatggccgccacagcccccccatggtgcgctctgtggccgccatccaccccagcctggagatccccatgctgatccccaaggagaagccacccatcaccgtggtgggagatgtgggcggccgcatcgccatcatcgtggatgacatcattgatgatgtggacagcttcctggccgctgctgagaccctgaaggagcggggggcctacaagatctttgtgatggccacccacggcctgctgagcagtgatgccccccggcgcatcgaggagagcgccattgatgaggtggtggtgaccaacaccatcccccatgaggtgcagaagctgcagtgccccaagatcaagacagtggacatctccatgatcctgtctgaggccatccgccgcatccacaacggggagagcatgagctacctgttcagaaatattggcctggatgactag

SEQ ID NO: 164206 - DNA, 963 bp, synthetic construct
  misc_feature 1..963: note = Description of Artificial Sequence: Synthetic coding sequence
  source 1..963: mol_type = other DNA
atgttctgtgtgaccccacctgagctggagaccaagatgaacatcaccaagggcggcctggtgctcttcagcgccaacagcaacagcagctgcatggagctgagcaagaagattgctgagcggctgggcgtggagatgggcaaggtgcaggtgtaccaggagcccaaccgggagaccagggtgcagatccaggagagcgtgcggggcaaggatgtgttcatcatccagacagtgtccaaggatgtgaacaccaccatcatggagctgctgatcatggtgtatgcctgcaagaccagctgtgccaagagcatcattggagtcatcccctacttcccctacagcaagcagtgcaagatgaggaagaggggcagcatcgtgtccaagctgctggcctccatgatgtgcaaggccggcctgacccacctgatcaccatggacctgcaccagaaggagatccagggcttcttcaacatccctgtggacaacctgcgggccagccccttcctgctgcagtacatccaggaggagatcccagactacagaaatgctgtgattgtggccaagagccctgccagcgccaagagggcccagagctttgctgagcggctgcggctgggcattgctgtgattcatggagaggcccaggatgctgagagtgacctggtggatggccgccacagcccccccatggtgcgctctgtggccgccatccaccccagcctggagatccccatgctgatccccaaggagaagccacccatcaccgtggtgggagatgtgggcggccgcatcgccatcatcgtggtggtggtgaccaacaccatcccccatgaggtgcagaagctgcagtgccccaagatcaagacagtggacatctccatgatcctgtctgaggccatccgccgcatccacaatggagagagcatgagctacctgttcaggaacatcggcctggatgactag

SEQ ID NO: 164207 - DNA, 237 bp, synthetic construct
  misc_feature 1..237: note = Description of Artificial Sequence: Synthetic coding sequence
  source 1..237: mol_type = other DNA
atgttctgtgtgaccccacctgagctggagaccaagatgaacatcaccaagggcggcctggtgctcttcagcgccaacagcaacagcagctgcatggagctgagcaagaagattgctgagaacaagagcaccaacagccgggtgtgtgagggcaagcgctgcttccaccaccccaactgctttgagggccgggagcaccaccaccacggggccccagaccacggcgtgtgcatgtag

SEQ ID NO: 164208 - DNA, 678 bp, synthetic construct
  misc_feature 1..678: note = Description of Artificial Sequence: Synthetic coding sequence
  source 1..678: mol_type = other DNA
atggccggcagcagcgaggaggccccagactatggccggggcgtggtgatcatggatgactggccaggctatgacctgaacctcttcacctacccccagcactactacggggacctggagtatgtgctgatcccccacggcatcatcgtggacagaattgagcggctggccaaggacatcatgaaggacatcggctacagcgacatcatggtgctgtgtgtgctgaagggcggctacaagttctgtgccgacctggtggagcacctgaagaacatcagcaggaacagcgacagatttgtgtccatgaaggtggacttcatccggctgaagagctacagaaatgaccagagcatgggagagatgcagatcattggaggagatgacctgagcaccctggccggcaagaatgtgctgattgtggaggatgtggtgggcaccggccgcaccatgaaggccctgctgagcaacatcgagaagtacaagcccaacatgatcaaggtggccagcctgctggtgaagaggaccagcagaagtgatggcttccggccagactatgccggctttgagatccccaacctgtttgtggtgggctacgccctggactacaatgagtacttccgggacctgaaccacatctgtgtgatcaatgagcacggcaaggagaagtacagagtgtag

SEQ ID NO: 164209 - DNA, 573 bp, synthetic construct
  misc_feature 1..573: note = Description of Artificial Sequence: Synthetic coding sequence
  source 1..573: mol_type = other DNA
atggccggcagcagcgaggaggccccagactatggccggggcgtggtgatcatggatgactggccaggctatgacctgaacctcttcacctacccccagcactactacggggacctggagtatgtgctgatcccccacggcatcatcgtggacagaattgagcggctggccaaggacatcatgaaggacatcggctacagcgacatcatggtgctgtgtgtgctgaagggcggctacaagttctgtgccgacctggtggagcacctgaagaacatcagcaggaacagcgacagatttgtgtccatgaaggtggacttcatccggctgaagagctacagaaatgaccagagcatgggagagatgcagatcattggaggagatgacctgagcaccctggccggcaagtctgtgctgtttgccaaggatgtggtgggcaccggccgcaccatgaaggccctgctgagcaacatcgagaagtacaagcccaacatgatcaaggtggccagcctgctggtgaagaggaccagcagaagtgatggcttccggccagacagccacatgaggcaccagtag

SEQ ID NO: 164210 - DNA, 522 bp, synthetic construct
  misc_feature 1..522: note = Description of Artificial Sequence: Synthetic coding sequence
  source 1..522: mol_type = other DNA
atggccggcagcagcgaggaggccccagactatggccggggcgtggtgatcatggatgactggccaggctatgacctgaacctcttcacctacccccagcactactacggggacctggagtatgtgctgatcccccacggcatcatcgtggacagaattgagcggctggccaaggacatcatgaaggacatcggctacagcgacatcatggtgctgtgtgtgctgaagggcggctacaagttctgtgccgacctggtggagcacctgaagaacatcagcaggaacagcgacagatttgtgtccatgaaggtggacttcatccggctgaagagctaccgcctgcgggcccggctgaagaggaccaccatctgtgacagaggaggcctggccttcagccagggctacatgagcagctgtgcccccctgcaggagagccccaacaccctgtggaggggctacctgcaggtgctgatcccctgcttccacatccgcttccagctgcccaggtctgagcagaactag

SEQ ID NO: 164211 - DNA, 573 bp, synthetic construct
  misc_feature 1..573: note = Description of Artificial Sequence: Synthetic coding sequence
  source 1..573: mol_type = other DNA
atggccggcagcagcgaggaggccccagactatggccggggcgtggtgatcatggatgactggccaggctatgacctgaacctcttcacctacccccagcactactacggggacctggagtatgtgctgatcccccacggcatcatcgtggacagaattgagcggctggccaaggacatcatgaaggacatcggctacagcgacatcatggtgctgtgtgtgctgaagggcggctacaagttctgtgccgacctggtggagcacctgaagaacatcagcaggaacagcgacagatttgtgtccatgaaggtggacttcatccggctgaagagctacagaaatgaccagagcatgggagagatgcagatcattggaggagatgacctgagcaccctggccggcaagaatgtgctgattgtggaggatgtggtgggcaccggccgcaccatgaaggccctgctgagcaacatcgagaagtacaagcccaacatgatcaaggtggccagcctgctggtgaagaggaccagcagaagtgatggcttccggccagacagccacatgaggcaccagtag

SEQ ID NO: 164212 - DNA, 1299 bp, synthetic construct
  misc_feature 1..1299: note = Description of Artificial Sequence: Synthetic coding sequence
  source 1..1299: mol_type = other DNA
atggccacagctgaggtgctgaacatcggcaagaagctgtatgagggcaagaccaaggaggtgtatgagctgctggacagccctgggaaggtgctgctgcagagcaaggaccagatcacagctggaaatgctgccaggaagaaccacctggagggcaaggccgccatcagcaacaagatcaccagctgcatcttccagctgctgcaggaggccgtgaccagctacaagagcaaccgcatcaagacagccttcaccaggaaatgtggggagacagccttcatcgccccccagtgtgagatgatccccatcgagtgggtgtgccgccgcatcgccaccggcagcttcctgaagaggaaccctggggtgaaggagggctacaagttctacccacccaaggtggagctgttcttcaaggatgatgccaacaatgacccccagtggagcgaggagcagctgattgctgccaagttctgctttgctggcctgctgattggccagacagaggtggacatcatgagccacgccacccaggccatctttgagatcctggagaagtcctggctgccccagaactgcaccctggtggacatgaagattgaatttggagtggatgtgaccaccaaggagatcgtgctggctgatgtgattgacaatgacagctggaggctgtggcccagcggggacaggagccagcagaaggacaagcagagctacagagacctgaaggaggtgaccccagagggcctgcagatggtgaagaagaactttgagtgggtggccgagcgggtggagctgctgctgaagtctgagagccagtgccgggtggtggtgctgatgggcagcaccagtgacctgggccactgtgagaagatcaagaaggcctgtggcaactttggcatcccctgtgagctgcgggtgaccagcgcccacaagggcccagatgagaccctgcgcatcaaggccgagtatgaaggagatggcatccccaccgtgtttgtggccgtggccggccgcagcaatggcctgggccctgtgatgagcggcaacacagcctaccctgtgatcagctgcccccccctgaccccagactggggcgtgcaggatgtgtggagcagcctgcggctgcccagcggcctgggctgcagcacagtgctgagccctgagggcagcgcccagtttgctgcccagatcttcggcctgagcaaccacctggtgtggagcaagctgcgggccagcatcctgaacacctggatcagcctgaagcaggccgacaagaagatccgggagtgcaacctgtag

SEQ ID NO: 164213 - DNA, 1278 bp, synthetic construct
  misc_feature 1..1278: note = Description of Artificial Sequence: Synthetic coding sequence
  source 1..1278: mol_type = other DNA
atggccacagctgaggtgctgaacatcggcaagaagctgtatgagggcaagaccaaggaggtgtatgagctgctggacagccctgggaaggtgctgctgcagagcaaggaccagatcacagctggaaatgctgccaggaagaaccacctggagggcaaggccgccatcagcaacaagatcaccagctgcatcttccagctgctgcaggaggccggcatcaagacagccttcaccaggaaatgtggggagacagccttcatcgccccccagtgtgagatgatccccatcgagtgggtgtgcagaagaattgccaccggcagcttcctgaagagaaatcctggggtgaaggagggctacaagttctacccacccaaggtggagctgttcttcaaggatgatgccaacaatgacccccagtggagcgaggagcagctgattgctgccaagttctgctttgctggcctgctgattggccagacagaggtggacatcatgagccacgccacccaggccatctttgagatcctggagaagtcctggctgccccagaactgcaccctggtggacatgaagattgaatttggagtggatgtgaccaccaaggagatcgtgctggctgatgtgattgacaatgacagctggaggctgtggcccagcggggacaggagccagcagaaggacaagcagagctacagagacctgaaggaggtgaccccagagggcctgcagatggtgaagaagaactttgagtgggtggccgagcgggtggagctgctgctgaagtctgagagccagtgccgggtggtggtgctgatgggcagcaccagtgacctgggccactgtgagaagatcaagaaggcctgtggcaactttggcatcccctgtgagctgcgggtgaccagcgcccacaagggcccagatgagaccctgcgcatcaaggccgagtatgaaggagatggcatccccaccgtgtttgtggccgtggccggccgcagcaatggcctgggccctgtgatgagcggcaacacagcctaccctgtgatcagctgcccccccctgaccccagactggggcgtgcaggatgtgtggagcagcctgcggctgcccagcggcctgggctgcagcacagtgctgagccctgagggcagcgcccagtttgctgcccagatcttcggcctgagcaaccacctggtgtggagcaagctgcgggccagcatcctgaacacctggatcagcctgaagcaggccgacaagaagatccgggagtgcaacctgtag

SEQ ID NO: 164214 - DNA, 1278 bp, synthetic construct; identical to SEQ ID NO: 164213
  misc_feature 1..1278: note = Description of Artificial Sequence: Synthetic coding sequence
  source 1..1278: mol_type = other DNA

SEQ ID NO: 164215 - DNA, 4017 bp, synthetic construct
  misc_feature 1..4017: note = Description of Artificial Sequence: Synthetic coding sequence
  source 1..4017: mol_type = other DNA
atgagccctgtgctgcacttctacgtgcggcccagcggccacgagggcgccgcccctggccacaccaggaggaagctgcagggcaagctgcctgagctgcagggcgtggagacagagctgtgctacaacgtgaactggacagctgaggccctgcccagcgctgaggagaccaagaagctgatgtggctgtttggctgccccctgctgctggatgatgtggcccgggagagctggctgctgcccggcagcaatgacctgctgctggaggtgggcccccggctgaacttcagcacccccaccagcaccaacatcgtgtctgtgtgccgggccaccggcctgggccctgtggacagagtggagaccacccggcgctaccgcctgagctttgcccacccccccagcgctgaggtggaggccatcgccctggccaccctgcatgacaggatgacagagcagcacttcccccaccccatccagagcttcagccctgagagcatgcctgagcccctgaatggccccatcaacatcctgggggagggccgcctggccctggagaaggccaaccaggagctgggcctggccctggacagctgggacctggacttctacaccaagcgcttccaggagctgcagaggaaccccagcacagtggaggcctttgacctggcccagagcaacagcgagcacagccgccactggttcttcaagggccagctgcacgtggatggccagaagctggtgcacagcctgtttgagagcatcatgagcacccaggagagcagcaaccccaacaacgtgctgaagttctgtgacaacagcagcgccatccagggcaaggaggtgcgcttcctgcggcctgaggaccccacccggcccagccgcttccagcagcagcagggcctgcggcacgtggtgttcaccgctgagacccacaacttccccactggagtgtgccccttcagcggggccaccactggaactggaggccgcatcagagatgtgcagtgcaccggccgcggggcccacgtggtggccggcacagctggctactgcttcggcaacctgcacatccctggctacaacctgccctgggaggaccccagcttccagtacccaggcaactttgcccggcccctggaggtggccatcgaggccagcaatggagccagtgactatggcaacaagtttggagagcctgtgctggccggctttgcccggagcctgggcctgcagctgcctgatggccagaggcgggagtggatcaagcccatcatgttttctgggggcatcggctccatggaggccgaccacatcagcaaggaggcccctgagcccggcatggaggtggtgaaggtgggcggccctgtgtacagaattggagtgggcggcggggccgccagctctgtgcaggtgcagggcgacaacaccagtgacctggactttggagctgtgcagagaggagaccctgagatggagcagaagatgaacagagtcatccgggcctgtgtggaggcccccaagggcaaccccatctgcagcctgcatgaccagggcgccggcggcaatggaaatgtgctgaaggagctgagtgaccctgctggggccatcatctacaccagccgcttccagctgggggaccccaccctgaatgccctggagatctggggcgctgagtaccaggagagcaatgccctgctgctgcggagccccaacagagacttcctgacccacgtgtctgcccgggagcgctgcccagcctgctttgtgggcaccatcactggagaccggcgcatcgtgctggtggatgacagagaatgtcctgtgagaagaaatggccagggagatgccccacccacccccctgcccacccctgtggacctggagctggagtgggtgctgggcaagatgcccaggaaggagttcttcctgcagaggaagccacccatgctgcagcccctggccctgcccccaggcctgtctgtgcaccaggccctggagcgggtgctgcggctgcctgctgtggccagcaagcgctacctgaccaacaaggtggacagatctgtgggcggcctggtggcccagcagcagtgtgtgggccccctgcagacccccctggctgatgtggccgtggtggccctgagccatgaggagctgattggagctgccacagccctgggggagcagcctgtgaagagcctgctggaccccaaggtggccgcccggctggccgtggccgaggccctgaccaacctggtgtttgccctggtgacagacctgagagatgtgaagtgcagcggcaactggatgtgggccgccaagctgcctggagagggcgccgccctggctgatgcctgtgaggccatggtggccgtgatggccgccctgggcgtggccgtggatggcggcaaggacagcctgtccatggccgcccgggtgggcacagagaccgtgcgggcccctggcagcctggtgatcagcgcctatgctgtgtgcccagacatcacagccaccgtgaccccagacctgaagcaccctgagggccggggccacctgctgtatgtggccctgagccctggccagcaccggctgggcggcacagccctggcccagtgcttcagccagctgggggagcaccccccagacctggacctgcctgagaacctggtgcgggccttcagcatcacccagggcctgctgaaggaccggctgctgtgcagcggccatgatgtgtctgatggcggcctggtgacctgcctgctggagatggcctttgctggcaactgtggcctgcaggtggatgtgcctgtgccccgggtggatgtgctgtctgtgctgtttgctgaggagcccggcctggtgctggaggtgcaggagccagacctggcccaggtgctgaagcgctacagagatgctggcctgcactgcctggagctgggccacactggagaggccggcccccacgccatggtgcgggtgtctgtgaatggagctgtggtgctggaggagcctgtgggggagctgcgggccctgtgggaggagaccagcttccagctggaccggctgcaggccgagccccgctgtgtggccgaggaggagcggggcctgcgggagaggatgggccccagctactgcctgccccccaccttccccaaggcctctgtgccccgggagcccggcggccccagcccccgggtggccatcctgcgggaggagggcagcaatggagaccgggagatggctgatgccttccacctggccggctttgaggtgtgggatgtgaccatgcaggacctgtgcagcggggccatcggcctggacaccttccggggcgtggcctttgtgggcggcttctcctatgcagatgtgctgggcagcgccaagggctgggccgctgctgtgaccttccaccccagggctggagctgagctgcggcgcttcaggaagaggccagacaccttcagcctgggcgtgtgcaatggctgccagctgctggccctgctgggctgggtgggcggggaccccaatgaagatgctgctgagatgggccctgacagccagcctgcccggcccggcctgctgctgcggcacaacctgagcggccgctatgagagccgctgggcctctgtgcgggtgggccctggccctgccctgatgctgcggggcatggagggcgctgtgctgcctgtgtggagcgcccatggagagggctacgtggccttcagcagccctgagctgcaggcccagatcgaggcccggggcctggcccccctgcactgggcagatgatgatggcaaccccacagagcagtaccccctgaaccccaacggcagccctgggggcgtggccggcatctgcagctgtgatggccgccacctggccgtgatgccccaccctgagagagctgtgcggccctggcagtgggcctggaggcccccaccatttgacaccctgaccaccagcccctggctgcagctgttcatcaatgccaggaactggaccctggagggcagctgctag

SEQ ID NO: 164216 - DNA, 2745 bp, synthetic construct
  misc_feature 1..2745: note = Description of Artificial Sequence: Synthetic coding sequence
  source 1..2745: mol_type = other DNA
atgttttctgggggcatcggctccatggaggccgaccacatcagcaaggaggcccctgagcccggcatggaggtggtgaaggtgggcggccctgtgtacagaattggagtgggcggcggggccgccagctctgtgcaggtgcagggcgacaacaccagtgacctggactttggagctgtgcagagaggagaccctgagatggagcagaagatgaacagagtcatccgggcctgtgtggaggcccccaagggcaaccccatctgcagcctgcatgaccagggcgccggcggcaatggaaatgtgctgaaggagctgagtgaccctgctggggccatcatctacaccagccgcttccagctgggggaccccaccctgaatgccctggagatctggggcgctgagtaccaggagagcaatgccctgctgctgcggagccccaacagagacttcctgacccacgtgtctgcccgggagcgctgcccagcctgctttgtgggcaccatcactggagaccggcgcatcgtgctggtggatgacagagaatgtcctgtgagaagaaatggccagggagatgccccacccacccccctgcccacccctgtggacctggagctggagtgggtgctgggcaagatgcccaggaaggagttcttcctgcagaggaagccacccatgctgcagcccctggccctgcccccaggcctgtctgtgcaccaggccctggagcgggtgctgcggctgcctgctgtggccagcaagcgctacctgaccaacaaggtggacagatctgtgggcggcctggtggcccagcagcagtgtgtgggccccctgcagacccccctggctgatgtggccgtggtggccctgagccatgaggagctgattggagctgccacagccctgggggagcagcctgtgaagagcctgctggaccccaaggtggccgcccggctggccgtggccgaggccctgaccaacctggtgtttgccctggtgacagacctgagagatgtgaagtgcagcggcaactggatgtgggccgccaagctgcctggagagggcgccgccctggctgatgcctgtgaggccatggtggccgtgatggccgccctgggcgtggccgtggatggcggcaaggacagcctgtccatggccgcccgggtgggcacagagaccgtgcgggcccctggcagcctggtgatcagcgcctatgctgtgtgcccagacatcacagccaccgtgaccccagacctgaagcaccctgagggccggggccacctgctgtatgtggccctgagccctggccagcaccggctgggcggcacagccctggcccagtgcttcagccagctgggggagcaccccccagacctggacctgcctgagaacctggtgcgggccttcagcatcacccagggcctgctgaaggaccggctgctgtgcagcggccatgatgtgtctgatggcggcctggtgacctgcctgctggagatggcctttgctggcaactgtggcctgcaggtggatgtgcctgtgccccgggtggatgtgctgtctgtgctgtttgctgaggagcccggcctggtgctggaggtgcaggagccagacctggcccaggtgctgaagcgctacagagatgctggcctgcactgcctggagctgggccacactggagaggccggcccccacgccatggtgcgggtgtctgtgaatggagctgtggtgctggaggagcctgtgggggagctgcgggccctgtgggaggagaccagcttccagctggaccggctgcaggccgagccccgctgtgtggccgaggaggagcggggcctgcgggagaggatgggccccagctactgcctgccccccaccttccccaaggcctctgtgccccgggagcccggcggccccagcccccgggtggccatcctgcgggaggagggcagcaatggagaccgggagatggctgatgccttccacctggccggctttgaggtgtgggatgtgaccatgcaggacctgtgcagcggggccatcggcctggacaccttccggggcgtggcctttgtgggcggcttctcctatgcagatgtgctgggcagcgccaagggctgggccgctgctgtgaccttccaccccagggctggagctgagctgcggcgcttcaggaagaggccagacaccttcagcctgggcgtgtgcaatggctgccagctgctggccctgctgggctgggtgggcggggaccccaatgaagatgctgctgagatgggccctgacagccagcctgcccggcccggcctgctgctgcggcacaacctgagcggccgctatgagagccgctgggcctctgtgcgggtgggccctggccctgccctgatgctgcggggcatggagggcgctgtgctgcctgtgtggagcgcccatggagagggctacgtggccttcagcagccctgagctgcaggcccagatcgaggcccggggcctggcccccctgcactgggcagatgatgatggcaaccccacagagcagtaccccctgaaccccaacggcagccctgggggcgtggccggcatctgcagctgtgatggccgccacctggccgtgatgccccaccctgagagagctgtgcggccctggcagtgggcctggaggcccccaccatttgacaccctgaccaccagcccctggctgcagctgttcatcaatgccaggaactggaccctggagggcagctgctag

SEQ ID NO: 164217 - DNA, 2244 bp, synthetic construct
  misc_feature 1..2244: note = Description of Artificial Sequence: Synthetic coding sequence
  source 1..2244: mol_type = other DNA
gtgaagggggagaggagaattgtgctggtggatgaccgggagtgccctgtgagaagaaatggccagggagatgccccacccacccccctgcccacccctgtggacctggagctggagtgggtgctgggcaagatgcccaggaaggagttcttcctgcagaggaagccacccatgctgcagcccctggccctgcccccaggcctgtctgtgcaccaggccctggagcgggtgctgcggctgcctgctgtggccagcaagcgctacctgaccaacaaggtggacagatctgtgggcggcctggtggcccagcagcagtgtgtgggccccctgcagacccccctggctgatgtggccgtggtggccctgagccatgaggagctgattggagctgccacagccctgggggagcagcctgtgaagagcctgctggaccccaaggtggccgcccggctggccgtggccgaggccctgaccaacctggtgtttgccctggtgacagacctgagagatgtgaagtgcagcggcaactggatgtgggccgccaagctgcccggggagggcgccgccctggctgatgcctgtgaggccatggtggccgtgatggccgccctgggcgtggccgtggatggcggcaaggacagcctgtccatggccgcccgggtgggcacagaaacagtgcgggcccctggcagcctggtgatcagcgcctatgctgtgtgcccagacatcacagccaccgtgaccccagacctgaagcaccctgagggccggggccacctgctgtatgtggccctgagccctggccagcaccggctgggcggcacagccctggcccagtgcttcagccagctgggggagcaccccccagacctggacctgcctgagaacctggtgcgggccttcagcatcacccagggcctgctgaaggaccggctgctgtgcagcggccatgatgtgtctgatggcggcctggtgacctgcctgctggagatggcctttgctggcaactgtggcctgcaggtggatgtgcctgtgccccgggtggatgtgctgtctgtgctgtttgctgaggagcccggcctggtgctggaggtgcaggagccagacctggcccaggtgctgaagcgctacagagatgctggcctgcactgcctggagctgggccacactggagaggccggcccccacgccatggtgcgggtgtctgtgaatggagctgtggtgctggaggagcctgtgggggagctgcgggccctgtgggaggagaccagcttccagctggaccggctgcaggccgagccccgctgtgtggccgaggaggagcggggcctgcgggagaggatgggccccagctactgcctgccccccaccttccccaaggcctctgtgccccgggagcccggcggccccagcccccgggtggccatcctgcgggaggagggcagcaatggagaccgggagatggctgatgccttccacctggccggctttgaggtgtgggatgtgaccatgcaggacctgtgcagcggggccatcggcctggacaccttccggggcgtggcctttgtgggcggcttctcctatgcagatgtgctgggcagcgccaagggctgggccgctgctgtgaccttccacccccgggccggggctgagctgcggcgcttcaggaagaggccagacaccttcagcctgggcgtgtgcaatggctgccagctgctggccctgctgggctgggtgggcggggaccccaatgaagatgctgctgagatgggccctgacagccagcctgcccggcccggcctgctgctgcggcacaacctgagcggccgctatgagagccgctgggcctctgtgcgggtgggccctggccctgccctgatgctgcggggcatggagggcgctgtgctgcctgtgtggagcgcccacggggagggctacgtggccttcagcagccctgagctgcaggcccagatcgaggcccggggcctggcccccctgcactgggcagatgatgatggcaaccccacagagcagtaccccctgaaccccaacggcagccctggaggagtggccggcatctgcagctgtgatggccgccacctggccgtgatgccccaccctgagagagctgtgcggccctggcagtgggcctggaggcctcctccatttgacaccctgaccaccagcccctggctgcagctgttcatcaatgccaggaactggaccctggagggcagctgctag

SEQ ID NO: 164218 - DNA, 1302 bp, synthetic construct
  misc_feature 1..1302: note = Description of Artificial Sequence: Synthetic coding sequence
  source 1..1302: mol_type = other DNA
atggccgcccgggtgctgatcatcggcagcggcggccgggagcacaccctggcctggaagctggcccagagccaccacgtgaagcaggtgctggtggcccctggaaatgccggcacagcctgcagcgagaagatcagcaacacagccatcagcatcagtgaccacacagccctggcccagttctgcaaggagaagaagattgaatttgtggtggtgggccctgaggcccccctggccgccggcatcgtgggcaacctgcggtctgctggggtgcagtgcttcggccccacagctgaggccgcccagctggagagcagcaagagatttgccaaggagttcatggacagacatggcatccccacagcccagtggaaggccttcaccaagccagaggaggcctgcagcttcatcctgtctgctgacttccctgccctggtggtgaaggccagcggcctggccgccggcaagggcgtgattgtggccaagagcaaggaggaggcctgcaaggctgtgcaggagatcatgcaggagaaggccttcggggctgctggggagaccatcgtgattgaggagctgctggatggagaggaggtgtcctgcctgtgcttcacagatggcaagacagtggcccccatgcccccagcccaggaccacaagaggctgctggagggagatggcggccccaacacaggaggcatgggcgcctactgcccagccccccaggtgtccaatgacctgctgctgaagatcaaggacacagtgctgcagaggacagtggatggcatgcagcaggagggcaccccctacacaggcatcctgtatgccggcatcatgctgaccaagaatggccccaaggtgctggagttcaactgccgctttggagaccctgagtgccaggtgatcctgcccctgctgaagagtgacctgtatgaggtgatccagagcaccctggatggcctgctgtgcaccagcctgcctgtgtggctggagaaccacacagccctgactgtggtgatggccagcaagggctacccaggggactacaccaagggcgtggagatcaccggcttccctgaggcccaggccctgggcctggaggtgttccacgccggcacagccctgaagaatggcaaggtggtgacccacggcggccgggtgctggccgtgacagccatccgggagaacctgatcagcgccctggaggaggccaagaagggcctggccgccatcaagtttgagggcgccatctacaggaaggatgtgggcttccgggccatcgccttcctgcagcagcccaggtag

SEQ ID NO: 164219 - DNA, 3033 bp, synthetic construct
  misc_feature 1..3033: note = Description of Artificial Sequence: Synthetic coding sequence
  source 1..3033: mol_type = other DNA
atggccgcccgggtgctgatcatcggcagcggcggccgggagcacaccctggcctggaagctggcccagagccaccacgtgaagcaggtgctggtggcccctggaaatgccggcacagcctgcagcgagaagatcagcaacacagccatcagcatcagtgaccacacagccctggcccagttctgcaaggagaagaagattgaatttgtggtggtgggccctgaggcccccctggccgccggcatcgtgggcaacctgcggtctgctggggtgcagtgcttcggccccacagctgaggccgcccagctggagagcagcaagagatttgccaaggagttcatggacagacatggcatccccacagcccagtggaaggccttcaccaagccagaggaggcctgcagcttcatcctgtctgctgacttccctgccctggtggtgaaggccagcggcctggccgccggcaagggcgtgattgtggccaagagcaaggaggaggcctgcaaggctgtgcaggagatcatgcaggagaaggccttcggggctgctggggagaccatcgtgattgaggagctgctggatggagaggaggtgtcctgcctgtgcttcacagatggcaagacagtggcccccatgcccccagcccaggaccacaagaggctgctggagggagatggcggccccaacacaggaggcatgggcgcctactgcccagccccccaggtgtccaatgacctgctgctgaagatcaaggacacagtgctgcagaggacagtggatggcatgcagcaggagggcaccccctacacaggcatcctgtatgccggcatcatgctgaccaagaatggccccaaggtgctggagttcaactgccgctttggagaccctgagtgccaggtgatcctgcccctgctgaagagtgacctgtatgaggtgatccagagcaccctggatggcctgctgtgcaccagcctgcctgtgtggctggagaaccacacagccctgactgtggtgatggccagcaagggctacccaggggactacaccaagggcgtggagatcaccggcttccctgaggcccaggccctgggcctggaggtgttccacgccggcacagccctgaagaatggcaaggtggtgacccacggcggccgggtgctggccgtgacagccatccgggagaacctgatcagcgccctggaggaggccaagaagggcctggccgccatcaagtttgagggcgccatctacaggaaggatgtgggcttccgggccatcgccttcctgcagcagcccaggagcctgacctacaaggagagcggcgtggacattgctgctggcaacatgctggtgaagaagatccagcccctggccaaggccaccagccgcagcggctgcaaggtggacctgggcggctttgctggcctgtttgacctgaaggccgccggcttcaaggaccccctgctggccagcggcacagatggagtgggcaccaagctgaagatcgcccagctgtgcaacaagcatgacaccatcggccaggacctggtggccatgtgtgtgaatgacatcctggcccagggcgctgagcccctcttcttcctggactacttcagctgtgggaagctggacctgtctgtgacagaggccgtggtggccggcatcgccaaggcctgtgggaaggccggctgtgccctgctgggcggggagacagctgagatgccagacatgtacccacctggagaatatgacctggccggctttgctgtgggcgccatggagcgggaccagaagctgccccacctggagcgcatcacagaaggagatgtggtggtgggcatcgccagcagcggcctgcacagcaatggcttcagcctggtgaggaagatcgtggccaagagcagcctgcagtacagcagccctgccccagatggctgtggggaccagaccctgggggacctgctgctgacccccacccgcatctacagccacagcctgctgcctgtgctgcggagcggccacgtgaaggcctttgcccacatcaccggcggcggcctgctggagaacatcccccgggtgctgcctgagaagctgggcgtggacctggatgcccagacctggaggatccccagggtcttctcctggctgcagcaggagggccacctgtctgaggaggagatggcccggaccttcaactgtggggtgggcgctgtgctggtggtgtccaaggagcagacagagcagatcctgcgggacatccagcagcacaaggaggaggcctgggtgattggctctgtggtggcccgggcagagggcagcccccgggtgaaggtgaagaacctgattgagagcatgcagatcaatggatctgtgctgaagaatggcagcctgaccaaccacttctcctttgagaagaagaaggcccgggtggccgtgctgatctctggaacaggcagcaacctgcaggccctgattgacagcacccgggagcccaacagcagcgcccagattgatattgtcatcagcaacaaggctgctgtggccggcctggacaaggccgagcgggccggcatccccaccagggtcatcaaccacaagctgtacaagaacagagtggagtttgacagcgccatcgacctggtgctggaggagttcagcattgatattgtgtgcctggccggcttcatgaggatcctgagcggcccctttgtgcagaagtggaatggcaagatgctgaacatccaccccagcctgctgcccagcttcaagggcagcaatgcccacgagcaggccctggagaccggggtgacagtgacaggctgcaccgtgcactttgtggccgaggatgtggatgctggccagatcatcctgcaggaggccgtgcctgtgaagagaggagacacagtggccaccctgtctgagcgggtgaagctggccgagcacaagatcttccctgctgccctgcagctggtggccagcggcaccgtgcagctgggggagaatggcaagatctgctgggtgaaggaggagtag

SEQ ID NO: 164220 - DNA, 3033 bp, synthetic construct; identical to SEQ ID NO: 164219
  misc_feature 1..3033: note = Description of Artificial Sequence: Synthetic coding sequence
  source 1..3033: mol_type = other DNA

SEQ ID NO: 164221 - DNA, 3033 bp, synthetic construct; identical to SEQ ID NO: 164219
  misc_feature 1..3033: note = Description of Artificial Sequence: Synthetic coding sequence
  source 1..3033: mol_type = other DNA

SEQ ID NO: 164222 - DNA, 699 bp, synthetic construct
  misc_feature 1..699: note = Description of Artificial Sequence: Synthetic coding sequence
  source 1..699: mol_type = other DNA
atggccgcccgggtgctgatcatcggcagcggcggccgggagcacaccctggcctggaagctggcccagagccaccacgtgaagcaggtgctggtggcccctggaaatgccggcacagcctgcagcgagaagatcagcaacacagccatcagcatcagtgaccacacagccctggcccagttctgcaaggagaagaagattgaatttgtggtggtgggccctgaggcccccctggccgccggcatcgtgggcaacctgcggtctgctggggtgcagtgcttcggccccacagctgaggccgcccagctggagagcagcaagagatttgccaaggagttcatggacagacatggcatccccacagcccagtggaaggccttcaccaagccagaggaggcctgcagcttcatcctgtctgctgacttccctgccctggtggtgaaggccagcggcctggccgccggcaagggcgtgattgtggccaagagcaaggaggaggcctgcaaggctgtgcaggagatcatgcaggagaaggccttcggggctgctggggagaccatcgtgattgaggagctgctggatggagaggaggtgtcctgcctgtgcttcacagatggcaagacagtggcccccatgcccccagcccaggaccacaagaggctgctggagggagatggcggccccaacacaggaggatag

SEQ ID NO: 164223 - DNA, 726 bp, synthetic construct
  misc_feature 1..726: note = Description of Artificial Sequence: Synthetic coding sequence
  source 1..726: mol_type = other DNA
atggccgcccgggtgctgatcatcggcagcggcggccgggagcacaccctggcctggaagctggcccagagccaccacgtgaagcaggtgctggtggcccctggaaatgccggcacagcctgcagcgagaagatcagcaacacagccatcagcatcagtgaccacacagccctggcccagttctgcaaggagaagaagattgaatttgtggtggtgggccctgaggcccccctggccgccggcatcgtgggcaacctgcggtctgctggggtgcagtgcttcggccccacagctgaggccgcccagctggagagcagcaagagatttgccaaggagttcatggacagacatggcatccccacagcccagtggaaggccttcaccaagccagaggaggcctgcagcttcatcctgtctgctgacttccctgccctggtggtgaaggccagcggcctggccgccggcaagggcgtgattgtggccaagagcaaggaggaggcctgcaaggctgtgcaggagatcatgcaggagaaggccttcggggctgctggggagaccatcgtgattgaggagctgctggatggagaggaggtgtcctgcctgtgcttcacagatggcaagacagtggcccccatgcccccagcccaggaccacaagaggctgctggagggagatggcggccccaacacaggaggcatgggcgcctactgcccagccccccagtag

SEQ ID NO: 164224 - DNA, 417 bp, synthetic construct
  misc_feature 1..417: note = Description of Artificial Sequence: Synthetic coding sequence
  source 1..417: mol_type = other DNA
atggccgcccgggtgctgatcatcggcagcggcggccgggagcacaccctggcctggaagctggcccagagccaccacgtgaagcaggtgctggtggcccctggaaatgccggcacagcctgcagcgagaagatcagcaacacagccatcagcatcagtgaccacacagccctggcccagttctgcaaggagaagaagattgaatttgtggtggtgggccctgaggcccccctggccgccggcatcgtgggcaacctgcggtctgctggggtgcagtgcttcggccccacagctgaggccgcccagctggagagcagcaagagatttgccaaggagttcatggacagacatggcatccccacagcccagtggaaggccttcaccaagccagaggaggcctgcagcttcatcctgtag

SEQ ID NO: 164225 - DNA, 411 bp, synthetic construct
  misc_feature 1..411: note = Description of Artificial Sequence: Synthetic coding sequence
  source 1..411: mol_type = other DNA
atggccgcccgggtgctgatcatcggcagcggcggccgggagcacaccctggcctggaagctggcccagagccaccacgtgaagcaggtgctggtggcccctggaaatgccggcacagcctgcagcgagaagatcagcaacacagccatcagcatcagtgaccacacagccctggcccagttctgcaaggagaagaagattgaatttgtggtggtgggccctgaggcccccctggccgccggcatcgtgggcaacctgcggtctgctggggtgcagtgcttcggccccacagctgaggccgcccagctggagagcagcaagagatttgccaaggagttcatggacagacatggcatccccacagcccagtggaaggccttcaccaagccagaggaggcctgcagcttctag

SEQ ID NO: 164226 - DNA, 1689 bp, synthetic construct
  misc_feature 1..1689: note = Description of Artificial Sequence: Synthetic coding sequence
  source 1..1689: mol_type = other DNA
atgctggtgaagaagatccagcccctggccaaggccaccagccgcagcggctgcaaggtggacctgggcggctttgctggcctgtttgacctgaaggccgccggcttcaaggaccccctgctggccagcggcacagatggagtgggcaccaagctgaagatcgcccagctgtgcaacaagcatgacaccatcggccaggacctggtggccatgtgtgtgaatgacatcctggcccagggcgctgagcccctcttcttcctggactacttcagctgtgggaagctggacctgtctgtgacagaggccgtggtggccggcatcgccaaggcctgtgggaaggccggctgtgccctgctgggcggggagacagctgagatgccagacatgtacccacctggagaatatgacctggccggctttgctgtgggcgccatggagcgggaccagaagctgccccacctggagcgcatcacagaaggagatgtggtggtgggcatcgccagcagcggcctgcacagcaatggcttcagcctggtgaggaagatcgtggccaagagcagcctgcagtacagcagccctgccccagatggctgtggggaccagaccctgggggacctgctgctgacccccacccgcatctacagccacagcctgctgcctgtgctgcggagcggccacgtgaaggcctttgcccacatcaccggcggcggcctgctggagaacatcccccgggtgctgcctgagaagctgggcgtggacctggatgcccagacctggaggatccccagggtcttctcctggctgcagcaggagggccacctgtctgaggaggagatggcccggaccttcaactgtggggtgggcgctgtgctggtggtgtccaaggagcagacagagcagatcctgcgggacatccagcagcacaaggaggaggcctgggtgattggctctgtggtggcccgggcagagggcagcccccgggtgaaggtgaagaacctgattgagagcatgcagatcaatggatctgtgctgaagaatggcagcctgaccaaccacttctcctttgagaagaagaaggcccgggtggccgtgctgatctctggaacaggcagcaacctgcaggccctgattgacagcacccgggagcccaacagcagcgcccagattgatattgtcatcagcaacaaggctgctgtggccggcctggacaaggccgagcgggccggcatccccaccagggtcatcaaccacaagctgtacaagaacagagtggagtttgacagcgccatcgacctggtgctggaggagttcagcattgatattgtgtgcctggccggcttcatgaggatcctgagcggcccctttgtgcagaagtggaatggcaagatgctgaacatccaccccagcctgctgcccagcttcaagggcagcaatgcccacgagcaggccctggagaccggggtgacagtgacaggctgcaccgtgcactttgtggccgaggatgtggatgctggccagatcatcctgcaggaggccgtgcctgtgaagagaggagacacagtggccaccctgtctgagcgggtgaagctggccgagcacaagatcttccctgctgccctgcagctggtggccagcggcaccgtgcagctgggggagaatggcaagatctgctgggtgaaggaggagtag

SEQ ID NO: 164227 - DNA, 2265 bp, synthetic construct
  misc_feature 1..2265: note = Description of Artificial Sequence: Synthetic coding sequence
  source 1..2265: mol_type = other DNA
atgagccggcccctgagtgaccaggagaagaggaagcagatctctgtgcggggcctggccggcgtggagaatgtgacagagctgaagaagaacttcaacagacacctgcacttcaccctggtgaaggacagaaatgtggccaccccccgggactactactttgccctggcccacacagtgcgggaccacctggtgggccgctggatccgcacccagcagcactactatgagaaggaccccaagaagatcagcggcggctggcagatggaggaggctgatgactggctgcgctatggcaacccctgggagaaggcccggcctgagttcaccctgcctgtgcacttctacggccacgtggagcacaccagccagggcgccaagtgggtggacacccaggtggtgctggccatgccctatgacacccctgtgcccggctacagaaataatgtggtgaacaccatgaggctgtggagcgccaaggccccaaatgacttcaacctgaaggacttcaacgtgggcggctacatccaggccgtgctggacaggaacctggccgagaacatcagccgggtgctgtacccaaatgacaacttctttgagggcaaggagctgcggctgaagcaggagtactttgtggtggccgccaccctgcaggacatcatccgccgcttcaagagcagcaagtttggctgccgggaccctgtgaggaccaactttgatgccttcccagacaaggtggccatccagctgaatgacacccaccccagcctggccatccctgagctgatgaggatcctggtggacctggagaggatggactgggacaaggcctgggatgtgacagtgaggacctgtgcctacaccaaccacacagtgctgcctgaggccctggagcgctggcctgtgcacctgctggagaccctgctgcccaggcacctgcagatcatctatgagatcaaccagcgcttcctgaacagagtggccgccgccttccctggagatgtggaccggctgcggaggatgagcctggtggaggagggcgctgtgaagaggatcaacatggcccacctgtgcatcgccggcagccatgctgtgaatggagtggcccgcatccacagcgagatcctgaagaagaccatcttcaaggacttctatgagctggagccccacaagttccagaacaagaccaacggcatcaccccccggcgctggctggtgctgtgcaaccctggcctggccgaggtgattgctgagcgcatcggggaggacttcatcagtgacctggaccagctgaggaagctgctgagctttgtggatgatgaggccttcatcagagatgtggccaaggtgaagcaggagaacaagctgaagtttgctgcctacctggagcgggagtacaaggtgcacatcaaccccaacagcctgtttgacatccaggtgaagaggatccacgagtacaagaggcagctgctgaactgcctgcacgtgatcaccctgtacaaccgcatcaagcgggagcccaacaagttctttgtgcccaggacagtgatgattggaggcaaggccgcccctggctaccacatggccaagatgatcatccggctggtgacagccatcggagatgtggtgaaccacgaccctgctgtgggggaccggctgcgggtcatcttcctggagaactacagagtgtccctggccgagaaggtgatcccagctgctgacctgtctgagcagatcagcacagctggaacagaggccagcggcactggaaacatgaagttcatgctgaatggagccctgaccatcggcaccatggatggagccaacgtggagatggccgaggaggccggggaggagaacttcttcatcttcggcatgagggtggaggatgtggacaagctggaccagaggggctacaatgcccaggagtactatgaccgcatccctgagctgcggcaggtgattgagcagctgagcagcggcttcttcagccccaagcagcctgacctcttcaaggacatcgtgaacatgctgatgcaccacgaccgcttcaaggtgtttgctgactatgaggactacatcaagtgccaggagaaggtgtctgccctgtacaagaacccccgggagtggaccaggatggtgatccggaacatcgccaccagcggcaagttcagcagtgacaggaccatcgcccagtatgcccgggagatctggggcgtggagcccagccggcagaggctgcctgccccagatgaggccatctag

SEQ ID NO: 164228 - DNA, 3633 bp, synthetic construct
  misc_feature 1..3633: note = Description of Artificial Sequence: Synthetic coding sequence
  source 1..3633: mol_type = other DNA
atgaggagccgcagcaacagcggcgtgcggctggatggctacgcccggctggtgcagcagaccatcctgtgccaccagaaccctgtgacaggcctgctgcctgccagctatgaccagaaggatgcctgggtgcgggacaacgtgtacagcatcctggccgtgtggggcctgggcctggcctacaggaagaatgctgacagagatgaggacaaggccaaggcctatgagctggagcagagcgtggtgaagctgatgaggggcctgctgcactgcatgatccggcaggtggacaaggtggagagcttcaagtacagccagagcaccaaggacagcctgcacgccaagtacaacaccaagacctgtgccaccgtggtgggagatgaccagtggggccacctgcagctggatgccacctctgtgtacctgctcttcctggcccagatgacagccagcggcctgcacatcatccacagcctggatgaggtgaacttcatccagaacctggtgttctacatcgaggccgcctacaagacagctgactttggcatctgggagcggggggacaagaccaaccagggcatcagcgagctgaatgccagctctgtgggcatggccaaggccgccctggaggccctggatgagctggacctgtttggagtgaagggcggcccccagagcgtcatccacgtgctggctgatgaggtgcagcactgccagagcatcctgaacagcctgctgccccgggccagcaccagcaaggaggtggatgccagcctgctgtctgtggtgtccttccctgcctttgctgtggaggacagccagctggtggagctgaccaagcaggagatcatcaccaagctgcagggccgctatggctgctgccgcttcctgagagatggctacaagacccccaaggaggaccccaacagactctactatgagcctgctgagctgaagctgtttgagaacattgaatgtgagtggcccctcttctggacctacttcatcctggatggagtcttctctggaaatgctgagcaggtgcaggagtacaaggaggccctggaggccgtgctgatcaagggcaagaatggagtgcccctgctgcctgagctgtacagcgtgcccccagacagagtggatgaggagtaccagaacccccacacagtggacagagtgcccatgggcaagctgccccacatgtggggccagagcctgtacatcctgggcagcctgatggccgagggcttcctggcccctggagaaattgaccccctgaacagacgcttcagcacagtgcccaagccagatgtggtggtgcaggtgtccatcctggccgagacagaggagatcaagaccatcctgaaggacaagggcatctacgtggagaccatcgccgaggtgtaccccatccgggtgcagcctgcccgcatcctgagccacatctacagcagcctgggctgcaacaacaggatgaagctgagcggccggccctaccgccacatgggcgtgctgggcaccagcaagctgtatgacatcaggaagaccatcttcaccttcaccccccagttcatcgaccagcagcagttctacctggccctggacaacaagatgattgtggagatgctgaggacagacctgagctacctgtgcagccgctggaggatgacaggccagcccaccatcaccttccccatcagccacagcatgctggatgaagatggcaccagcctgaacagcagcatcctggccgccctgaggaagatgcaggacggctactttggaggagcccgggtgcagacaggcaagctgtctgagttcctgaccaccagctgctgcacccacctgtccttcatggaccccggccctgagggcaagctgtacagcgaggactatgatgacaactatgactacctggagagcggcaactggatgaatgactatgacagcaccagccacgcccgctgtggagatgaggtggcccgctacctggaccacctgctggcccacacagccccccaccccaagctggcccccaccagccagaagggcggcctggaccgcttccaggccgctgtgcagaccacctgtgacctgatgagcctggtgaccaaggccaaggagctgcacgtgcagaatgtgcacatgtacctgcccaccaagctgttccaggccagccggcccagcttcaacctgctggacagcccccacccccggcaggagaaccaggtgcccagcgtgcgggtggagatccacctgccccgggaccagagcggggaggtggacttcaaggccctggtgctgcagctgaaggagaccagcagcctgcaggagcaggccgacatcctgtacatgctgtacaccatgaagggccctgactggaacacagagctgtacaatgaaagaagtgccaccgtgcgggagctgctgacagagctgtatggcaaggtgggggagatccgccactggggcctcatccgctacatcagcggcatcctgaggaagaaggtggaggccctggatgaggcctgcacagacctgctgagccaccagaagcacctgactgtgggcctgcccccagagccccgggagaagaccatcagcgcccccctgccctatgaggccctgacccagctgattgatgaggccagcgagggggacatgagcatcagcatcctgacccaggagatcatggtgtacctggccatgtacatgaggacccagcccggcctgtttgctgagatgttccggctgcgcatcggcctcatcatccaggtgatggccacagagctggcccacagcctgcgctgcagcgctgaggaggccacagagggcctgatgaacctgagccccagcgccatgaagaacctgctgcaccacatcctgagcggcaaggagtttggagtggagaggtctgtgcggcccacagacagcaatgtgtccccagccatcagcatccatgaaattggagctgtgggcgccaccaagacagagaggacaggcatcatgcagctgaagtctgagatcaagcagagccctggcacctccatgacccccagcagcggcagcttccccagcgcctatgaccagcagagcagcaaggacagccggcagggccagtggcagaggagaagaaggctggatggagccctgaacagagtgcctgtgggcttctaccagaaggtgtggaaggtgctgcagaagtgccacggcctgtctgtggagggctttgtgctgcccagcagcaccacccgggagatgaccccaggagagatcaagttctctgtgcacgtggagagcgtgctgaacagagtgccccagcctgagtaccggcagctgctggtggaggccatcctggtgctgaccatgctggccgacatcgagatccacagcatcggcagcatcatcgctgtggagaagatcgtgcacatcgccaatgacctcttcctgcaggagcagaagaccctgggcgcagatgacaccatgctggccaaggaccctgccagcggcatctgcaccctgctgtatgacagcgcccccagcggccgcttcggcaccatgacctacctgagcaaggccgccgccacctacgtgcaggagttcctgccccacagcatctgtgccatgcagtag

SEQ ID NO: 164229 - DNA, 3723 bp, synthetic construct
  misc_feature 1..3723: note = Description of Artificial Sequence: Synthetic coding sequence
  source 1..3723: mol_type = other DNA
atgaggagccgcagcaacagcggcgtgcggctggatggctacgcccggctggtgcagcagaccatcctgtgccaccagaaccctgtgacaggcctgctgcctgccagctatgaccagaaggatgcctgggtgcgggacaacgtgtacagcatcctggccgtgtggggcctgggcctggcctacaggaagaatgctgacagagatgaggacaaggccaaggcctatgagctggagcagagcgtggtgaagctgatgaggggcctgctgcactgcatgatccggcaggtggacaaggtggagagcttcaagtacagccagagcaccaaggacagcctgcacgccaagtacaacaccaagacctgtgccaccgtggtgggagatgaccagtggggccacctgcagctggatgccacctctgtgtacctgctcttcctggcccagatgacagccagcggcctgcacatcatccacagcctggatgaggtgaacttcatccagaacctggtgttctacatcgaggccgcctacaagacagctgactttggcatctgggagcggggggacaagaccaaccagggcatcagcgagctgaatgccagctctgtgggcatggccaaggccgccctggaggccctggatgagctggacctgtttggagtgaagggcggcccccagagcgtcatccacgtgctggctgatgaggtgcagcactgccagagcatcctgaacagcctgctgccccgggccagcaccagcaaggaggtggatgccagcctgctgtctgtggtgtccttccctgcctttgctgtggaggacagccagctggtggagctgaccaagcaggagatcatcaccaagctgcagggccgctatggctgctgccgcttcctgagagatggctacaagacccccaaggaggaccccaacagactctactatgagcctgctgagctgaagctgtttgagaacattgaatgtgagtggcccctcttctggacctacttcatcctggatggagtcttctctggaaatgctgagcaggtgcaggagtacaaggaggccctggaggccgtgctgatcaagggcaagaatggagtgcccctgctgcctgagctgtacagcgtgcccccagacagagtggatgaggagtaccagaacccccacacagtggacagagtgcccatgggcaagctgccccacatgtggggccagagcctgtacatcctgggcagcctgatggccgagggcttcctggcccctggagaaattgaccccctgaacagacgcttcagcacagtgcccaagccagatgtggtggtgcaggtgtccatcctggccgagacagaggagatcaagaccatcctgaaggacaagggcatctacgtggagaccatcgccgaggtgtaccccatccgggtgcagcctgcccgcatcctgagccacatctacagcagcctgggctgcaacaacaggatgaagctgagcggccggccctaccgccacatgggcgtgctgggcaccagcaagctgtatgacatcaggaagaccatcttcaccttcaccccccagttcatcgaccagcagcagttctacctggccctggacaacaagatgattgtggagatgctgaggacagacctgagctacctgtgcagccgctggaggatgacaggccagcccaccatcaccttccccatcagccacagcatgctggatgaagatggcaccagcctgaacagcagcatcctggccgccctgaggaagatgcaggacggctactttggaggagcccgggtgcagacaggcaagctgtctgagttcctgaccaccagctgctgcacccacctgtccttcatggaccccggccctgagggcaagctgtacagcgaggactatgatgacaactatgactacctggagagcggcaactggatgaatgactatgacagcaccagccacgcccgctgtggagatgaggtggcccgctacctggaccacctgctggcccacacagccccccaccccaagctggcccccaccagccagaagggcggcctggaccgcttccaggccgctgtgcagaccacctgtgacctgatgagcctggtgaccaaggccaaggagctgcacgtgcagaatgtgcacatgtacctgcccaccaagctgttccaggccagccggcccagcttcaacctgctggacagcccccacccccggcaggagaaccaggtgcccagcgtgcgggtggagatccacctgccccgggaccagagcggggaggtggacttcaaggccctggtgctgcagctgaaggagaccagcagcctgcaggagcaggccgacatcctgtacatgctgtacaccatgaagggccctgactggaacacagagctgtacaatgaaagaagtgccaccgtgcgggagctgctgacagagctgtatggcaaggtgggggagatccgccactggggcctcatccgctacatcagcggcatcctgaggaagaaggtggaggccctggatgaggcctgcacagacctgctgagccaccagaagcacctgactgtgggcctgcccccagagccccgggagaagaccatcagcgcccccctgccctatgaggccctgacccagctgattgatgaggccagcgagggggacatgagcatcagcatcctgacccaggagatcatggtgtacctggccatgtacatgaggacccagcccggcctgtttgctgagatgttccggctgcgcatcggcctcatcatccaggtgatggccacagagctggcccacagcctgcgctgcagcgctgaggaggccacagagggcctgatgaacctgagccccagcgccatgaagaacctgctgcaccacatcctgagcggcaaggagtttggagtggagaggtctgtgcggcccacagacagcaatgtgtccccagccatcagcatccatgaaattggagctgtgggcgccaccaagacagagaggacaggcatcatgcagctgaagtctgagatcaagcaggtggagttccggcggctgagcatctctgctgagagccagagcaatggaggccaccccctgggcatcgacctgatgagccccagcttcatgagccctggcacctccatgacccccagcagcggcagcttccccagcgcctatgaccagcagagcagcaaggacagccggcagggccagtggcagaggagaagaaggctggatggagccctgaacagagtgcctgtgggcttctaccagaaggtgtggaaggtgctgcagaagtgccacggcctgtctgtggagggctttgtgctgcccagcagcaccacccgggagatgaccccaggagagatcaagttctctgtgcacgtggagagcgtgctgaacagagtgccccagcctgagtaccggcagctgctggtggaggccatcctggtgctgaccatgctggccgacatcgagatccacagcatcggcagcatcatcgctgtggagaagatcgtgcacatcgccaatgacctcttcctgcaggagcagaagaccctgggcgcagatgacaccatgctggccaaggaccctgccagcggcatctgcaccctgctgtatgacagcgcccccagcggccgcttcggcaccatgacctacctgagcaaggccgccgccacctacgtgcaggagttcctgccccacagcatctgtgccatgcagtag

SEQ ID NO: 164230 - DNA, 3672 bp, synthetic construct
  misc_feature 1..3672: note = Description of Artificial Sequence: Synthetic coding sequence
  source 1..3672: mol_type = other DNA
atgaggagccgcagcaacagcggcgtgcggctggatggctacgcccggctggtgcagcagaccatcctgtgccaccagaaccctgtgacaggcctgctgcctgccagctatgaccagaaggatgcctgggtgcgggacaacgtgtacagcatcctggccgtgtggggcctgggcctggcctacaggaagaatgctgacagagatgaggacaaggccaaggcctatgagctggagcagagcgtggtgaagctgatgaggggcctgctgcactgcatgatccggcaggtggacaaggtggagagcttcaagtacagccagagcaccaaggacagcctgcacgccaagtacaacaccaagacctgtgccaccgtggtgggagatgaccagtggggccacctgcagctggatgccacctctgtgtacctgctcttcctggcccagatgacagccagcggcctgcacatcatccacagcctggatgaggtgaacttcatccagaacctggtgttctacatcgaggccgcctacaagacagctgactttggcatctgggagcggggggacaagaccaaccagggcatcagcgagctgaatgccagctctgtgggcatggccaaggccgccctggaggccctggatgagctggacctgtttggagtgaagggcggcccccagagcgtcatccacgtgctggctgatgaggtgcagcactgccagagcatcctgaacagcctgctgccccgggccagcaccagcaaggaggtggatgccagcctgctgtctgtggtgtccttccctgcctttgctgtggaggacagccagctggtggagctgaccaagcaggagatcatcaccaagctgcagggccgctatggctgctgccgcttcctgagagatggctacaagacccccaaggaggaccccaacagactctactatgagcctgctgagctgaagctgtttgagaacattgaatgtgagtggcccctcttctggacctacttcatcctggatggagtcttctctggaaatgctgagcaggtgcaggagtacaaggaggccctggaggccgtgctgatcaagggcaagaatggagtgcccctgctgcctgagctgtacagcgtgcccccagacagagtggatgaggagtaccagaacccccacacagtggacagagtgcccatgggcaagctgccccacatgtggggccagagcctgtacatcctgggcagcctgatggccgagggcttcctggcccctggagaaattgaccccctgaacagacgcttcagcacagtgcccaagccagatgtggtggtgcaggtgtccatcctggccgagacagaggagatcaagaccatcctgaaggacaagggcatctacgtggagaccatcgccgaggtgtaccccatccgggtgcagcctgcccgcatcctgagccacatctacagcagcctgggctgcaacaacaggatgaagctgagcggccggccctaccgccacatgggcgtgctgggcaccagcaagctgtatgacatcaggaagaccatcttcaccttcaccccccagttcatcgaccagcagcagttctacctggccctggacaacaagatgattgtggagatgctgaggacagacctgagctacctgtgcagccgctggaggatgacaggccagcccaccatcaccttccccatcagccacagcatgctggatgaagatggcaccagcctgaacagcagcatcctggccgccctgaggaagatgcaggacggctactttggaggagcccgggtgcagacaggcaagctgtctgagttcctgaccaccagctgctgcacccacctgtccttcatggaccccggccctgagggcaagctgtacagcgaggactatgatgacaactatgactacctggagagcggcaactggatgaatgactatgacagcaccagccacgcccgctgtggagatgaggtggcccgctacctggaccacctgctggcccacacagccccccaccccaagctggcccccaccagccagaagggcggcctggaccgcttccaggccgctgtgcagaccacctgtgacctgatgagcctggtgaccaaggccaaggagctgcacgtgcagaatgtgcacatgtacctgcccaccaagctgttccaggccagccggcccagcttcaacctgctggacagcccccacccccggcaggagaaccaggtgcccagcgtgcgggtggagatccacctgccccgggaccagagcggggaggtggacttcaaggccctggtgctgcagctgaaggagaccagcagcctgcaggagcaggccgacatcctgtacatgctgtacaccatgaagggccctgactggaacacagagctgtacaatgaaagaagtgccaccgtgcgggagctgctgacagagctgtatggcaaggtgggggagatccgccactggggcctcatccgctacatcagcggcatcctgaggaagaaggtggaggccctggatgaggcctgcacagacctgctgagccaccagaagcacctgactgtgggcctgcccccagagccccgggagaagaccatcagcgcccccctgccctatgaggccctgacccagctgattgatgaggccagcgagggggacatgagcatcagcatcctgacccaggagatcatggtgtacctggccatgtacatgaggacccagcccggcctgtttgctgagatgttccggctgcgcatcggcctcatcatccaggtgatggccacagagctggcccacagcctgcgctgcagcgctgaggaggccacagagggcctgatgaacctgagccccagcgccatgaagaacctgctgcaccacatcctgagcggcaaggagtttggagtggagaggtctgtgcggcccacagacagcaatgtgtccccagccatcagcatccatgaaattggagctgtgggcgccaccaagacagagaggacaggcatcatgcagctgaagtctgagatcaagcaggtggagttccggcggctgagcatctctgctgagagccagagccctggcacctccatgacccccagcagcggcagcttccccagcgcctatgaccagcagagcagcaaggacagccggcagggccagtggcagaggagaagaaggctggatggagccctgaacagagtgcctgtgggcttctaccagaaggtgtggaaggtgctgcagaagtgccacggcctgtctgtggagggctttgtgctgcccagcagcaccacccgggagatgaccccaggagagatcaagttctctgtgcacgtggagagcgtgctgaacagagtgccccagcctgagtaccggcagctgctggtggaggccatcctggtgctgaccatgctggccgacatcgagatccacagcatcggcagcatcatcgctgtggagaagatcgtgcacatcgccaatgacctcttcctgcaggagcagaagaccctgggcgcagatgacaccatgctggccaaggaccctgccagcggcatctgcaccctgctgtatgattctgcccccagcggccgcttcggcaccatgacctacctgagcaaggctgctgccacctacgtgcaggagttcctgccccacagcatctgtgccatgcagtag

SEQ ID NO: 164231 - DNA, 3546 bp, synthetic construct
  misc_feature 1..3546: note = Description of Artificial Sequence: Synthetic coding sequence
  source 1..3546: mol_type = other DNA
atgaggagccgcagcaacagcggcgtgcggctggatggctacgcccggctggtgcagcagaccatcctgtgccaccagaaccctgtgacaggcctgctgcctgccagctatgaccagaaggatgcctgggtgcgggacaacgtgtacagcatcctggccgtgtggggcctgggcctggcctacaggaagaatgctgacagagatgaggacaaggccaaggcctatgagctggagcagagcgtggtgaagctgatgaggggcctgctgcactgcatgatccggcaggtggacaaggtggagagcttcaagtacagccagagcaccaaggacagcctgcacgccaagtacaacaccaagacctgtgccaccgtggtgggagatgaccagtggggccacctgcagctggatgccacctctgtgtacctgctcttcctggcccagatgacagccagcggcctgcacatcatccacagcctggatgaggtgaacttcatccagaacctggtgttctacatcgaggccgcctacaagacagctgactttggcatctgggagcggggggacaagaccaaccagggcatcagcgagctgaatgccagctctgtgggcatggccaaggccgccctggaggccctggatgagctggacctgtttggagtgaagggcggcccccagagcgtcatccacgtgctggctgatgaggtgcagcactgccagagcatcctgaacagcctgctgccccgggccagcaccagcaaggaggtggatgccagcctgctgtctgtggtgtccttccctgcctttgctgtggaggacagccagctggtggagctgaccaagcaggagatcatcaccaagctgcagggccgctatggctgctgccgcttcctgagagatggctacaagacccccaaggaggaccccaacagactctactatgagcctgctgagctgaagctgtttgagaacattgaatgtgagtggcccctcttctggacctacttcatcctggatggagtcttctctggaaatgctgagcaggtgcaggagtacaaggaggccctggaggccgtgctgatcaagggcaagaatggagtgcccctgctgcctgagctgtacagcgtgcccccagacagagtggatgaggagtaccagaacccccacacagtggacagagtgcccatgggcaagctgccccacatgtggggccagagcctgtacatcctgggcagcctgatggccgagggcttcctggcccctggagaaattgaccccctgaacagacgcttcagcacagtgcccaagccagatgtggtggtgcaggtgtccatcctggccgagacagaggagatcaagaccatcctgaaggacaagggcatctacgtggagaccatcgccgaggtgtaccccatccgggtgcagcctgcccgcatcctgagccacatctacagcagcctgggctgcaacaacaggatgaagctgagcggccggccctaccgccacatgggcgtgctgggcaccagcaagctgtatgacatcaggaagaccatcttcaccttcaccccccagttcatcgaccagcagcagttctacctggccctggacaacaagatgattgtggagatgctgaggacagacctgagctacctgtgcagccgctggaggatgacaggccagcccaccatcaccttccccatcagccacagcatgctggatgaagatggcaccagcctgaacagcagcatcctggccgccctgaggaagatgcaggacggctactttggaggagcccgggtgcagacaggcaagctgtctgagttcctgaccaccagctgctgcacccacctgtccttcatggaccccggccctgagggcaagctgtacagcgaggactatgatgacaactatgactacctggagagcggcaactggatgaatgactatgacagcaccagccatgatgtgcacatgtacctgcccaccaagctgttccaggccagccggcccagcttcaacctgctggacagcccccacccccggcaggagaaccaggtgcccagcgtgcgggtggagatccacctgccccgggaccagagcggggaggtggacttcaaggccctggtgctgcagctgaaggagaccagcagcctgcaggagcaggccgacatcctgtacatgctgtacaccatgaagggccctgactggaacacagagctgtacaatgaaagaagtgccaccgtgcgggagctgctgacagagctgtatggcaaggtgggggagatccgccactggggcctcatccgctacatcagcggcatcctgaggaagaaggtggaggccctggatgaggcctgcacagacctgctgagccaccagaagcacctgactgtgggcctgcccccagagccccgggagaagaccatcagcgcccccctgccctatgaggccctgacccagctgattgatgaggccagcgagggggacatgagcatcagcatcctgacccaggagatcatggtgtacctggccatgtacatgaggacccagcccggcctgtttgctgagatgttccggctgagaattggcctcatcatccaggtgatggccacagagctggcccacagcctgcgctgcagcgctgaggaggccacagagggcctgatgaacctgagccccagcgccatgaagaacctgctgcaccacatcctgagcggcaaggagtttggagtggagaggtctgtgcggcccacagacagcaatgtgtccccagccatcagcatccacgagatcggggctgtgggcgccaccaagacagagaggacaggcatcatgcagctgaagtctgagatcaagcaggtggagttccggcggctgagcatctctgctgagagccagagcaatggaggccaccccctgggcatcgacctgatgagccccagcttcatgagccctggcacctccatgacccccagcagcggcagcttccccagcgcctatgaccagcagagcagcaaggacagccggcagggccagtggcagaggagaagaaggctggatggagccctgaacagagtgcctgtgggcttctaccagaaggtgtggaaggtgctgcagaagtgccacggcctgtctgtggagggctttgtgctgcccagcagcaccacccgggagatgaccccaggagagatcaagttctctgtgcacgtggagagcgtgctgaacagagtgccccagcctgagtaccggcagctgctggtggaggccatcctggtgctgaccatgctggccgacatcgagatccacagcatcggcagcatcatcgctgtggagaagatcgtgcacatcgccaatgacctcttcctgcaggagcagaagaccctgggcgcagatgacaccatgctggccaaggaccctgccagcggcatctgcaccctgctgtatgattctgcccccagcggccgcttcggcaccatgacctacctgagcaaggctgctgccacctacgtgcaggagttcctgccccacagcatctgtgccatgcagtag

SEQ ID NO: 164232 - DNA, 3456 bp, synthetic construct
  misc_feature 1..3456: note = Description of Artificial Sequence: Synthetic coding sequence
  source 1..3456: mol_type = other DNA
atgaggagccgcagcaacagcggcgtgcggctggatggctacgcccggctggtgcagcagaccatcctgtgccaccagaaccctgtgacaggcctgctgcctgccagctatgaccagaaggatgcctgggtgcgggacaacgtgtacagcatcctggccgtgtggggcctgggcctggcctacaggaagaatgctgacagagatgaggacaaggccaaggcctatgagctggagcagagcgtggtgaagctgatgaggggcctgctgcactgcatgatccggcaggtggacaaggtggagagcttcaagtacagccagagcaccaaggacagcctgcacgccaagtacaacaccaagacctgtgccaccgtggtgggagatgaccagtggggccacctgcagctggatgccacctctgtgtacctgctcttcctggcccagatgacagccagcggcctgcacatcatccacagcctggatgaggtgaacttcatccagaacctggtgttctacatcgaggccgcctacaagacagctgactttggcatctgggagcggggggacaagaccaaccagggcatcagcgagctgaatgccagctctgtgggcatggccaaggccgccctggaggccctggatgagctggacctgtttggagtgaagggcggcccccagagcgtcatccacgtgctggctgatgaggtgcagcactgccagagcatcctgaacagcctgctgccccgggccagcaccagcaaggaggtggatgccagcctgctgtctgtggtgtccttccctgcctttgctgtggaggacagccagctggtggagctgaccaagcaggagatcatcaccaagctgcagggccgctatggctgctgccgcttcctgagagatggctacaagacccccaaggaggaccccaacagactctactatgagcctgctgagctgaagctgtttgagaacattgaatgtgagtggcccctcttctggacctacttcatcctggatggagtcttctctggaaatgctgagcaggtgcaggagtacaaggaggccctggaggccgtgctgatcaagggcaagaatggagtgcccctgctgcctgagctgtacagcgtgcccccagacagagtggatgaggagtaccagaacccccacacagtggacagagtgcccatgggcaagctgccccacatgtggggccagagcctgtacatcctgggcagcctgatggccgagggcttcctggcccctggagaaattgaccccctgaacagacgcttcagcacagtgcccaagccagatgtggtggtgcaggtgtccatcctggccgagacagaggagatcaagaccatcctgaaggacaagggcatctacgtggagaccatcgccgaggtgtaccccatccgggtgcagcctgcccgcatcctgagccacatctacagcagcctgggctgcaacaacaggatgaagctgagcggccggccctaccgccacatgggcgtgctgggcaccagcaagctgtatgacatcaggaagaccatcttcaccttcaccccccagttcatcgaccagcagcagttctacctggccctggacaacaagatgattgtggagatgctgaggacagacctgagctacctgtgcagccgctggaggatgacaggccagcccaccatcaccttccccatcagccacagcatgctggatgaagatggcaccagcctgaacagcagcatcctggccgccctgaggaagatgcaggacggctactttggaggagcccgggtgcagacaggcaagctgtctgagttcctgaccaccagctgctgcacccacctgtccttcatggaccccggccctgagggcaagctgtacagcgaggactatgatgacaactatgactacctggagagcggcaactggatgaatgactatgacagcaccagccatgatgtgcacatgtacctgcccaccaagctgttccaggccagccggcccagcttcaacctgctggacagcccccacccccggcaggagaaccaggtgcccagcgtgcgggtggagatccacctgccccgggaccagagcggggaggtggacttcaaggccctggtgctgcagctgaaggagaccagcagcctgcaggagcaggccgacatcctgtacatgctgtacaccatgaagggccctgactggaacacagagctgtacaatgaaagaagtgccaccgtgcgggagctgctgacagagctgtatggcaaggtgggggagatccgccactggggcctcatccgctacatcagcggcatcctgaggaagaaggtggaggccctggatgaggcctgcacagacctgctgagccaccagaagcacctgactgtgggcctgcccccagagccccgggagaagaccatcagcgcccccctgccctatgaggccctgacccagctgattgatgaggccagcgagggggacatgagcatcagcatcctgacccaggagatcatggtgtacctggccatgtacatgaggacccagcccggcctgtttgctgagatgttccggctgagaattggcctcatcatccaggtgatggccacagagctggcccacagcctgcgctgcagcgctgaggaggccacagagggcctgatgaacctgagccccagcgccatgaagaacctgctgcaccacatcctgagcggcaaggagtttggagtggagaggtctgtgcggcccacagacagcaatgtgtccccagccatcagcatccacgagatcggggctgtgggcgccaccaagacagagaggacaggcatcatgcagctgaagtctgagatcaagcagagccctggcacctccatgacccccagcagcggcagcttccccagcgcctatgaccagcagagcagcaaggacagccggcagggccagtggcagaggagaagaaggctggatggagccctgaacagagtgcctgtgggcttctaccagaaggtgtggaaggtgctgcagaagtgccacggcctgtctgtggagggctttgtgctgcccagcagcaccacccgggagatgaccccaggagagatcaagttctctgtgcacgtggagagcgtgctgaacagagtgccccagcctgagtaccggcagctgctggtggaggccatcctggtgctgaccatgctggccgacatcgagatccacagcatcggcagcatcatcgctgtggagaagatcgtgcacatcgccaatgacctcttcctgcaggagcagaagaccctgggcgcagatgacaccatgctggccaaggaccctgccagcggcatctgcaccctgctgtatgattctgcccccagcggccgcttcggcaccatgacctacctgagcaaggctgctgccacctacgtgcaggagttcctgccccacagcatctgtgccatgcagtag

SEQ ID NO: 164233 - DNA, 1164 bp, synthetic construct
  misc_feature 1..1164: note = Description of Artificial Sequence: Synthetic coding sequence
  source 1..1164: mol_type = other DNA
atgaccagagatgaggccctgcctgacagccacagcgcccaggacttctatgagaactatgagcccaaggagatcctgggccggggcgtgtcctctgtggtgcggcgctgcatccacaagcccaccagccaggagtatgctgtgaaggtgattgatgtgactggaggcggcagcttcagccctgaggaggtgcgggagctgcgggaggccaccctgaaggaggtggacatcctgaggaaggtgtctggccaccccaacatcatccagctgaaggacacctatgagaccaacaccttcttcttcctggtgtttgacctgatgaagagaggagagctgtttgactacctgacagagaaggtgaccctgtctgagaaggagaccaggaagatcatgagggccctgctggaggtgatctgcaccctgcacaagctgaacatcgtgcaccgggacctgaagccagagaacatcctgctggatgacaacatgaacatcaagctgacagactttggcttcagctgccagctggagcctggagagcggctgcgggaggtgtgtggcacccccagctacctggcccctgagatcattgaatgttccatgaatgaagaccaccctggctacggcaaggaggtggacatgtggagcactggagtcatcatgtacaccctgctggccggcagcccccccttctggcacaggaagcagatgctgatgctgaggatgatcatgagcggcaactaccagtttggcagccctgagtgggatgactacagcgacacagtgaaggacctggtgagccgcttcctggtggtgcagccccagaaccgctacacagctgaggaggccctggcccaccccttcttccagcagtacctggtggaggaggtgcgccacttcagcccccggggcaagttcaaggtgattgccctgactgtgctggcctctgtgcgcatctactaccagtacagaagagtgaagcctgtgacccgggagatcgtcatccgggacccctatgccctgcggcccctgcggcggctgattgatgcctatgccttccgcatctacggccactgggtgaagaagggccagcagcagaacagagctgccctgtttgagaacacccccaaggctgtgctgctgagcctggccgaggaggactactag

SEQ ID NO: 164234 - DNA, 1260 bp, synthetic construct
  misc_feature 1..1260: note = Description of Artificial Sequence: Synthetic coding sequence
  source 1..1260: mol_type = other DNA
atgaccagagatgaggccctgcctgacagccacagcgcccaggacttctatgagaactatgagcccaaggagatcctgggccggggcgtgtcctctgtggtgcggcgctgcatccacaagcccaccagccaggagtatgctgtgaaggtgattgatgtgactggaggcggcagcttcagccctgaggaggtgcgggagctgcgggaggccaccctgaaggaggtggacatcctgaggaaggtgtctggccaccccaacatcatccagctgaaggacacctatgagaccaacaccttcttcttcctggtgtttgacctgtgggaggacacagacaccatggagatggagcagaagtggtgcctgggctgggacagccccaagagcaccaacttccgggcccagggccgggccaggatgaagagaggagagctgtttgactacctgacagagaaggtgaccctgtctgagaaggagaccaggaagatcatgagggccctgctggaggtgatctgcaccctgcacaagctgaacatcgtgcaccgggacctgaagccagagaacatcctgctggatgacaacatgaacatcaagctgacagactttggcttcagctgccagctggagcctggagagcggctgcgggaggtgtgtggcacccccagctacctggcccctgagatcattgaatgttccatgaatgaagaccaccctggctacggcaaggaggtggacatgtggagcactggagtcatcatgtacaccctgctggccggcagcccccccttctggcacaggaagcagatgctgatgctgaggatgatcatgagcggcaactaccagtttggcagccctgagtgggatgactacagcgacacagtgaaggacctggtgagccgcttcctggtggtgcagccccagaaccgctacacagctgaggaggccctggcccaccccttcttccagcagtacctggtggaggaggtgcgccacttcagcccccggggcaagttcaaggtgattgccctgactgtgctggcctctgtgcgcatctactaccagtacagaagagtgaagcctgtgacccgggagatcgtcatccgggacccctatgccctgcggcccctgcggcggctgattgatgcctatgccttccgcatctacggccactgggtgaagaagggccagcagcagaacagagctgccctgtttgagaacacccccaaggctgtgctgctgagcctggccgaggaggactactag

SEQ ID NO: 164235 - DNA, 1002 bp, synthetic construct
  misc_feature 1..1002: note = Description of Artificial Sequence: Synthetic coding sequence
  source 1..1002: mol_type = other DNA
atgcacccccaggcccacgagcccggggtgagaagagagggccaccggcggcaccgctggaggcagctgcagcccggcggcggggccggggccgcccggagccacgccgagggcggcggccacccagcccagggcctgcgggccccccagcaccagatgaagagaggagagctgtttgactacctgacagagaaggtgaccctgtctgagaaggagaccaggaagatcatgagggccctgctggaggtgatctgcaccctgcacaagctgaacatcgtgcaccgggacctgaagccagagaacatcctgctggatgacaacatgaacatcaagctgacagactttggcttcagctgccagctggagcctggagagcggctgcgggaggtgtgtggcacccccagctacctggcccctgagatcattgaatgttccatgaatgaagaccaccctggctacggcaaggaggtggacatgtggagcactggagtcatcatgtacaccctgctggccggcagcccccccttctggcacaggaagcagatgctgatgctgaggatgatcatgagcggcaactaccagtttggcagccctgagtgggatgactacagcgacacagtgaaggacctggtgagccgcttcctggtggtgcagccccagaaccgctacacagctgaggaggccctggcccaccccttcttccagcagtacctggtggaggaggtgcgccacttcagcccccggggcaagttcaaggtgattgccctgactgtgctggcctctgtgcgcatctactaccagtacagaagagtgaagcctgtgacccgggagatcgtcatccgggacccctatgccctgcggcccctgcggcggctgattgatgcctatgccttccgcatctacggccactgggtgaagaagggccagcagcagaacagagctgccctgtttgagaacacccccaaggctgtgctgctgagcctggccgaggaggactactag

SEQ ID NO: 164236 - DNA, 2529 bp, synthetic construct
  misc_feature 1..2529: note = Description of Artificial Sequence: Synthetic coding sequence
  source 1..2529: mol_type = other DNA
atgagccggcccctgagtgaccaggagaagaggaagcagatctctgtgcggggcctggccggcgtggagaatgtgacagagctgaagaagaacttcaacagacacctgcacttcaccctggtgaaggacagaaatgtggccaccccccgggactactactttgccctggcccacacagtgcgggaccacctggtgggccgctggatccgcacccagcagcactactatgagaaggaccccaagaggatctactacctgagcctggagttctacatgggccgcaccctgcagaacaccatggtgaacctggccctggagaatgcctgtgatgaggccacctaccagctgggcctggacatggaggagctggaggagattgaggaggatgctggcctgggcaatggaggcctgggccgcctggccgcctgcttcctggacagcatggccaccctgggcctggccgcctacggctacggcatccgctatgaatttggcatcttcaaccagaagatcagcggcggctggcagatggaggaggctgatgactggctgcgctatggcaacccctgggagaaggcccggcctgagttcaccctgcctgtgcacttctacggccacgtggagcacaccagccagggcgccaagtgggtggacacccaggtggtgctggccatgccctatgacacccctgtgcccggctacagaaataatgtggtgaacaccatgaggctgtggagcgccaaggccccaaatgacttcaacctgaaggacttcaacgtgggcggctacatccaggccgtgctggacaggaacctggccgagaacatcagccgggtgctgtacccaaatgacaacttctttgagggcaaggagctgcggctgaagcaggagtactttgtggtggccgccaccctgcaggacatcatccgccgcttcaagagcagcaagtttggctgccgggaccctgtgaggaccaactttgatgccttcccagacaaggtggccatccagctgaatgacacccaccccagcctggccatccctgagctgatgaggatcctggtggacctggagaggatggactgggacaaggcctgggatgtgacagtgaggacctgtgcctacaccaaccacacagtgctgcctgaggccctggagcgctggcctgtgcacctgctggagaccctgctgcccaggcacctgcagatcatctatgagatcaaccagcgcttcctgaacagagtggccgccgccttccctggagatgtggaccggctgcggaggatgagcctggtggaggagggcgctgtgaagaggatcaacatggcccacctgtgcatcgccggcagccatgctgtgaatggagtggcccgcatccacagcgagatcctgaagaagaccatcttcaaggacttctatgagctggagccccacaagttccagaacaagaccaacggcatcaccccccggcgctggctggtgctgtgcaaccctggcctggccgaggtgattgctgagcgcatcggggaggacttcatcagtgacctggaccagctgaggaagctgctgagctttgtggatgatgaggccttcatcagagatgtggccaaggtgaagcaggagaacaagctgaagtttgctgcctacctggagcgggagtacaaggtgcacatcaaccccaacagcctgtttgacatccaggtgaagaggatccacgagtacaagaggcagctgctgaactgcctgcacgtgatcaccctgtacaaccgcatcaagcgggagcccaacaagttctttgtgcccaggacagtgatgattggaggcaaggccgcccctggctaccacatggccaagatgatcatccggctggtgacagccatcggagatgtggtgaaccacgaccctgctgtgggggaccggctgcgggtcatcttcctggagaactacagagtgtccctggccgagaaggtgatcccagctgctgacctgtctgagcagatcagcacagctggaacagaggccagcggcactggaaacatgaagttcatgctgaatggagccctgaccatcggcaccatggatggagccaacgtggagatggccgaggaggccggggaggagaacttcttcatcttcggcatgagggtggaggatgtggacaagctggaccagaggggctacaatgcccaggagtactatgaccgcatccctgagctgcggcaggtgattgagcagctgagcagcggcttcttcagccccaagcagcctgacctcttcaaggacatcgtgaacatgctgatgcaccacgaccgcttcaaggtgtttgctgactatgaggactacatcaagtgccaggagaaggtgtctgccctgtacaagaacccccgggagtggaccaggatggtgatccggaacatcgccaccagcggcaagttcagcagtgacaggaccatcgcccagtatgcccgggagatctggggcgtggagcccagccggcagaggctgcctgccccagatgaggccatctag

SEQ ID NO: 164237 - DNA, 2499 bp, synthetic construct
  misc_feature 1..2499: note = Description of Artificial Sequence: Synthetic coding sequence
  source 1..2499: mol_type = other DNA
atgagccggcccctgagtgaccaggagaagaggaagcagatctctgtgcggggcctggccggcgtggagaatgtgacagagctgaagaagaacttcaacagacacctgcacttcaccctggtgaaggacagaaatgtggccaccccccgggactactactttgccctggcccacacagtgcgggaccacctggtgggccgctggatccgcacccagcagcactactatgagaaggaccccaagaggatctactacctgagcctggagttctacatgggccgcaccctgcagaacaccatggtgaacctggccctggagaatgcctgtgatgaggccacctaccaggtgggcctgggccgcctggccgcctgcttcctggacagcatggccaccctgggcctggccgcctacggctacggcatccgctatgaatttggcatcttcaaccagaagatcagcggcggctggcagatggaggaggctgatgactggctgcgctatggcaacccctgggagaaggcccggcctgagttcaccctgcctgtgcacttctacggccacgtggagcacaccagccagggcgccaagtgggtggacacccaggtggtgctggccatgccctatgacacccctgtgcccggctacagaaacaacgtggtgaacaccatgaggctgtggagcgccaaggccccaaatgacttcaacctgaaggacttcaacgtgggcggctacatccaggccgtgctggacaggaacctggccgagaacatcagccgggtgctgtacccaaatgacaacttctttgagggcaaggagctgcggctgaagcaggagtactttgtggtggccgccaccctgcaggacatcatccgccgcttcaagagcagcaagtttggctgccgggaccctgtgaggaccaactttgatgccttcccagacaaggtggccatccagctgaatgacacccaccccagcctggccatccctgagctgatgaggatcctggtggacctggagaggatggactgggacaaggcctgggatgtgacagtgaggacctgtgcctacaccaaccacacagtgctgcctgaggccctggagcgctggcctgtgcacctgctggagaccctgctgcccaggcacctgcagatcatctatgagatcaaccagcgcttcctgaacagagtggccgccgccttccctggagatgtggaccggctgcggaggatgagcctggtggaggagggcgctgtgaagaggatcaacatggcccacctgtgcatcgccggcagccatgctgtgaatggagtggcccgcatccacagcgagatcctgaagaagaccatcttcaaggacttctatgagctggagccccacaagttccagaacaagaccaacggcatcaccccccggcgctggctggtgctgtgcaaccctggcctggccgaggtgattgctgagagaattggagaggacttcatcagtgacctggaccagctgaggaagctgctgagctttgtggatgatgaggccttcatcagagatgtggccaaggtgaagcaggagaacaagctgaagtttgctgcctacctggagcgggagtacaaggtgcacatcaaccccaacagcctgtttgacatccaggtgaagagaattcatgagtacaagaggcagctgctgaactgcctgcacgtgatcaccctgtacaaccgcatcaagcgggagcccaacaagttctttgtgcccaggacagtgatgattggaggcaaggccgcccctggctaccacatggccaagatgatcatccggctggtgacagccatcggagatgtggtgaaccacgaccctgctgtgggggaccggctgcgggtcatcttcctggagaactacagagtgtccctggccgagaaggtgatcccagctgctgacctgtctgagcagatcagcacagctggaacagaggccagcggcaccggcaacatgaagttcatgctgaatggagccctgaccatcggcaccatggatggagccaacgtggagatggccgaggaggccggggaggagaacttcttcatcttcggcatgagggtggaggatgtggacaagctggaccagaggggctacaatgcccaggagtactatgaccgcatccctgagctgcggcaggtgattgagcagctgagcagcggcttcttcagccccaagcagcctgacctcttcaaggacatcgtgaacatgctgatgcaccacgaccgcttcaaggtgtttgctgactatgaggactacatcaagtgccaggagaaggtgtctgccctgtacaagaacccccgggagtggaccaggatggtgatcagaaatattgccaccagcggcaagttcagcagtgacaggaccatcgcccagtatgcccgggagatctggggcgtggagcccagccggcagaggctgcctgccccagcccctcatgctgagggcggcgtgctggagctggacctgtag

SEQ ID NO: 164238 - DNA, 1425 bp, synthetic construct
  misc_feature 1..1425: note = Description of Artificial Sequence: Synthetic coding sequence
  source 1..1425: mol_type = other DNA
atggccaccaactggggcagcctgctgcaggacaagcagcagctggaggagctggcccggcaggccgtggaccgggccctggccgagggcgtgctgctgcggaccagccaggagcccaccagcagcgaggtggtgtcctatgcccccttcaccctcttccccagcctggtgcccagcgccctgctggagcaggcctatgctgtgcagatggacttcaacctgctggtggatgctgtgtcccagaatgctgccttcctggagcagaccctgagcagcaccatcaagcaggatgacttcaccgcccggctgtttgacatccacaagcaggtgctgaaggagggcatcgcccagaccgtcttcctgggcctgaacagaagtgactacatgttccagaggtctgcagatggcagccctgccctgaagcagatcgagatcaacaccatcagcgccagctttggaggcctggccagcaggaccccagctgtgcacagacatgtgctgtctgtgctgagcaagaccaaggaggccggcaagatcctgagcaacaaccccagcaagggcctggccctgggcatcgccaaggcctgggagctgtatggcagccccaatgccctggtgctgctgattgcccaggagaaggagaggaacatctttgaccagagggccattgaaaatgagctgctggccaggaacatccacgtgatccggaggacctttgaggacatcagcgagaagggcagcctggaccaggaccggcggctgtttgtggatggccaggagattgctgtggtgtacttcagagatggctacatgccccggcagtacagcctgcagaactgggaggcccggctgctgctggagaggagccatgctgccaagtgcccagacatcgccacccagctggccggcaccaagaaggtgcagcaggagctgagccggcccggcatgctggagatgctgctgcccggccagcctgaggccgtggcccggctgcgggccacctttgctggcctgtacagcctggatgtgggggaggagggggaccaggccatcgccgaggccctggccgcccccagcagatttgtgctgaagccccagcgggagggcggcggcaacaacctgtatggagaggagatggtgcaggccctgaagcagctgaaggacagcgaggagcgggccagctacatcctgatggagaagattgagcctgagccctttgagaactgcctgctgcggcccggcagccctgcccgggtggtgcagtgcatcagcgagctgggcatctttggagtgtatgtgcggcaggagaagaccctggtgatgaacaagcacgtgggccacctgctgcggaccaaggccatcgagcacgcagatggcggcgtggccgccggcgtggccgtgctggacaacccctaccctgtgtag

SEQ ID NO: 164239 - DNA, 738 bp, synthetic construct
  misc_feature 1..738: note = Description of Artificial Sequence: Synthetic coding sequence
  source 1..738: mol_type = other DNA
tgaaagcaccaccacacagtgccccccagcgtgacccccaaggccctggacaggagccccccctgcccagagatgttcaccagggctgcccctggctaccacatggccaagctgatcatcaagctggtgaccagcattggagatgtggtgaaccacgaccctgtggtgggggaccggctgaaggtgatcttcctggagaactacagagtgtccctggccgagaaggtgatcccagctgctgacctgagccagcagatcagcacagctggaacagaggccagcggcaccggcaacatgaagttcatgctgaatggagccctgaccatcggcaccatggatggagccaacgtggagatggccgaggaggccggggctgagaacctcttcatcttcggcctgcgggtggaggatgtggaggccctggacaggaagggctacaatgcccgggagtactatgaccacctgcctgagctgaagcaggccgtggaccagatcagcagcggcttcttcagccccaaggagccagactgcttcaaggacatcgtgaacatgctgatgcaccacgaccgcttcaaggtgtttgctgactatgaggcctacatgcagtgccaggcccaggtggaccagctgtacagaaaccccaaggagtggaccaagaaggtgatcagaaatattgcctgcagcggcaagttcagcagtgacaggaccatcacagaatatgcccgggagatctggtag

SEQ ID NO: 164240 - DNA, 975 bp, synthetic construct
  misc_feature 1..975: note = Description of Artificial Sequence: Synthetic coding sequence
  source 1..975: mol_type = other DNA
atggatgccccccggcaggtggtgaactttggacctggccctgccaagctgccccacagcgtgctgctggagatccagaaggagctgctggactacaagggcgtgggcatctctgtgctggagatgagccacaggagcagtgactttgccaagatcatcaacaacacagagaacctggtgcgggagctgctggccgtgcctgacaactacaaggtgatcttcctgcagggcggcggctgcggccagttctctgctgtgcccctgaacctgattggcctgaaggccggccgctgtgccgactatgtggtgactggagcctggagcgccaaggctgctgaggaggccaagaagtttggcaccatcaacatcgtgcaccccaagctgggcagctacaccaagatcccagaccccagcacctggaacctgaacccagatgccagctatgtgtactactgtgccaatgagaccgtgcacggcgtggagtttgacttcatcccagatgtgaagggagctgtgctggtgtgtgacatgagcagcaacttcctgagcaagcctgtggatgtgtccaagtttggagtcatctttgctggggcccagaagaatgtgggcagcgctggggtgacagtggtgattgtgagagatgacctgctgggctttgccctgagagaatgtcccagcgtgctggagtacaaggtgcaggccggcaacagcagcctgtacaacaccccaccctgcttcagcatctacgtgatgggcctggtgctggagtggatcaagaacaatggaggagctgctgccatggagaagctgagcagcatcaagagccagaccatctatgagatcatcgacaacagccagggcttctacgtgtctgtgggcggcatccgggccagcctgtacaatgctgtgaccattgaagatgtgcagaagctggccgccttcatgaagaagttcctggagatgcaccagctgtag

SEQ ID NO: 164241 - DNA, 1113 bp, synthetic construct
  misc_feature 1..1113: note = Description of Artificial Sequence: Synthetic coding sequence
  source 1..1113: mol_type = other DNA
atggatgccccccggcaggtggtgaactttggacctggccctgccaagctgccccacagcgtgctgctggagatccagaaggagctgctggactacaagggcgtgggcatctctgtgctggagatgagccacaggagcagtgactttgccaagatcatcaacaacacagagaacctggtgcgggagctgctggccgtgcctgacaactacaaggtgatcttcctgcagggcggcggctgcggccagttctctgctgtgcccctgaacctgattggcctgaaggccggccgctgtgccgactatgtggtgactggagcctggagcgccaaggctgctgaggaggccaagaagtttggcaccatcaacatcgtgcaccccaagctgggcagctacaccaagatcccagaccccagcacctggaacctgaacccagatgccagctatgtgtactactgtgccaatgagaccgtgcacggcgtggagtttgacttcatcccagatgtgaagggagctgtgctggtgtgtgacatgagcagcaacttcctgagcaagcctgtggatgtgtccaagtttggagtcatctttgctggggcccagaagaatgtgggcagcgctggggtgacagtggtgattgtgagagatgacctgctgggctttgccctgagagaatgtcccagcgtgctggagtacaaggtgcaggccggcaacagcagcctgtacaacaccccaccctgcttcagcatctacgtgatgggcctggtgctggagtggatcaagaacaatggaggagctgctgccatggagaagctgagcagcatcaagagccagaccatctatgagatcatcgacaacagccagggcttctacgtgtgccctgtggagccccagaacagaagcaagatgaacatccccttcagaattggaaatgccaagggagatgatgccctggagaagcgcttcctggacaaggccctggagctgaacatgctgagcctgaagggccacaggtctgtgggcggcatccgggccagcctgtacaatgctgtgaccattgaagatgtgcagaagctggccgccttcatgaagaagttcctggagatgcaccagctgtag

SEQ ID NO: 164242 - DNA, 585 bp, synthetic construct
  misc_feature 1..585: note = Description of Artificial Sequence: Synthetic coding sequence
  source 1..585: mol_type = other DNA
atgagcagcaacttcctgagcaagcctgtggatgtgtccaagtttggagtcatctttgctggggcccagaagaatgtgggcagcgctggggtgacagtggtgattgtgagagatgacctgctgggctttgccctgagagaatgtcccagcgtgctggagtacaaggtgcaggccggcaacagcagcctgtacaacaccccaccctgcttcagcatctacgtgatgggcctggtgctggagtggatcaagaacaatggaggagctgctgccatggagaagctgagcagcatcaagagccagaccatctatgagatcatcgacaacagccagggcttctacgtgtgccctgtggagccccagaacagaagcaagatgaacatccccttcagaattggaaatgccaagggagatgatgccctggagaagcgcttcctggacaaggccctggagctgaacatgctgagcctgaagggccacaggtctgtgggcggcatccgggccagcctgtacaatgctgtgaccattgaagatgtgcagaagctggccgccttcatgaagaagttcctggagatgcaccagctgtag

SEQ ID NO: 164243 - DNA, 1050 bp, synthetic construct
  misc_feature 1..1050: note = Description of Artificial Sequence: Synthetic coding sequence
  source 1..1050: mol_type = other DNA
atgagcagcctgagcggcaaggtgcagacagtgctgggcctggtggagcccagcaagctgggccgcaccctgacccatgagcacctggccatgacctttgactgctgctactgccccccaccaccctgccaggaggccatcagcaaggagcccatcgtgatgaagaacctgtactggatccagaagaatgcctacagccacaaggagaacctgcagctgaaccaggagacagaggccatcaaggaggagctgctgtacttcaaggccaacggcggcggggccctggtggagaacaccaccaccggcatcagccgggacacccagaccctgaagaggctggccgaggagactggagtgcacatcatctctggagctggcttctacgtggatgccacccacagcagcgagacccgggccatgtctgtggagcagctgacagatgtgctgatgaatgagatcctgcatggagcagatggcaccagcatcaagtgtggcatcattggagagatcggctgctcctggcccctgacagaaagtgagaggaaggtgctgcaggccacagcccacgcccaggcccagctgggctgccctgtgatcatccaccctggccgcagcagccgggcccccttccagatcatccgcatcctgcaggaggccggggctgacatcagcaagacagtgatgagccacctggacaggaccatcctggacaagaaggagctgctggagtttgcccagctgggctgctacctggagtatgacctgtttggaacagagctgctgcactaccagctgggccctgacatcgacatgccagatgacaacaagaggatcagaagagtgcggctgctggtggaggagggctgtgaggaccgcatcctggtggcccatgacatccacaccaagacccggctgatgaagtatggaggccacggctacagccacatcctgaccaacgtggtgcccaagatgctgctgcggggcatcacagaaaatgtgctggacaagatcctgattgagaaccccaagcagtggctgaccttcaagtag

SEQ ID NO: 164244 - DNA, 1050 bp, synthetic construct; identical to SEQ ID NO: 164243
  misc_feature 1..1050: note = Description of Artificial Sequence: Synthetic coding sequence
  source 1..1050: mol_type = other DNA

SEQ ID NO: 164245 - DNA, 1050 bp, synthetic construct; identical to SEQ ID NO: 164243
  misc_feature 1..1050: note = Description of Artificial Sequence: Synthetic coding sequence
  source 1..1050: mol_type = other DNA

SEQ ID NO: 164246 - DNA, 909 bp, synthetic construct
  misc_feature 1..909: note = Description of Artificial Sequence: Synthetic coding sequence
  source 1..909: mol_type = other DNA
atgagcagcctgagcggcaaggtgcagacagtgctgggcctggtggagcccagcaagctgggccgcaccctgacccatgagcacctggccatgacctttgactgctgctactgccccccaccaccctgccaggaggccatcagcaaggagcccatcgtgatgaagaacctgtactggatccagaagaatgcctacagccacaaggagaacctgcagctgaaccaggagacagaggccatcaaggaggagctgctgtacttcaaggccaacggcggcggggccctggtggagaacaccaccaccggcatcagccgggacacccagaccctgaagaggctggccgaggagactggagtgcacatcatctctggagctggcttctacgtggatgccacccacagcagcgagacccgggccatgtctgtggagcagctgacagatgtgctgatgaatgagatcctgcatggagcagatggcaccagcatcaagtgtggcatcattggagagatcggctgctcctggcccctgacagaaagtgagaggaaggtgctgcaggccacagcccacgcccaggcccagctgggctgccctgtgatcatccaccctggccgcagcagccgggcccccttccagatcatccgcatcctgcaggaggccggggctgacatcagcaagacagtgatgagccacctggacagagtgcggctgctggtggaggagggctgtgaagatcgcatcctggtggcccatgacatccacaccaagacccggctgatgaagtatggaggccacggctacagccacatcctgaccaacgtggtgcccaagatgctgctgcggggcatcacagaaaatgtgctggacaagatcctgattgagaaccccaagcagtggctgaccttcaagtag

SEQ ID NO: 164247 - DNA, 1050 bp, synthetic construct; identical to SEQ ID NO: 164243
  misc_feature 1..1050: note = Description of Artificial Sequence: Synthetic coding sequence
  source 1..1050: mol_type = other DNA

SEQ ID NO: 164248 - DNA, 753 bp, synthetic construct
  misc_feature 1..753: note = Description of Artificial Sequence: Synthetic coding sequence
  source 1..753: mol_type = other DNA
atgttcagcctgcccctgagcctgcccctgtgtgaggacacagccttcctgcccagcaagtgctgcagcagccacaagaccatcaagcaggcccggaccctcatcatgatcttcctggccagcggcacccacttccagaccatgctgaagagcaagctgaatgtgctgaccctgaagaaggagcccctgcctgctgtgatcttccacgagcctgaggccatcgagctgtgcaccaccacccccctgatgaagaccaggacccacagcggctgcaaggtgacctacctgggcaaggtgtccaccaccggcatgcagttcctgagcggctgcacagagaagcctgtgattgagctgtggaagaagcacaccctggccagagaagatgtgtttcctgccaatgccctgctggagatccggcccttccaggtgtggctgcaccacctggaccacaagggggaggccaccgtgcacatggacaccttccaggtggcccgcatcgcctactgcacagctgaccacaacgtgagccccaacatctttgcctgggtgtaccgggagatcaatgatgacctgagctaccagatggactgccacgctgtggagtgtgagagcaagctggaggccaagaagctggcccacgccatgatggaggccttcaggaagaccttccacagcatgaagagtgatggccgcatccacagcaacagcagcagcgaggaggtgtcccaggagctggagagtgatgatggatag

SEQ ID NO: 164249 - DNA, 747 bp, synthetic construct
  misc_feature 1..747: note = Description of Artificial Sequence: Synthetic coding sequence
  source 1..747: mol_type = other DNA
atgcccagaattgctggcaaccacctgatgctggaggagagcaggacctgcagcagccctgagctgctggatggagtgtggccctgccagcccctgcacttcggcctgcctgccagcgagatgcacttccagaccatgctgaagagcaagctgaatgtgctgaccctgaagaaggagcccctgcctgctgtgatcttccacgagcctgaggccatcgagctgtgcaccaccacccccctgatgaagaccaggacccacagcggctgcaaggtgacctacctgggcaaggtgtccaccaccggcatgcagttcctgagcggctgcacagagaagcctgtgattgagctgtggaagaagcacaccctggccagagaagatgtgtttcctgccaatgccctgctggagatccggcccttccaggtgtggctgcaccacctggaccacaagggggaggccaccgtgcacatggacaccttccaggtggcccgcatcgcctactgcacagctgaccacaacgtgagccccaacatctttgcctgggtgtaccgggagatcaatgatgacctgagctaccagatggactgccacgctgtggagtgtgagagcaagctggaggccaagaagctggcccacgccatgatggaggccttcaggaagaccttccacagcatgaagagtgatggccgcatccacagcaacagcagcagcgaggaggtgtcccaggagctggagagtgatgatggatag

SEQ ID NO: 164250 - DNA, 654 bp, synthetic construct
  misc_feature 1..654: note = Description of Artificial Sequence: Synthetic coding sequence
  source 1..654: mol_type = other DNA
atgtggcagcctgccacagagcggctgcagcacttccagaccatgctgaagagcaagctgaatgtgctgaccctgaagaaggagcccctgcctgctgtgatcttccacgagcctgaggccatcgagctgtgcaccaccacccccctgatgaagaccaggacccacagcggctgcaaggtgacctacctgggcaaggtgtccaccaccggcatgcagttcctgagcggctgcacagagaagcctgtgattgagctgtggaagaagcacaccctggcccgggaggatgtgtttcctgccaatgccctgctggagatccggcccttccaggtgtggctgcaccacctggaccacaagggggaggccaccgtgcacatggacaccttccaggtggccagaattgcctactgcacagctgaccacaacgtgagccccaacatctttgcctgggtgtaccgggagatcaatgatgacctgagctaccagatggactgccacgctgtggagtgtgagagcaagctggaggccaagaagctggcccacgccatgatggaggccttcaggaagaccttccacagcatgaagagtgatggccgcatccacagcaacagcagcagcgaggaggtgtcccaggagctggagagtgatgatggatag

SEQ ID NO: 164251 - DNA, 507 bp, synthetic construct
  misc_feature 1..507: note = Description of Artificial Sequence: Synthetic coding sequence
  source 1..507: mol_type = other DNA
atgtggcagcctgccacagagcggctgcaggtgacctacctgggcaaggtgtccaccaccggcatgcagttcctgagcggctgcacagagaagcctgtgattgagctgtggaagaagcacaccctggccagagaagatgtgtttcctgccaatgccctgctggagatccggcccttccaggtgtggctgcaccacctggaccacaagggggaggccaccgtgcacatggacaccttccaggtggcccgcatcgcctactgcacagctgaccacaacgtgagccccaacatctttgcctgggtgtaccgggagatcaatgatgacctgagctaccagatggactgccacgctgtggagtgtgagagcaagctggaggccaagaagctggcccacgccatgatggaggccttcaggaagaccttccacagcatgaagagtgatggccgcatccacagcaacagcagcagcgaggaggtgtcccaggagctggagagtgatgatggatag

SEQ ID NO: 164252 - DNA, 753 bp, synthetic construct; identical to SEQ ID NO: 164248
  misc_feature 1..753: note = Description of Artificial Sequence: Synthetic coding sequence
  source 1..753: mol_type = other DNA

SEQ ID NO: 164253 - DNA, 1017 bp, synthetic construct
  misc_feature 1..1017: note = Description of Artificial Sequence: Synthetic coding sequence
  source 1..1017: mol_type = other DNA
atggagcagctgcgggctgctgcccggctgcagatcgtgctgggccacctgggccggcccagcgctggagctgtggtggcccaccccaccagcggcaccatcagcagcgccagcttccacccccagcagttccagtacaccctggacaacaacgtgctgaccctggagcagaggaagttctatgaagaaaatggcttcctggtgatcaagaacctggtgcctgatgctgacatccagcgcttcagaaatgaatttgagaagatctgcaggaaggaggtgaagcccctgggcctgactgtgatgagagatgtgaccatcagcaagtcagaatatgcccccagcgagaagatgatcaccaaggtgcaggacttccaggaggacaaggagctgttccgctactgcaccctgcctgagatcctgaagtatgtggagtgcttcaccggccccaacatcatggccatgcacaccatgctgatcaacaagcccccagattctgggaagaagaccagccgccaccccctgcaccaggacctgcactacttccccttccggcccagcgacctgattgtgtgtgcctggacagccatggagcacatcagcagaaataatggctgcctggtggtgctgcccggcacccacaagggcagcctgaagccccatgactaccccaagtgggagggcggcgtgaacaagatgttccacggcatccaggactatgaggagaacaaggcccgggtgcacctggtgatggagaagggggacacagtgttcttccaccccctgctgatccacggcagcggccagaacaagacccagggcttcaggaaggccatcagctgccactttgccagcgctgactgccactacattgatgtgaagggcaccagccaggagaacatcgagaaggaggtggtgggcatcgcccacaagttcttcggggctgaaaattctgtgaacctgaaggacatctggatgttccgggcccggctggtgaagggggagaggaccaacctgtag

SEQ ID NO: 164254 - DNA, 717 bp, synthetic construct
  misc_feature 1..717: note = Description of Artificial Sequence: Synthetic coding sequence
  source 1..717: mol_type = other DNA
atgagagatgtgaccatcagcaagtcagaatatgcccccagcgagaagatgatcaccaaggtgcaggacttccaggaggacaaggagctgttccgctactgcaccctgcctgagatcctgaagtatgtggagtgcttcaccggccccaacatcatggccatgcacaccatgctgatcaacaagcccccagattctgggaagaagaccagccgccaccccctgcaccaggacctgcactacttccccttccggcccagcgacctgattgtgtgtgcctggacagccatggagcacatcagcagaaataatggctgcctggtggtgctgcccggcacccacaagggcagcctgaagccccatgactaccccaagtgggagggcggcgtgaacaagatgttccacggcatccaggactatgaggagaacaaggcccgggtgcacctggtgatggagaagggggacacagtgttcttccaccccctgctgatccacggcagcggccagaacaagacccagggcttcaggaaggccatcagctgccactttgccagcgctgactgccactacattgatgtgaagggcaccagccaggagaacatcgagaaggaggtggtgggcatcgcccacaagttcttcggggctgaaaattctgtgaacctgaaggacatctggatgttccgggcccggctggtgaagggggagaggaccaacctgtag

SEQ ID NO: 164255 - DNA, 15429 bp, synthetic construct
  misc_feature 1..15429: note = Description of Artificial Sequence: Synthetic coding sequence
  source 1..15429: mol_type = other DNA
atgggaaatgaggccagcctggagggggagggcctgcctgagggcctggccgctgctgctgctgctgggggcggggccagcggggccggcagccccagccacacagccatcccagctggcatggaggccgacctgagccagctgtctgaggaggagcggcggcagattgctgctgtgatgagccgggcccagggcctgcccaagggctctgtgcccccagctgctgctgagagccccagcatgcacaggaagcaggagctggacagcagccacccccccaagcagagcggccggcccccagaccccggccgcccagcccagcccggcctgagcaagagcaggaccacagacaccttccgctctgagcagaagctgcccggccgcagccccagcaccatcagcctgaaggagagcaagagcaggacagacctgaaggaggagcacaagagctccatgatgcctggcttcctgtctgaggtgaatgccctgtctgctgtgtcctctgtggtgaacaagttcaacccctttgacctgatcagtgacagcgaggccagccaggaggagaccaccaagaagcagaaggtggtgcagaaggagcagggcaagccagagggcatcatcaagccacccctgcagcagcagccccccaagcccatccccaagcagcagggccctggccgggaccccctgcagcaggacggcacccccaagagcatcagcagccagcagcctgagaagatcaagagccagcccccaggcaccgggaagcccatccagggccccacccagaccccccagacagaccacgccaagctgcccctgcagagagatgccagccggccccagaccaagcaggccgacatcgtgcggggggagagcgtgaagcccagcctgcccagccccagcaagccacccatccagcagcccaccccaggcaagcccccagcccagcagcccggccacgagaagagccagcccggccctgccaagcccccagcccagcccagcggcctgaccaagcccctggcccagcagcccggcaccgtgaagccccctgtgcagcccccaggcaccaccaagcccccagcccagcccctgggccctgccaagcccccagcccagcagacaggcagcgagaagcccagcagcgagcagcccggccccaaggccctggcccagcccccaggagtgggcaagaccccagcccagcagcccggccctgccaagccacccacccagcaggtgggcacccccaagcccctggcccagcagcccggcctgcagagccctgccaaggcccctggccccaccaagacccctgtgcagcagcccggccctgggaagatcccagcccagcaggccggccctgggaagaccagcgcccagcagacaggccccaccaagccacccagccagctgcccggccctgccaagcccccaccccagcagcccggccctgccaagcccccaccccagcagcccggcagcgccaagccacccagccagcagcccggcagcaccaagcccccaccccagcagcccggccctgccaagcccagcccccagcagcccggcagcaccaagccacccagccagcagcccggcagcgccaagcccagcgcccagcagcccagccctgccaagcccagcgcccagcagagcaccaagcctgtgtcccagacaggcagcggcaagcccctgcagcccccaacagtgagccccagcgccaagcagccccccagccagggcctgcccaagaccatctgccccctgtgcaacaccacagagctgctgctgcacgtgcctgagaaggccaacttcaacacctgcacagagtgccagaccaccgtgtgcagcctgtgtggcttcaaccccaacccccacctgacagaggtgaaggagtggctgtgcctgaactgccagatgaagagggccctgggcggggacctggcccctgtgcccagcagcccccagcccaagctgaagacagcccctgtgaccaccaccagcgctgtgtccaagagcagcccccagccccagcagaccagccccaagaaggatgctgcccccaagcaggacctgagcaaggcccctgagcccaagaagcccccacccctggtgaagcagcccaccctgcacggcagccccagcgccaaggccaagcagcccccagaggccgacagcctgagcaagccagccccacccaaggagcccagcgtgcccagcgagcaggacaaggcccctgtggctgatgacaagcccaagcagcccaagatggtgaagcccaccacagacctggtgagcagcagcagcgccaccaccaagccagacatccccagcagcaaggtgcagagccaggccgaggagaagaccaccccacccctgaagacagattctgccaagcccagccagagcttccccccaactggagagaaggtgagcccctttgacagcaaggccatccccaggcctgccagtgacagcaagatcatcagccaccctggccccagcagcgagagcaagggccagaagcaggtggaccctgtgcagaagaaggaggagcccaagaaggcccagaccaagatgagccccaagccagatgccaagcccatgcccaagggcagccccaccccacctggcccccggcccacagctggccagacagtgcccaccccccagcagagccccaagccccaggagcagagccgccgcttcagcctgaacctgggcagcatcacagatgcccccaagagccagcccaccaccccccaggagaccgtgacaggcaagctgtttggatttggagccagcatcttcagccaggccagcaacctgatcagcacagctggccagcccggcccccacagccagagcggccctggggcccccatgaagcaggccccagcccccagccagccccccaccagccagggcccccccaagagcacaggccaggcccccccagccccagccaagagcatccctgtgaagaaggagaccaaggccccagctgctgagaagctggagcccaaggccgagcaggcccccaccgtgaagaggacagaaacagagaagaagcccccacccatcaaggacagcaagagcctgacagctgagccccagaaggctgtgctgcccaccaagctggagaagagccccaagccagagagcacctgccccctgtgcaagacagagctgaacatcggcagcaaggacccccccaacttcaacacctgcacagagtgcaagaaccaggtgtgcaacctgtgtggcttcaaccccaccccccacctgacagagatccaggagtggctgtgcctgaactgccagacccagagggccatcagcggccagctgggggacatcaggaagatgcccccagcccccagcggccccaaggccagccccatgcctgtgcccacagagagcagcagccagaagacagctgtgcccccccaggtgaagctggtgaagaagcaggagcaggaggtgaagacagaggccgagaaggtgatcctggagaaggtgaaggagaccctgtccatggagaagatcccccccatggtgaccacagaccagaagcaggaggagagcaagctggagaaggacaaggccagcgccctgcaggagaagaagcccctgcctgaggagaagaagctgatccctgaggaggagaagatccgctctgaggagaagaagcccctgctggaggagaagaagcccaccccagaggacaagaagctgctgcctgaggccaagaccagcgcccctgaggagcagaagcatgacctgctgaagagccaggtgcagattgctgaggagaagctggagggccgggtggcccccaagacagtgcaggagggcaagcagccccagaccaagatggagggcctgcccagcggcaccccccagagcctgcccaaggaggatgacaagaccaccaagaccatcaaggagcagccccagcccccctgcacagccaagccagaccaggtggagcccgggaaggagaagacagagaaggaggatgacaagagtgacaccagcagcagccagcagcccaagagcccccagggcctgagtgacaccggctacagcagtgatggcatcagcagcagcctgggggagatccccagcctcatccccacagatgagaaggacatcctgaagggcctgaagaaggacagcttcagccaggagagcagccccagcagccccagcgacctggccaagctggagagcacagtgctgagcatcctggaggcccaggccagcaccctggctgatgagaagtctgagaagaagacccagccccatgaggtgtccccagagcagcccaaggaccaggagaagacccagagcctgtctgagaccctggagatcaccatcagcgaggaggagatcaaggagagccaggaggagaggaaggacaccttcaagaaggacagccagcaggacatccccagcagcaaggaccacaaggagaagtcagaatttgtggatgacatcaccacccggcgggagccctatgacagcgtggaggagagcagcgagagcgagaacagccctgtgccccagaggaagaggaggacctctgtgggcagcagcagcagtgatgagtacaagcaggaggacagccagggcagcggggaggaggaggacttcatcaggaagcagatcatcgagatgtctgcagatgaagatgccagcggctctgaagatgatgagttcatccggaaccagctgaaggagatcagcagcagcacagagagccagaagaaggaggagaccaagggcaagggcaagatcacagctgggaagcaccggcggctgaccaggaagagcagcaccagcattgatgaagatgctggaagaagacacagctggcatgatgaagatgatgaggcctttgatgagagccctgagctgaagtaccgggagaccaagagccaggagagcgaggagctggtggtgactggaggcggcggcctgcggcgcttcaagaccatcgagctgaacagcaccatcgctgacaagtacagcgctgagagcagccagaagaagaccagcctgtactttgatgaggagcctgagctggagatggagagcctgacagacagcccagaagatagaagcagaggagagggcagcagcagcctgcacgccagcagcttcaccccaggcaccagccccacctctgtgagcagcctggatgaagattctgacagcagccccagccacaagaagggggagagcaagcagcagaggaaggcccggcaccggccccacggccccctgctgcccaccatcgaggacagcagcgaggaggaggagctgcgggaggaggaggagctgctgaaggagcaggagaagcagcgggagattgagcagcagcagaggaagagcagcagcaagaagagcaagaaggacaaggatgagctgcgggcccagaggagaagagagcggcccaagaccccacccagcaacctgagccccattgaagatgccagccccacagaggagctgcggcaggccgctgagatggaggagctgcacaggagcagctgcagcgagtacagccccagcattgaaagtgaccctgagggctttgagatcagccctgagaagatcatcgaggtgcagaaggtgtacaagctgcccacagctgtgtccctgtacagccccacagatgagcagagcatcatgcagaaggagggcagccagaaggccctgaagtctgctgaggagatgtatgaggagatgatgcacaagacccacaagtacaaggccttccctgctgccaatgaaagagatgaggtgtttgagaaggagcccctgtatggaggcatgctgattgaggactacatctatgagagcctggtggaggacacctacaacggctctgtggatggcagcctgctgacccggcaggaggaggagaatggcttcatgcagcagaagggccgggagcagaagatccggctgtctgagcagatctatgaggaccccatgcagaagatcacagacctgcagaaggagttctatgagctggagagcctgcacagcgtggtgccccaggaggacatcgtgagcagcagcttcatcatccctgagagccatgagatcgtggacctgggcaccatggtgaccagcacagaggaggagaggaagctgctggatgctgatgctgcctatgaggagctgatgaagaggcagcagatgcagctgaccccaggcagcagccccacccaggcccccatcggggaggacatgacagagagcaccatggactttgacaggatgccagatgccagcctgaccagctctgtgctgagcggggccagcctgacagacagcaccagcagcgccaccctgagcatcccagatgtgaagatcacccagcacttcagcacagaggagattgaagatgaatatgtgacagactacacccgggagatccaggagatcatcgcccacgagagcctcatcctgacctacagcgagcccagcgagagcgccacctctgtgcccccaagtgacacccccagcctgaccagctctgtgtcctctgtgtgcaccacagacagcagcagccccatcaccaccctggacagcatcaccaccgtgtacacagagcctgtggacatgatcaccaagtttgaagattctgaggagatcagcagcagcacctacttccctggcagcatcatcgactacccagaggagatctctgtgtccctggacagaacagcccccccagatggccgggccagcgctgaccacatcgtcatcagcctgagtgacatggccagcagcatcatcgagagcgtggtgcccaagccagagggccctgtggccgacacagtgtccacagacctgctgatcagcgagaaggaccctgtgaagaaggccaagaaggagactggaaatggcatcatcctggaggtgctggaggcctacagagacaagaaggagctggaggccgagaggaccaagagcagcctgtctgagaccgtgtttgaccacccccccagcagcgtcatcgccctgcccatgaaggagcagctgagcaccacctacttcaccagcggggagaccttcggccaggagaagccagccagccagctgcccagcggcagccccagcgtgagcagcctgcctgccaagccccggcccttcttccgcagcagcagcctggacatcagcgcccagcccccacctcctcctcctcctcctcctcctcctcctcctcctcctcctcctcctcctcctccacccctgcccccacccaccagccccaagcccaccatcctgcccaagaagaagctgactgtggccagccctgtgaccacagccacccccctgtttgatgctgtgaccaccctggagaccacagctgtgctgcggagcaatggcctgcctgtgacccgcatctgcaccacagcccctcctcctgtgccccccaagcccagcagcatccccagcggcctggtgttcacccacaggcctgagcccagcaagccacccatcgcccccaagcctgtgatcccccagctgcccaccaccacccagaagcccacagacatccaccccaagcccaccggcctgagcctgaccagctccatgaccctgaacctggtgaccagcgctgactacaagctgcccagccccaccagccccctgagcccccacagcaacaagagcagcccccgcttcagcaagagcctgacagagacctacgtggtgatcaccctgcccagcgagcccggcacccccacagacagcagcgccagccaggccatcacctcctggcccctgggcagccccagcaaggacctggtgtctgtggagcccgtcttctctgtggtgccccctgtgacagctgtggagatccccatcagcagcgagcagaccttctacatcagcggggccctgcagaccttcagcgccacccctgtgacagcccccagcagcttccaggccgcccccacctctgtgacccagttcctgaccacagaggtgtccaagacagaggtgtctgccaccaggagcacagcccccagcgtgggcctgagcagcatcagcatcaccatccccccagagcccctggccctggacaacatccacctggagaagccccagtacaaggaggatggcaagctgcagctggtgggagatgtgattgacctgaggacagtgcccaaggtggaggtgaagaccacagacaagtgcatcgacctgagcgccagcaccatggatgtgaagaggcagatcacagccaatgaggtgtatggcaagcagatctctgctgtgcagcccagcatcatcaacctgtctgtgaccagcagcatcgtgacccctgtgtccctggccacagagaccgtgacctttgtgacctgcacagccagcgccagctacaccaccggcacagagagcctggtgggcgctgagcacgccatgaccacccccctgcagctgaccaccagcaagcacgccgagcccccctaccgcatccccagcgaccaggtgttccccatcgcccgggaggaggcccccatcaacctgagcctgggcaccccagcccatgctgtgaccctggccatcaccaagcctgtgacagtgccccctgtgggcgtgaccaacggctggacagacagcacagtgtcccagggcatcacagatggagaggtggtggacctgagcaccaccaagagccacaggacagtggtgaccatggatgagagcaccagctctgtgatgaccaagatcattgaagatgagaagcctgtggacctgacagctggccggcgggctgtgtgctgtgatgtggtgtacaagctgcccttcggccgcagctgcacagcccagcagcctgccaccaccctgcctgaggacagatttggctacagagatgaccactaccagtatgacagaagtggcccctacggctaccggggcattggaggcatgaagcccagcatgtctgacaccaacctggccgaggccggccacttcttctacaagagcaagaatgcctttgactacagcgagggcacagacacagctgtggacctgaccagcggccgggtgaccaccggggaggtgatggactacagcagcaagaccaccggcccctacccagagacccggcaggtgatcagcggggccggcatcagcaccccccagtacagcacagccaggatgaccccacctcctggcccccagtactgtgtgggctctgtgctgcggagcagcaatggagtggtgtacagctctgtggccacccccacccccagcacctttgccatcaccacccagcccggcagcatcttcagcaccaccgtgcgggacctgagcggcatccacacagcagatgctgtgaccagcctgcctgccatgcaccacagccagcccatgcccaggagctacttcatcaccactggagccagcgagacagacattgctgtgactggaattgacatcagcgccagcctgcagaccatcaccatggagagcctgacagctgagaccatcgacagcgtgcccaccctgaccacagccagcgaggtgtttcctgaggtggtgggagatgaaagtgccctgctgattgtgcctgaggaggacaagcagcagcagcagctggacctggagcgggagctgctggagctggagaagatcaagcagcagagatttgctgaggagctggagtgggagcggcaggagatccagcgcttccgggagcaggagaagatcatggtgcagaagaagctggaggagctgcagagcatgaagcagcacctgctcttccagcaggaggaggagcggcaggcccagttcatgatgaggcaggagaccctggcccagcagcagctgcagctggagcagatccagcagctgcagcagcagctgcaccagcagctggaggagcagaagatccggcagatctaccagtacaactatgaccccagcggcacagccagcccccagaccaccacagagcaggccatcctggagggccagtatgctgccctggagggcagccagttctgggccacagaagatgccaccaccacagccagcgctgtggtggccatcgagatcccccagagccagggctggtacacagtgcagagtgatggagtgacccagtacatcgcccctcctggcatcctgagcacagtgtctgagatccccctgacagatgtggtggtgaaggaggagaagcagcccaagaagaggagcagcggggccaaggtgcggggccagtatgatgacatgggagagaacatgacagatgaccccaggagcttcaagaagatcgtggacagcggcgtgcagacagatgatgaagatgccacagacaggagctatgtgtccagaagaagaaggaccaagaagtctgtggacacctctgtgcagacagatgatgaggaccaggatgagtgggacatgcccaccaggagcaggaggaaggcccgggtgggcaagtatggagacagcatgacagaggccgacaagaccaagcccctgagcaaggtgagcagcattgctgtgcagacagtggccgagatctctgtgcagacagagcctgtgggcaccatccgcacccccagcatccgggcccgggtggatgccaaggtggagatcatcaagcacatcagcgcccctgagaagacctacaagggcggcagcctgggctgccagacagaagctgacagcgacacccagagcccccagtacctgagcgccaccagcccccccaaggacaagaagaggcccacccccctggagatcggctacagcagccacctgcgggctgacagcacagtgcagctggcccccagcccccccaagagccccaaggtgctgtacagccccatcagccccctgagccctgggaaggccctggagagcgcctttgtgccctatgagaagcccctgcctgatgacatcagcccccagaaggtgctgcacccagacatggccaaggtgcccccagccagccccaagacagccaagatgatgcagaggtccatgtctgaccccaagcccctgagccccacagcagatgagagcagccgggcccccttccagtacacagagggctacaccaccaagggcagccagaccatgaccagcagcggggcccagaagaaggtgaagaggaccctgcccaaccccccacctgaggagatcagcacaggcacccagagcaccttcagcaccatgggcaccgtgtccagaagacgcatctgcaggaccaacaccatggcccgggccaagatcctgcaggacatcgaccgggagctggacctggtggagcgggagagcgccaagctgaggaagaagcaggccgagctggatgaggaggagaaggagattgatgccaagctgcgctacctggagatgggcatcaacagaaggaaggaggccctgctgaaggagcgggagaagcgggagcgggcctacctgcagggcgtggctgaagatcgggactacatgtctgattctgaggtgagcagcacccggcccaccagaattgagagccagcacggcatcgagcggcccaggacagccccccagacagagttcagccagttcatccccccccagacccagacagagagccagctggtgccccccaccagcccctacacccagtaccagtacagcagccctgccctgcccacccaggcccccaccagctacacccagcagagccactttgagcagcagaccctgtaccaccagcaggtgagcccctaccagacccagcccaccttccaggccgtggccaccatgtccttcaccccccaggtgcagcccacccccaccccccagcccagctaccagctgcccagccagatgatggtgatccagcagaagccccggcagaccaccctgtacctggagcccaagatcaccagcaactatgaggtgatccggaaccagcccctgatgattgcccctgtgtccacagacaacacctttgctgtgagccacctgggcagcaagtacaacagcctggacctgagaattggcctggaggagaggagctccatggccagcagccccatcagcagcatctctgctgacagcttctacgccgacatcgaccaccacacccccaggaactacgtgctgattgatgacatcggggagatcaccaagggcacagctgccctgagcacagccttcagcctgcacgagaaggacctgagcaagacagaccggctgctgcggaccacagagacccggcgcagccaggaggtgacagacttcctggcccccctgcagagcagcagccggctgcacagctatgtgaaggccgaggaggaccccatggaggacccctatgagctgaagctgctgaagcaccagatcaagcaggagttcagaagaggaacagagagcctggaccacctggccggcctgagccactactaccacgccgacaccagctaccgccacttccccaagtctgagaagtacagcatcagccggctgaccctggagaagcaggccgccaagcagctgcctgctgccatcctgtaccagaagcagagcaagcacaagaagagcctgattgaccccaagatgagcaagttcagccccatccaggagagccgggacctggagccagactacagcagctacatgaccagcagcaccagcagcattggaggcatcagcagccgggcccggctgctgcaggatgacatcaccttcggcctgaggaagaacatcacagaccagcagaagttcatgggcagcagcctgggcaccggcctgggcaccctgggcaacaccatccgcagcgccctgcaggatgaagctgacaagccctacagcagcggcagccgcagccggcccagcagccggcccagctctgtgtatggcctggacctgagcatcaagagggacagcagcagcagcagcctgcggctgaaggcccaggaggccgaggccctggatgtgtccttcagccacgccagcagcagcgcccggaccaagcccaccagcctgcccatcagccagagccggggccgcatccccatcgtggcccagaacagcgaggaggagagccccctgagccctgtgggccagcccatgggcatggcccgggctgctgctggccccctgccccccatctctgctgacacccgggaccagtttggcagcagccacagcctgcctgaggtgcagcagcacatgagggaggagagcaggacccggggctatgaccgggacatcgccttcatcatggatgacttccagcacgccatgtctgacagcgaggcctaccacctgcggcgggaggagacagactggtttgacaagccccgggagagccggctggagaatggacatggcctggacaggaagctgcctgagcggctggtgcacagccggcccctgagccagcaccaggagcagatcatccagatgaatggcaagaccatgcactacatcttcccccacgcccgcatcaagatcacccgggacagcaaggaccacacagtgtctggaaatggcctgggcatcagaattgtgggcggcaaggagatccctggccacagcggggagatcggggcctacatcgccaagatcctgcccggcggcagcgctgagcagacaggcaagctgatggagggcatgcaggtgctggagtggaatggcatccccctgaccagcaagacctatgaggaggtgcagagcatcatcagccagcagagcggggaggccgagatctgtgtgcggctggacctgaacatgctgagtgacagcgagaacagccagcacctggagctgcacgagccccccaaggctgtggacaaggccaagagccctggggtggaccccaagcagctggccgctgagctgcagaaggtgtccctgcagcagagccccctggtgctgagctctgtggtggagaagggcagccacgtgcacagcggccccaccagcgctggcagcagctctgtgcccagccctggccagcccggcagccccagcgtgtccaagaagaagcacggcagcagcaagcccacagatggcaccaaggtggtgagccaccccatcactggagagatccagctgcagatcaactatgacctgggcaacctgatcatccacatcctgcaggccaggaacctggtgccccgggacaacaacggctacagcgacccctttgtgaaggtgtacctgctgcccggccggggccaggtgatggtggtgcagaatgccagcgctgagtacaagaggaggaccaagcacgtgcagaagagcctgaaccctgagtggaaccagaccgtcatctacaagagcatctccatggagcagctgaagaagaagaccctggaggtgacagtgtgggactatgaccgcttcagcagcaatgacttcctgggggaggtgctgattgacctgagcagcaccagccacctggacaacaccccccgctggtaccccctgaaggagcagacagagagcattgaccacggcaagagccacagcagccagagcagccagcagagccccaagcccagcgtcatcaagagccgcagccacggcatcttcccagaccccagcaaggacatgcaggtgcccaccatcgagaagagccacagcagccctggcagcagcaagagcagcagcgagggccacctgcggagccacggccccagccgcagccagagcaagacctctgtgacccagacccacctggaggatgctggggccgccatcgctgctgctgaggccgctgtgcagcagctgcgcatccagcccaccaagccacccaaccacaggcctgctgagagctctgtgtccacaggcagcagcggcagcagctttggcagcggctacagcgtggacagcgagggcagcagcagcacagctggggagaccaacctcttccccatcccccgcatcggcaagatgggccagaatggccaggagcctgtgaagcagcccggggtgggcgtgggcctggccgacacagaggccaagacccaggtgatgggagagatcaagatcgccctgaagaaggagatgaagacagatggagagcagctgattgtggagatcctgcagtgcaggaacatcacctacaagttcaagagcccagaccacctgcctgacctgtatgtgaagatctacgtgatgaacatcagcacccagaagaaggtgatcaagaagaagaccagggtgtgcagacatgaccgggagcccagcttcaatgagaccttccgcttcagcctgagccctgctggccacagcctgcagatcctgctcttcagcaatggaggcaagttcatgaagaagaccctcatcggggaggcctgcatctggctggacaaggtggacctgaggaagagaattgtgaactggcacaagctgctggtgagccccacccagacccactag

SEQ ID NO: 164256 - DNA, 1269 bp, synthetic construct
  misc_feature 1..1269: note = Description of Artificial Sequence: Synthetic coding sequence
  source 1..1269: mol_type = other DNA
accaaggtgtggaacagcaatggcctgggcatcagaattgtgggcggcaaggagatccctggccacagcggggagatcggggcctacatcgccaagatcctgcccggcggcagcgctgagcagacaggcaagctgatggagggcatgcaggtgctggagtggaatggcatccccctgaccagcaagacctatgaggaggtgcagagcatcatcagccagcagagcggggaggccgagatctgtgtgcggctggacctgaacatgctgagtgacagcgagaacagccagcacctggagctgcacgagccccccaaggctgtggacaaggccaagagccctggggtggaccccaagcagctggccgctgagctgcagaaggtgtccctgcagcagagccccctggtgctgagctctgtggtggagaagggcagccacgtgcacagcggccccaccagcgctggcagcagctctgtgcccagccctggccagcccggcagccccagcgtgtccaagaagaagcacggcagcagcaagcccacagatggcaccaaggtggtgagccaccccatcactggagagatccagctgcagatcaactatgacctgggcaacctgatcatccacatcctgcaggccaggaacctggtgccccgggacaacaacggctacagcgacccctttgtgaaggtgtacctgctgcccggccgcggggctgagtacaagaggaggaccaagcacgtgcagaagagcctgaaccctgagtggaaccagaccgtcatctacaagagcatctccatggagcagctgaagaagaagaccctggaggtgacagtgtgggactatgaccgcttcagcagcaatgacttcctgggggaggtgctgattgacctgagcagcaccagccacctggacaacaccccccgctggtaccccctgaaggagcagacagagagcattgaccacggcaagagccacagcagccagagcagccagcagagccccaagcccagcgtcatcaagagccgcagccacggcatcttcccagaccccagcaaggacatgcaggtgcccaccatcgagaagagccacagcagccctggcagcagcaagagcagcagcgagggccacctgcggagccacggccccagccgcagccagagcaagacctctgtgacccagacccacctggaggatgctggagctgccatcgctgctgctgaggccgctgtgcagcagctgcgcatccagcccagcaagaggaggaagtag

SEQ ID NO: 164257 - DNA, 14808 bp, synthetic construct
  misc_feature 1..14808: note = Description of Artificial Sequence: Synthetic coding sequence
  source 1..14808: mol_type = other DNA
atgggaaatgaggccagcctggagggggagggcctgcctgagggcctggccgctgctgctgctgctgggggcggggccagcggggccggcagccccagccacacagccatcccagctggcatggaggccgacctgagccagctgtctgaggaggagcggcggcagattgctgctgtgatgagccgggcccagggcctgcccaagggctctgtgcccccagctgctgctgagagccccagcatgcacaggaagcaggagctggacagcagccacccccccaagcagagcggccggcccccagaccccggccgcccagcccagcccggcctgagcaagagcaggaccacagacaccttccgctctgagcagaagctgcccggccgcagccccagcaccatcagcctgaaggagagcaagagcaggacagacctgaaggaggagcacaagagctccatgatgcctggcttcctgtctgaggtgaatgccctgtctgctgtgtcctctgtggtgaacaagttcaacccctttgacctgatcagtgacagcgaggccagccaggaggagaccaccaagaagcagaaggtggtgcagaaggagcagggcaagccagagggcatcatcaagccacccctgcagcagcagccccccaagcccatccccaagcagcagggccctggccgggaccccctgcagcaggacggcacccccaagagcatcagcagccagcagcctgagaagatcaagagccagcccccaggcaccgggaagcccatccagggccccacccagaccccccagacagaccacgccaagctgcccctgcagagagatgccagccggccccagaccaagcaggccgacatcgtgcggggggagagcgtgaagcccagcctgcccagccccagcaagccacccatccagcagcccaccccaggcaagcccccagcccagcagcccggccacgagaagagccagcccggccctgccaagcccccagcccagcccagcggcctgaccaagcccctggcccagcagcccggcaccgtgaagccccctgtgcagcccccaggcaccaccaagcccccagcccagcccctgggccctgccaagcccccagcccagcagacaggcagcgagaagcccagcagcgagcagcccggccccaaggccctggcccagcccccaggagtgggcaagaccccagcccagcagcccggccctgccaagccacccacccagcaggtgggcacccccaagcccctggcccagcagcccggcctgcagagccctgccaaggcccctggccccaccaagacccctgtgcagcagcccggccctgggaagatcccagcccagcaggccggccctgggaagaccagcgcccagcagacaggccccaccaagccacccagccagctgcccggccctgccaagcccccaccccagcagcccggccctgccaagcccccaccccagcagcccggcagcgccaagccacccagccagcagcccggcagcaccaagcccccaccccagcagcccggccctgccaagcccagcccccagcagcccggcagcaccaagccacccagccagcagcccggcagcgccaagcccagcgcccagcagcccagccctgccaagcccagcgcccagcagagcaccaagcctgtgtcccagacaggcagcggcaagcccctgcagcccccaacagtgagccccagcgccaagcagccccccagccagggcctgcccaagaccatctgccccctgtgcaacaccacagagctgctgctgcacgtgcctgagaaggccaacttcaacacctgcacagagtgccagaccaccgtgtgcagcctgtgtggcttcaaccccaacccccacctgacagaggtgaaggagtggctgtgcctgaactgccagatgaagagggccctgggcggggacctggcccctgtgcccagcagcccccagcccaagctgaagacagcccctgtgaccaccaccagcgctgtgtccaagagcagcccccagccccagcagaccagccccaagaaggatgctgcccccaagcaggacctgagcaaggcccctgagcccaagaagcccccacccctggtgaagcagcccaccctgcacggcagccccagcgccaaggccaagcagcccccagaggccgacagcctgagcaagccagccccacccaaggagcccagcgtgcccagcgagcaggacaaggcccctgtggctgatgacaagcccaagcagcccaagatggtgaagcccaccacagacctggtgagcagcagcagcgccaccaccaagccagacatccccagcagcaaggtgcagagccaggccgaggagaagaccaccccacccctgaagacagattctgccaagcccagccagagcttccccccaactggagagaaggtgagcccctttgacagcaaggccatccccaggcctgccagtgacagcaagatcatcagccaccctggccccagcagcgagagcaagggccagaagcaggtggaccctgtgcagaagaaggaggagcccaagaaggcccagaccaagatgagccccaagccagatgccaagcccatgcccaagggcagccccaccccacctggcccccggcccacagctggccagacagtgcccaccccccagcagagccccaagccccaggagcagagccgccgcttcagcctgaacctgggcagcatcacagatgcccccaagagccagcccaccaccccccaggagaccgtgacaggcaagctgtttggatttggagccagcatcttcagccaggccagcaacctgatcagcacagctggccagcccggcccccacagccagagcggccctggggcccccatgaagcaggccccagcccccagccagccccccaccagccagggcccccccaagagcacaggccaggcccccccagccccagccaagagcatccctgtgaagaaggagaccaaggccccagctgctgagaagctggagcccaaggccgagcaggcccccaccgtgaagaggacagaaacagagaagaagcccccacccatcaaggacagcaagagcctgacagctgagccccagaaggctgtgctgcccaccaagctggagaagagccccaagccagagagcacctgccccctgtgcaagacagagctgaacatcggcagcaaggacccccccaacttcaacacctgcacagagtgcaagaaccaggtgtgcaacctgtgtggcttcaaccccaccccccacctgacagagatccaggagtggctgtgcctgaactgccagacccagagggccatcagcggccagctgggggacatcaggaagatgcccccagcccccagcggccccaaggccagccccatgcctgtgcccacagagagcagcagccagaagacagctgtgcccccccaggtgaagctggtgaagaagcaggagcaggaggtgaagacagaggccgagaaggtgatcctggagaaggtgaaggagaccctgtccatggagaagatcccccccatggtgaccacagaccagaagcaggaggagagcaagctggagaaggacaaggccagcgccctgcaggagaagaagcccctgcctgaggagaagaagctgatccctgaggaggagaagatccgctctgaggagaagaagcccctgctggaggagaagaagcccaccccagaggacaagaagctgctgcctgaggccaagaccagcgcccctgaggagcagaagcatgacctgctgaagagccaggtgcagattgctgaggagaagctggagggccgggtggcccccaagacagtgcaggagggcaagcagccccagaccaagatggagggcctgcccagcggcaccccccagagcctgcccaaggaggatgacaagaccaccaagaccatcaaggagcagccccagcccccctgcacagccaagccagaccaggtggagcccgggaaggagaagacagagaaggaggatgacaagagtgacaccagcagcagccagcagcccaagagcccccagggcctgagtgacaccggctacagcagtgatggcatcagcagcagcctgggggagatccccagcctcatccccacagatgagaaggacatcctgaagggcctgaagaaggacagcttcagccaggagagcagccccagcagccccagcgacctggccaagctggagagcacagtgctgagcatcctggaggcccaggccagcaccctggctgatgagaagtctgagaagaagacccagccccatgaggtgtccccagagcagcccaaggaccaggagaagacccagagcctgtctgagaccctggagatcaccatcagcgaggaggagatcaaggagagccaggaggagaggaaggacaccttcaagaaggacagccagcaggacatccccagcagcaaggaccacaaggagaagtcagaatttgtggatgacatcaccacccggcgggagccctatgacagcgtggaggagagcagcgagagcgagaacagccctgtgccccagaggaagaggaggacctctgtgggcagcagcagcagtgatgagtacaagcaggaggacagccagggcagcggggaggaggaggacttcatcaggaagcagatcatcgagatgtctgcagatgaagatgccagcggctctgaagatgatgagttcatccggaaccagctgaaggagatcagcagcagcacagagagccagaagaaggaggagaccaagggcaagggcaagatcacagctgggaagcaccggcggctgaccaggaagagcagcaccagcattgatgaagatgctggaagaagacacagctggcatgatgaagatgatgaggcctttgatgagagccctgagctgaagtaccgggagaccaagagccaggagagcgaggagctggtggtgactggaggcggcggcctgcggcgcttcaagaccatcgagctgaacagcaccatcgctgacaagtacagcgctgagagcagccagaagaagaccagcctgtactttgatgaggagcctgagctggagatggagagcctgacagacagcccagaagatagaagcagaggagagggcagcagcagcctgcacgccagcagcttcaccccaggcaccagccccacctctgtgagcagcctggatgaagattctgacagcagccccagccacaagaagggggagagcaagcagcagaggaaggcccggcaccggccccacggccccctgctgcccaccatcgaggacagcagcgaggaggaggagctgcgggaggaggaggagctgctgaaggagcaggagaagcagcgggagattgagcagcagcagaggaagagcagcagcaagaagagcaagaaggacaaggatgagctgcgggcccagaggagaagagagcggcccaagaccccacccagcaacctgagccccattgaagatgccagccccacagaggagctgcggcaggccgctgagatggaggagctgcacaggagcagctgcagcgagtacagccccagcattgaaagtgaccctgagggctttgagatcagccctgagaagatcatcgaggtgcagaaggtgtacaagctgcccacagctgtgtccctgtacagccccacagatgagcagagcatcatgcagaaggagggcagccagaaggccctgaagtctgctgaggagatgtatgaggagatgatgcacaagacccacaagtacaaggccttccctgctgccaatgaaagagatgaggtgtttgagaaggagcccctgtatggaggcatgctgattgaggactacatctatgagagcctggtggaggacacctacaacggctctgtggatggcagcctgctgacccggcaggaggaggagaatggcttcatgcagcagaagggccgggagcagaagatccggctgtctgagcagatctatgaggaccccatgcagaagatcacagacctgcagaaggagttctatgagctggagagcctgcacagcgtggtgccccaggaggacatcgtgagcagcagcttcatcatccctgagagccatgagatcgtggacctgggcaccatggtgaccagcacagaggaggagaggaagctgctggatgctgatgctgcctatgaggagctgatgaagaggcagcagatgcagctgaccccaggcagcagccccacccaggcccccatcggggaggacatgacagagagcaccatggactttgacaggatgccagatgccagcctgaccagctctgtgctgagcggggccagcctgacagacagcaccagcagcgccaccctgagcatcccagatgtgaagatcacccagcacttcagcacagaggagattgaagatgaatatgtgacagactacacccgggagatccaggagatcatcgcccacgagagcctcatcctgacctacagcgagcccagcgagagcgccacctctgtgcccccaagtgacacccccagcctgaccagctctgtgtcctctgtgtgcaccacagacagcagcagccccatcaccaccctggacagcatcaccaccgtgtacacagagcctgtggacatgatcaccaagtttgaagattctgaggagatcagcagcagcacctacttccctggcagcatcatcgactacccagaggagatctctgtgtccctggacagaacagcccccccagatggccgggccagcgctgaccacatcgtcatcagcctgagtgacatggccagcagcatcatcgagagcgtggtgcccaagccagagggccctgtggccgacacagtgtccacagacctgctgatcagcgagaaggaccctgtgaagaaggccaagaaggagactggaaatggcatcatcctggaggtgctggaggcctacagagacaagaaggagctggaggccgagaggaccaagagcagcctgtctgagaccgtgtttgaccacccccccagcagcgtcatcgccctgcccatgaaggagcagctgagcaccacctacttcaccagcggggagaccttcggccaggagaagccagccagccagctgcccagcggcagccccagcgtgagcagcctgcctgccaagccccggcccttcttccgcagcagcagcctggacatcagcgcccagcccccacctcctcctcctcctcctcctcctcctcctcctcctcctcctcctcctcctcctccacccctgcccccacccaccagccccaagcccaccatcctgcccaagaagaagctgactgtggccagccctgtgaccacagccacccccctgtttgatgctgtgaccaccctggagaccacagctgtgctgcggagcaatggcctgcctgtgacccgcatctgcaccacagcccctcctcctgtgccccccaagcccagcagcatccccagcggcctggtgttcacccacaggcctgagcccagcaagccacccatcgcccccaagcctgtgatcccccagctgcccaccaccacccagaagcccacagacatccaccccaagcccaccggcctgagcctgaccagctccatgaccctgaacctggtgaccagcgctgactacaagctgcccagccccaccagccccctgagcccccacagcaacaagagcagcccccgcttcagcaagagcctgacagagacctacgtggtgatcaccctgcccagcgagcccggcacccccacagacagcagcgccagccaggccatcacctcctggcccctgggcagccccagcaaggacctggtgtctgtggagcccgtcttctctgtggtgccccctgtgacagctgtggagatccccatcagcagcgagcagaccttctacatcagcggggccctgcagaccttcagcgccacccctgtgacagcccccagcagcttccaggccgcccccacctctgtgacccagttcctgaccacagaggtgtccaagacagaggtgtctgccaccaggagcacagcccccagcgtgggcctgagcagcatcagcatcaccatccccccagagcccctggccctggacaacatccacctggagaagccccagtacaaggaggatggcaagctgcagctggtgggagatgtgattgacctgaggacagtgcccaaggtggaggtgaagaccacagacaagtgcatcgacctgagcgccagcaccatggatgtgaagaggcagatcacagccaatgaggtgtatggcaagcagatctctgctgtgcagcccagcatcatcaacctgtctgtgaccagcagcatcgtgacccctgtgtccctggccacagagaccgtgacctttgtgacctgcacagccagcgccagctacaccaccggcacagagagcctggtgggcgctgagcacgccatgaccacccccctgcagctgaccaccagcaagcacgccgagcccccctaccgcatccccagcgaccaggtgttccccatcgcccgggaggaggcccccatcaacctgagcctgggcaccccagcccatgctgtgaccctggccatcaccaagcctgtgacagtgccccctgtgggcgtgaccaacggctggacagacagcacagtgtcccagggcatcacagatggagaggtggtggacctgagcaccaccaagagccacaggacagtggtgaccatggatgagagcaccagctctgtgatgaccaagatcattgaagatgagaagcctgtggacctgacagctggccggcgggctgtgtgctgtgatgtggtgtacaagctgcccttcggccgcagctgcacagcccagcagcctgccaccaccctgcctgaggacagatttggctacagagatgaccactaccagtatgacagaagtggcccctacggctaccggggcattggaggcatgaagcccagcatgtctgacaccaacctggccgaggccggccacttcttctacaagagcaagaatgcctttgactacagcgagggcacagacacagctgtggacctgaccagcggccgggtgaccaccggggaggtgatggactacagcagcaagaccaccggcccctacccagagacccggcaggtgatcagcggggccggcatcagcaccccccagtacagcacagccaggatgaccccacctcctggcccccagtactgtgtgggctctgtgctgcggagcagcaatggagtggtgtacagctctgtggccacccccacccccagcacctttgccatcaccacccagcccggcagcatcttcagcaccaccgtgcgggacctgagcggcatccacacagcagatgctgtgaccagcctgcctgccatgcaccacagccagcccatgcccaggagctacttcatcaccactggagccagcgagacagacattgctgtgactggaattgacatcagcgccagcctgcagaccatcaccatggagagcctgacagctgagaccatcgacagcgtgcccaccctgaccacagccagcgaggtgtttcctgaggtggtgggagatgaaagtgccctgctgattgtgcctgaggaggacaagcagcagcagcagctggacctggagcgggagctgctggagctggagaagatcaagcagcagagatttgctgaggagctggagtgggagcggcaggagatccagcgcttccgggagcaggagaagatcatggtgcagaagaagctggaggagctgcagagcatgaagcagcacctgctcttccagcaggaggaggagcggcaggcccagttcatgatgaggcaggagaccctggcccagcagcagctgcagctggagcagatccagcagctgcagcagcagctgcaccagcagctggaggagcagaagatccggcagatctaccagtacaactatgaccccagcggcacagccagcccccagaccaccacagagcaggccatcctggagggccagtatgctgccctggagggcagccagttctgggccacagaagatgccaccaccacagccagcgctgtggtggccatcgagatcccccagagccagggctggtacacagtgcagagtgatggagtgacccagtacatcgcccctcctggcatcctgagcacagtgtctgagatccccctgacagatgtggtggtgaaggaggagaagcagcccaagaagaggagcagcggggccaaggtgcggggccagtatgatgacatgggagagaacatgacagatgaccccaggagcttcaagaagatcgtggacagcggcgtgcagacagatgatgaagatgccacagacaggagctatgtgtccagaagaagaaggaccaagaagtctgtggacacctctgtgcagacagatgatgaggaccaggatgagtgggacatgcccaccaggagcaggaggaaggcccgggtgggcaagtatggagacagcatgacagaggccgacaagaccaagcccctgagcaaggtgagcagcattgctgtgcagacagtggccgagatctctgtgcagacagagcctgtgggcaccatccgcacccccagcatccgggcccgggtggatgccaaggtggagatcatcaagcacatcagcgcccctgagaagacctacaagggcggcagcctgggctgccagacagaagctgacagcgacacccagagcccccagtacctgagcgccaccagcccccccaaggacaagaagaggcccacccccctggagatcggctacagcagccacctgcgggctgacagcacagtgcagctggcccccagcccccccaagagccccaaggtgctgtacagccccatcagccccctgagccctgggaaggccctggagagcgcctttgtgccctatgagaagcccctgcctgatgacatcagcccccagaaggtgctgcacccagacatggccaaggtgcccccagccagccccaagacagccaagatgatgcagaggtccatgtctgaccccaagcccctgagccccacagcagatgagagcagccgggcccccttccagtacacagagggctacaccaccaagggcagccagaccatgaccagcagcggggcccagaagaaggtgaagaggaccctgcccaaccccccacctgaggagatcagcacaggcacccagagcaccttcagcaccatgggcaccgtgtccagaagacgcatctgcaggaccaacaccatggcccgggccaagatcctgcaggacatcgaccgggagctggacctggtggagcgggagagcgccaagctgaggaagaagcaggccgagctggatgaggaggagaaggagattgatgccaagctgcgctacctggagatgggcatcaacagaaggaaggaggccctgctgaaggagcgggagaagcgggagcgggcctacctgcagggcgtggctgaagatcgggactacatgtctgattctgaggtgagcagcacccggcccaccagaattgagagccagcacggcatcgagcggcccaggacagccccccagacagagttcagccagttcatccccccccagacccagacagagagccagctggtgccccccaccagcccctacacccagtaccagtacagcagccctgccctgcccacccaggcccccaccagctacacccagcagagccactttgagcagcagaccctgtaccaccagcaggtgagcccctaccagacccagcccaccttccaggccgtggccaccatgtccttcaccccccaggtgcagcccacccccaccccccagcccagctaccagctgcccagccagatgatggtgatccagcagaagccccggcagaccaccctgtacctggagcccaagatcaccagcaactatgaggtgatccggaaccagcccctgatgattgcccctgtgtccacagacaacacctttgctgtgagccacctgggcagcaagtacaacagcctggacctgagaattggcctggaggagaggagctccatggccagcagccccatcagcagcatctctgctgacagcttctacgccgacatcgaccaccacacccccaggaactacgtgctgattgatgacatcggggagatcaccaagggcacagctgccctgagcacagccttcagcctgcacgagaaggacctgagcaagacagaccggctgctgcggaccacagagacccggcgcagccaggaggtgacagacttcctggcccccctgcagagcagcagccggctgcacagctatgtgaaggccgaggaggaccccatggaggacccctatgagctgaagctgctgaagcaccagatcaagcaggagttcagaagaggaacagagagcctggaccacctggccggcctgagccactactaccacgccgacaccagctaccgccacttccccaagtctgagaagtacagcatcagccggctgaccctggagaagcaggccgccaagcagctgcctgctgccatcctgtaccagaagcagagcaagcacaagaagagcctgattgaccccaagatgagcaagttcagccccatccaggagagccgggacctggagccagactacagcagctacatgaccagcagcaccagcagcattggaggcatcagcagccgggcccggctgctgcaggatgacatcaccttcggcctgaggaagaacatcacagaccagcagaagttcatgggcagcagcctgggcaccggcctgggcaccctgggcaacaccatccgcagcgccctgcaggatgaagctgacaagccctacagcagcggcagccgcagccggcccagcagccggcccagctctgtgtatggcctggacctgagcatcaagagggacagcagcagcagcagcctgcggctgaaggcccaggaggccgaggccctggatgtgtccttcagccacgccagcagcagcgcccggaccaagcccaccagcctgcccatcagccagagccggggccgcatccccatcgtggcccagaacagcgaggaggagagccccctgagccctgtgggccagcccatgggcatggcccgggctgctgctggccccctgccccccatctctgctgacacccgggaccagtttggcagcagccacagcctgcctgaggtgcagcagcacatgagggaggagagcaggacccggggctatgaccgggacatcgccttcatcatggatgacttccagcacgccatgtctgacagcgaggcctaccacctgcggcgggaggagacagactggtttgacaagccccgggagagccggctggagaatggacatggcctggacaggaagctgcctgagcggctggtgcacagccggcccctgagccagcaccaggagcagatcatccagatgaatggcaagaccatgcactacatcttcccccacgcccgcatcaagatcacccgggacagcaaggaccacacagtgtctggaaatggcctgggcatcagaattgtgggcggcaaggagatccctggccacagcggggagatcggggcctacatcgccaagatcctgcccggcggcagcgctgagcagacaggcaagctgatggagggcatgcaggtgctggagtggaatggcatccccctgaccagcaagacctatgaggaggtgcagagcatcatcagccagcagagcggggaggccgagatctgtgtgcggctggacctgaacatgctgagtgacagcgagaacagccagcacctggagctgcacgagccccccaaggctgtggacaaggccaagagccctggggtggaccccaagcagctggccgctgagctgcagaaggtgtccctgcagcagagccccctggtgctgagctctgtggtggagaagggcagccacgtgcacagcggccccaccagcgctggcagcagctctgtgcccagccctggccagcccggcagccccagcgtgtccaagaagaagcacggcagcagcaagcccacagatggcaccaaggtggtgagccaccccatcactggagagatccagctgcagatcaactatgacctgggcaacctgatcatccacatcctgcaggccaggaacctggtgccccgggacaacaacggctacagcgacccctttgtgaaggtgtacctgctgcccggccggggccaggtgatggtggtgcagaatgccagcgctgagtacaagaggaggaccaagcacgtgcagaagagcctgaaccctgagtggaaccagaccgtcatctacaagagcatctccatggagcagctgaagaagaagaccctggaggtgacagtgtgggactatgaccgcttcagcagcaatgacttcctgggggaggtgctgattgacctgagcagcaccagccacctggacaacaccccccgctggtaccccctgaaggagcagacagagagcattgaccacggcaagagccacagcagccagagcagccagcagagccccaagcccagcgtcatcaagagccgcagccacggcatcttcccagaccccagcaaggacatgcaggtgcccaccatcgagaagagccacagcagccctggcagcagcaagagcagcagcgagggccacctgcggagccacggccccagccgcagccagagcaagacctctgtgacccagacccacctggaggatgctggggccgccatcgctgctgctgaggccgctgtgcagcagctgcgcatccagcccagcaagaggaggaagtag

SEQ ID NO: 164258 - DNA, 10908 bp, synthetic construct
  misc_feature 1..10908: note = Description of Artificial Sequence: Synthetic coding sequence
  source 1..10908: mol_type = other DNA
atgggaaatgaggccagcctggagggggagggcctgcctgagggcctggccgctgctgctgctgctgggggcggggccagcggggccggcagccccagccacacagccatcccagctggcatggaggccgacctgagccagctgtctgaggaggagcggcggcagattgctgctgtgatgagccgggcccagggcctgcccaagggctctgtgcccccagctgctgctgagagccccagcatgcacaggaagcaggagctggacagcagccacccccccaagcagagcggccggcccccagaccccggccgcccagcccagcccggcctgagcaagagcaggaccacagacaccttccgctctgagcagaagctgcccggccgcagccccagcaccatcagcctgaaggagagcaagagcaggacagacctgaaggaggagcacaagagctccatgatgcctggcttcctgtctgaggtgaatgccctgtctgctgtgtcctctgtggtgaacaagttcaacccctttgacctgatcagtgacagcgaggccagccaggaggagaccaccaagaagcagaaggtggtgcagaaggagcagggcaagccagagggcatcatcaagccacccctgcagcagcagccccccaagcccatccccaagcagcagggccctggccgggaccccctgcagcaggacggcacccccaagagcatcagcagccagcagcctgagaagatcaagagccagcccccaggcaccgggaagcccatccagggccccacccagaccccccagacagaccacgccaagctgcccctgcagagagatgccagccggccccagaccaagcaggccgacatcgtgcggggggagagcgtgaagcccagcctgcccagccccagcaagccacccatccagcagcccaccccaggcaagcccccagcccagcagcccggccacgagaagagccagcccggccctgccaagcccccagcccagcccagcggcctgaccaagcccctggcccagcagcccggcaccgtgaagccccctgtgcagcccccaggcaccaccaagcccccagcccagcccctgggccctgccaagcccccagcccagcagacaggcagcgagaagcccagcagcgagcagcccggccccaaggccctggcccagcccccaggagtgggcaagaccccagcccagcagcccggccctgccaagccacccacccagcaggtgggcacccccaagcccctggcccagcagcccggcctgcagagccctgccaaggcccctggccccaccaagacccctgtgcagcccaagccacccagccagcagcccggcagcaccaagcccccaccccagcagcccggccctgccaagcccagcccccagcagcccggcagcaccaagccacccagccagcagcccggcagcgccaagcccagcgcccagcagcccagccctgccaagcccagcgcccagcagagcaccaagcctgtgtcccagacaggcagcggcaagcccctgcagcccccaacagtgagccccagcgccaagcagccccccagccagggcctgcccaagaccatctgccccctgtgcaacaccacagagctgctgctgcacgtgcctgagaaggccaacttcaacacctgcacagagtgccagaccaccgtgtgcagcctgtgtggcttcaaccccaacccccacctgacagaggtgaaggagtggctgtgcctgaactgccagatgaagagggccctgggcggggacctggcccctgtgcccagcagcccccagcccaagctgaagacagcccctgtgaccaccaccagcgctgtgtccaagagcagcccccagccccagcagaccagccccaagaaggatgctgcccccaagcaggacctgagcaaggcccctgagcccaagaagcccccacccctggtgaagcagcccaccctgcacggcagccccagcgccaaggccaagcagcccccagaggccgacagcctgagcaagccagccccacccaaggagcccagcgtgcccagcgagcaggacaaggcccctgtggctgatgacaagcccaagcagcccaagatggtgaagcccaccacagacctggtgagcagcagcagcgccaccaccaagccagacatccccagcagcaaggtgcagagccaggccgaggagaagaccaccccacccctgaagacagattctgccaagcccagccagagcttccccccaactggagagaaggtgagcccctttgacagcaaggccatccccaggcctgccagtgacagcaagatcatcagccaccctggccccagcagcgagagcaagggccagaagcaggtggaccctgtgcagaagaaggaggagcccaagaaggcccagaccaagatgagccccaagccagatgccaagcccatgcccaagggcagccccaccccacctggcccccggcccacagctggccagacagtgcccaccccccagcagagccccaagccccaggagcagagccgccgcttcagcctgaacctgggcagcatcacagatgcccccaagagccagcccaccaccccccaggagaccgtgacaggcaagctgtttggatttggagccagcatcttcagccaggccagcaacctgatcagcacagctggccagcccggcccccacagccagagcggccctggggcccccatgaagcaggccccagcccccagccagccccccaccagccagggcccccccaagagcacaggccaggcccccccagccccagccaagagcatccctgtgaagaaggagaccaaggccccagctgctgagaagctggagcccaaggccgagcaggcccccaccgtgaagaggacagaaacagagaagaagcccccacccatcaaggacagcaagagcctgacagctgagccccagaaggctgtgctgcccaccaagctggagaagagccccaagccagagagcacctgccccctgtgcaagacagagctgaacatcggcagcaaggacccccccaacttcaacacctgcacagagtgcaagaaccaggtgtgcaacctgtgtggcttcaaccccaccccccacctgacagagaactgccagacccagagggccatcagcggccagctgggggacatcaggaagatgcccccagcccccagcggccccaaggccagccccatgcctgtgcccacagagagcagcagccagaagacagctgtgcccccccaggtgaagctggtgaagaagcaggagcaggaggtgaagacagaagctgagaaggtgatcctggagaaggtgaaggagaccctgtccatggagaagatcccccccatggtgaccacagaccagaagcaggaggagagcaagctggagaaggacaaggccagcgccctgcaggagaagaagcccctgcctgaggagaagaagctgatccctgaggaggagaagatccgctctgaggagaagaagcccctgctggaggagaagaagcccaccccagaggacaagaagctgctgcctgaggccaagaccagcgcccctgaggagcagaagcatgacctgctgaagagccaggtgcagattgctgaggagaagctggagggccgggtggcccccaagacagtgcaggagggcaagcagccccagaccaagatggagggcctgcccagcggcaccccccagagcctgcccaaggaggatgacaagaccaccaagaccatcaaggagcagccccagcccccctgcacagccaagccagaccaggagaaggaggatgacaagagtgacaccagcagcagccagcagcccaagagcccccagggcctgagtgacaccggctacagcagtgatggcatcagcagcagcctgggggagatccccagcctcatccccacagatgagaaggacatcctgaagggcctgaagaaggacagcttcagccaggagagcagccccagcagccccagcgacctggccaagctggagagcacagtgctgagcatcctggaggcccaggccagcaccctggctgatgagaagtctgagaagaagacccagccccatgaggtgtccccagagcagcccaaggaccaggagaagacccagagcctgtctgagaccctggagatcaccatcagcgaggaggagatcaaggagagccaggaggagaggaaggacaccttcaagaaggacagccagcaggacatccccagcagcaaggaccacaaggagaagtcagaatttgtggatgacatcaccacccggcgggagccctatgattctgtggaggagagcagcgagagcgagaacagccctgtgccccagaggaagaggaggacctctgtgggcagcagcagcagtgatgagtacaagcaggaggacagccagggcagcggggaggaggaggacttcatcaggaagcagatcatcgagatgtctgcagatgaagatgccagcggctctgaagatgatgagttcatccggaaccagctgaaggagatcagcagcagcacagagagccagaagaaggaggagaccaagggcaagggcaagatcacagctgggaagcaccggcggctgaccaggaagagcagcaccagcattgatgaagatgctggccgccgccacagctggcatgatgaagatgatgaggcctttgatgagagccctgagctgaagtaccgggagaccaagagccaggagagcgaggagctggtggtgactggaggcggcggcctgcggcgcttcaagaccatcgagctgaacagcaccatcgctgacaagtacagcgctgagagcagccagaagaagaccagcctgtactttgatgaggagcctgagctggagatggagagcctgacagacagccctgaggacaggagcagaggagagggcagcagcagcctgcacgccagcagcttcaccccaggcaccagccccacctctgtgagcagcctggatgaggacagcgacagcagccccagccacaagaagggggagagcaagcagcagaggaaggcccggcaccggccccacggccccctgctgcccaccatcgaggacagcagcgaggaggaggagctgcgggaggaggaggagctgctgaaggagcaggagaagcagcgggagattgagcagcagcagaggaagagcagcagcaagaagagcaagaaggacaaggatgagctgcgggcccagaggcggcgggagcggcccaagaccccacccagcaacctgagccccattgaagatgccagccccacagaggagctgcggcaggccgctgagatggaggagctgcacaggagcagctgcagcgagtacagccccagcattgaaagtgaccctgagggctttgagatcagccctgagaagatcatcgaggtgcagaaggtgtacaagctgcccacagctgtgtccctgtacagccccacagatgagcagagcatcatgcagaaggagggcagccagaaggccctgaagtctgctgaggagatgtatgaggagatgatgcacaagacccacaagtacaaggccttccctgctgccaatgaaagagatgaggtgtttgagaaggagcccctgtatggaggcatgctgattgaggactacatctatgagagcctggtggaggacacctacaatggatctgtggatggcagcctgctgacccggcaggaggaggagaatggcttcatgcagcagaagggccgggagcagaagatccggctgtctgagcagatctatgaggaccccatgcagaagatcacagacctgcagaaggagttctatgagctggagagcctgcacagcgtggtgccccaggaggacatcgtgagcagcagcttcatcatccctgagagccatgaaattgtggacctgggcaccatggtgaccagcacagaggaggagaggaagctgctggatgctgatgctgcctatgaggagctgatgaagaggcagcagatgcagctgaccccaggcagcagccccacccaggcccccatcggggaggacatgacagagagcaccatggactttgacaggatgccagatgccagcctgaccagctctgtgctgagcggggccagcctgacagacagcaccagcagcgccaccctgagcatcccagatgtgaagatcacccagcacttcagcacagaggagattgaagatgaatatgtgacagactacacccgggagatccaggagatcatcgcccacgagagcctcatcctgacctacagcgagcccagcgagagcgccacctctgtgccccccagcgacacccccagcctgaccagctctgtgtcctctgtgtgcaccacagacagcagcagccccatcaccaccctggacagcatcaccaccgtgtacacagagcctgtggacatgatcaccaagtttgaggacagcgaggagatcagcagcagcacctacttccctggcagcatcatcgactacccagaggagatctctgtgtccctggacagaacagcccccccagatggccgggccagcgctgaccacatcgtcatcagcctgagtgacatggccagcagcatcattgaatctgtggtgcccaagccagagggccctgtggccgacacagtgtccacagacctgctgatcagcgagaaggaccctgtgaagaaggccaagaaggagactggaaatggcatcatcctggaggtgctggaggcctacagagacaagaaggagctggaggccgagaggaccaagagcagcctgtctgaaacagtgtttgaccacccccccagctctgtgattgccctgcccatgaaggagcagctgagcaccacctacttcaccagcggggagaccttcggccaggagaagccagccagccagctgcccagcggcagccccagcgtgagcagcctgcctgccaagccccggcccttcttccgcagcagcagcctggacatcagcgcccagcccccacctcctcctcctcctcctcctcctcctcctcctcctcctcctcctcctcctcctccacccctgcccccacccaccagccccaagcccaccatcctgcccaagaagaagctgactgtggccagccctgtgaccacagccacccccctgtttgatgctgtgaccaccctggagaccacagctgtgctgcggagcaatggcctgcctgtgacccgcatctgcaccacagcccctcctcctgtgccccccaagcccagcagcatccccagcggcctggtgttcacccacaggcctgagcccagcaagccacccatcgcccccaagcctgtgatcccccagctgcccaccaccacccagaagcccacagacatccaccccaagcccaccggcctgagcctgaccagctccatgaccctgaacctggtgaccagcgctgactacaagctgcccagccccaccagccccctgagcccccacagcaacaagagcagcccccgcttcagcaagagcctgacagagacctacgtggtgatcaccctgcccagcgagcccggcacccccacagacagcagcgccagccaggccatcacctcctggcccctgggcagccccagcaaggacctggtgtctgtggagcctgtgttttctgtggtgccccctgtgacagctgtggagatccccatcagcagcgagcagaccttctacatcagcggggccctgcagaccttcagcgccacccctgtgacagcccccagcagcttccaggccgcccccacctctgtgacccagttcctgaccacagaggtgtccaagacagaggtgtctgccaccaggagcacagcccccagcgtgggcctgagcagcatcagcatcaccatccccccagagcccctggccctggacaacatccacctggagaagccccagtacaaggaggatggcaagctgcagctggtgggagatgtgattgacctgaggacagtgcccaaggtggaggtgaagaccacagacaagtgcatcgacctgagcgccagcaccatggatgtgaagaggcagatcacagccaatgaggtgtatggcaagcagatctctgctgtgcagcccagcatcatcaacctgtctgtgaccagcagcatcgtgacccctgtgtccctggccacagaaacagtgacctttgtgacctgcacagccagcgccagctacaccactggaacagagagcctggtgggcgctgagcacgccatgaccacccccctgcagctgaccaccagcaagcatgctgagcccccctaccgcatccccagcgaccaggtgttccccatcgcccgggaggaggcccccatcaacctgagcctgggcaccccagcccatgctgtgaccctggccatcaccaagcctgtgacagtgccccctgtgggcgtgaccaacggctggacagacagcacagtgtcccagggcatcacagatggagaggtggtggacctgagcaccaccaagagccacaggacagtggtgaccatggatgagagcaccagctctgtgatgaccaagatcattgaagatgagaagcctgtggacctgacagctggaagaagagctgtgtgctgtgatgtggtgtacaagctgcccttcggccgcagctgcacagcccagcagcctgccaccaccctgcctgaagatcgcttcggctacagagatgaccactaccagtatgacaggagcggcccctacggctaccggggcatcggcggcatgaagcccagcatgtctgacaccaacctggccgaggccggccacttcttctacaagagcaagaatgcctttgactacagcgagggcacagacacagctgtggacctgaccagcggccgggtgaccactggagaggtgatggactacagcagcaagaccaccggcccctacccagagacccggcaggtgatctctggagctggcatcagcaccccccagtacagcacagccaggatgaccccacctcctggcccccagtactgtgtgggctctgtgctgcggagcagcaatggagtggtgtacagctctgtggccacccccacccccagcacctttgccatcaccacccagcccggcagcatcttcagcaccaccgtgcgggacctgagcggcatccacacagcagatgctgtgaccagcctgcctgccatgcaccacagccagcccatgcccaggagctacttcatcaccaccggggccagcgagacagacattgctgtgacaggcatcgacatcagcgccagcctgcagaccatcaccatggagagcctgacagctgagaccattgattctgtgcccaccctgaccacagccagcgaggtgtttcctgaggtggtgggagatgagagcgccctgctgattgtgcctgaggaggacaagcagcagcagcagctggacctggagcgggagctgctggagctggagaagatcaagcagcagagatttgctgaggagctggagtgggagcggcaggagatccagcgcttccgggagcaggagaagatcatggtgcagaagaagctggaggagctgcagagcatgaagcagcacctgctcttccagcaggaggaggagcggcaggcccagttcatgatgaggcaggagaccctggcccagcagcagctgcagctggagcagatccagcagctgcagcagcagctgcaccagcagctggaggagcagaagatccggcagatctaccagtacaactatgaccccagcggcacagccagcccccagaccaccacagagcaggccatcctggagggccagtatgctgccctggagggcagccagttctgggccacagaagatgccaccaccacagccagcgctgtggtggccatcgagatcccccagagccagggctggtacacagtgcagagtgatggagtgacccagtacatcgcccctcctggcatcctgagcacagtgtctgagatccccctgacagatgtggtggtgaaggaggagaagcagcccaagaagaggagcagcggggccaaggtgcggggccagtatgatgacatgggagagaacatgacagatgaccccaggagcttcaagaagatcgtggacagcggcgtgcagacagatgatgaagatgccacagacaggagctatgtgtccagaagaagaaggaccaagaagtctgtggacacctctgtgcagacagatgatgaggaccaggatgagtgggacatgcccaccaggagcaggaggaaggcccgggtgggcaagtacggggacagcatgacagaagctgacaagaccaagcccctgagcaaggtgagcagcattgctgtgcagacagtggccgagatctctgtgcagacagagcctgtgggcaccatccgcacccccagcatccgggcccgggtggatgccaaggtggagatcatcaagcacatcagcgcccctgagaagacctacaagggcggcagcctgggctgccagacagaggccgacagcgacacccagagcccccagtacctgagcgccaccagcccccccaaggacaagaagaggcccacccccctggagatcggctacagcagccacctgcgggctgacagcacagtgcagctggcccccagcccccccaagagccccaaggtgctgtacagccccatcagccccctgagccctgggaaggccctggagagcgcctttgtgccctatgagaagcccctgcctgatgacatcagcccccagaaggtgctgcacccagacatggccaaggtgcccccagccagccccaagacagccaagatgatgcagaggtccatgtctgaccccaagcccctgagccccacagcagatgagagcagccgggcccccttccagtacacagagggctacacctag

SEQ ID NO: 164259 - DNA, 1635 bp, synthetic construct
  misc_feature 1..1635: note = Description of Artificial Sequence: Synthetic coding sequence
  source 1..1635: mol_type = other DNA
atggagaagctgcaggagcacctgatcaaggccaaggccttcaccatcaagaagaccctggagatctacgtgcccatcaagcagttcttctacaacctgatccaccctgagtacagcgctgtgacagatgtgtatgtgctgatgttcctggccgacacagtggacttcatcatcatcgtgtttggcttctgggccttcggcaagcacagcgctgctgctgacatcaccagcagcctgtctgaggaccaggtgcccggccccttcctggtgatggtgctgatccagtttggcaccatggtggtggaccgggccctgtacctgaggaagacagtgctgggcaaggtgatcttccaggtgatcctggtgtttggcatccacttctggatgttcttcatcctgcccggggtgacagagaggaagttcagccagaacctggtggcccagctgtggtactttgtgaagtgtgtgtacttcggcctgagcgcctaccagatccgctgtggctaccccaccagggtgctgggcaacttcctgaccaagagctacaactacgtgaacctcttcctgttccagggcttccggctggtgcccttcctgacagagctgcgggctgtgatggactgggtgtggacagacaccaccctgagcctgagctcctggatctgtgtggaggacatctatgcccacatcttcatcctgaagtgctggagggagagcgagaagcccatcttcaccatgtctgcccagcagagccagctgaaggtgatggaccagcagagcttcaacaagttcatccaggccttcagccgggacaccggggccatgcagttcctggagaactatgagaaggaggacatcaccgtggccgagctggagggcaacagcaacagcctgtggaccatcagcccccccagcaagcagaagatgattcatgagctgctggaccccaacagcagcttctctgtggtgttctcctggagcatccagaggaacctgagcctgggcgccaagtctgagatcgccacagacaagctgtccttccccctgaagaacatcaccaggaagaacatcgccaagatgattgctggcaacagcacagagagcagcaagacccctgtgaccatcgagaagatctacccctactacgtgaaggcccccagcgacagcaacagcaagcccatcaagcagctgctgtctgagaacaacttcatggacatcaccatcatcctgagccgggacaacaccaccaagtacaacagcgagtggtgggtgctgaacctgaccggcaaccgcatctacaaccccaacagccaggccctggagctggtggtgttcaatgacaaggtgtccccacccagcctgggcttcctggccggctacggcatcatgggcctgtatgcctctgtggtgctggtgattggcaagtttgtgcgggagttcttcagcggcatcagccacagcatcatgtttgaggagctgcccaacgtggaccgcatcctgaagctgtgcacagacatcttcctggtgcgggagaccggggagctggagctggaggaggacctgtatgccaagctgatcttcctgtaccgcagccctgagaccatgatcaagtggacccgggagaagaccaactag

SEQ ID NO: 164260 - DNA, 8259 bp, synthetic construct
  misc_feature 1..8259: note = Description of Artificial Sequence: Synthetic coding sequence
  source 1..8259: mol_type = other DNA
atggccagcgaggtggtgtgtggcctcatcttccggctgctgctgcccatctgcctggccgtggcctgtgccttccgctacaacggcctgagctttgtgtacctgatctacctgctgctgatccccctcttcagcgagcccaccaagaccaccatgcagggccacacaggccgcctgctgaagagcctgtgcttcatcagcctgtccttcctgctgctgcacatcatcttccacatcaccctggtgtccctggaggcccagcaccgcatcgcccctggctacaactgcagcacctgggagaagaccttccggcagatcggctttgagagcctgaagggagcagatgctggaaatggcatccgggtgtttgtgcctgacatcggcatgtttattgccagcctgaccatctggctgctgtgcagaaatattgtgcagaagcctgtgacagatgaggccgcccagagcaaccctgagtttgaaaatgaggagctggccgagggggagaagattgacagcgaggaggccctgatctatgaggaggacttcaatggaggagatggagtggagggggagctggaggagagcaccaagctgaagatgttccggcggctggcctctgtggccagcaagctgaaggagttcatcggcaacatgatcaccacagctgggaaggtggtggtgaccatcctgctgggcagcagcggcatgatgctgcccagcctgaccagctctgtgtacttctttgtgttcctgggcctgtgcacctggtggagctggtgcaggacctttgaccccctgctcttcagctgcctgtgtgtgctgctggccatcttcaccgctggccacctgattggcctgtacctgtaccagttccagttcttccaggaggccgtgcccccaaatgactactatgcccggctgtttggcatcaagagcgtcatccagacagactgcagcagcacctggaagatcatcgtgaacccagacctgtcctggtaccaccacgccaaccccatcctgctgctggtgatgtactacaccctggccaccctcatccgcatctggctgcaggagcccctggtgcaggatgagggcaccaaggaggaggacaaggccctggcctgcagccccatccagatcacagctggaagaagaagaagcctgtggtacgccacccactaccccacagatgagaggaagctgctgtccatgacccaggatgactacaagcccagtgatggcctgctggtgacagtgaatggaaatcctgtggactaccacaccatccaccccagcctgcccatggagaatggacctgggaaggctgacctgtacagcaccccccagtaccgctgggagcccagtgatgagagcagcgagaagcgggaggaggaggaggaggagaaggaggagtttgaggaggagaggagccgggaggagaagaggagcatcaaggtgcacgccatggtgtctgtgttccagttcatcatgaagcagagctacatctgtgccctgattgccatgatggcctggagcatcacctaccacagctggctgacctttgtgctgctgatctggagctgcaccctgtggatgatccggaacagaagaaaatatgccatgatcagcagccccttcatggtggtgtatggcaacctgctgctgatcctgcagtacatctggagctttgagctgcctgagatcaagaaggtgcccggcttcctggagaagaaggagcccggggagctggccagcaagatcctcttcaccatcaccttctggctgctgctgcggcagcacctgacagagcagaaggccctgcaggagaaggaggccctgctgtctgaggtgaagattggcagccaggagaatgaggagaaggatgaggagctgcaggacatccaggtggagggggagcccaaggaggaggaggaggaggaggccaaggaggagaagcaggagaggaagaaggtggagcaggaggaggccgaggaggaggatgagcaggacatcatgaaggtgctgggcaacctggtggtggccatgttcatcaagtactggatctacgtgtgtggcggcatgttcttctttgtgtcctttgagggcaagatcgtgatgtacaagatcatctacatggtgctcttcctgttctgtgtggccctgtaccaggtgcactatgagtggtggaggaagatcctgaagtacttctggatgtctgtggtgatctacaccatgctggtgctgatcttcatctacacctaccagtttgagaacttccctggcctgtggcagaacatgacaggcctgaagaaggagaagctggaggacctgggcctgaagcagttcaccgtggccgagctgttcacccgcatcttcatccccaccagcttcctgctggtgtgcatcctgcacctgcactacttccatgaccgcttcctggagctgacagacctgaagagcatccccagcaaagaagacaacaccatctaccgcctggcccaccctgagggcagcctgcctgacctgaccatgatgcacctgacagccagcctggagaagccagaggtgaggaagctggccgagcccggggaggagaagctggagggctacagcgagaaggcccagaagggggacctgggcaaggacagcgaggagagcgaggaggatggagaggaggaggaggagagcgaggaggaggaggagaccagtgacctgaggaacaagtggcacctggtgattgaccggctgactgtgctcttcctgaagttcctggagtacttccacaagctgcaggtgttcatgtggtggatcctggagctgcacatcatcaagatcgtgagcagctacatcatctgggtgtctgtgaaggaggtgtccctcttcaactacgtgttcctgatctcctgggcctttgccctgccctatgccaagctgcggcggctggccagctctgtgtgcaccgtgtggacctgtgtgatcatcgtgtgcaagatgctgtaccagctgcagaccatcaagccagagaacttctctgtgaactgcagcctgcccaatgaaaaccagaccaacatccccttcaatgagctgaacaagagcctgctgtacagcgcccccatcgaccccacagagtgggtgggcctgaggaagagcagccccctgctggtgtacctgaggaacaacctgctgatgctggccatcctggcctttgaggtgaccatctaccgccaccaggagtactaccggggcaggaacaacctgacagcccctgtgtccaggaccatcttccatgacatcacccggctgcacctggatgatggcctcatcaactgtgccaagtacttcatcaactacttcttctacaagtttggcctggagacctgcttcctgatgtctgtgaatgtgattggccagaggatggacttctacgccatgatccacgcctgctggctgattgctgtgctgtacagaagaagaaggaaggccatcgccgagatctggcccaagtactgctgcttcctggcctgcatcatcaccttccagtacttcatctgcatcggcatccccccagccccctgccgggactacccctggaggttcaagggggccagcttcaatgacaacatcatcaagtggctgtacttcccagacttcatcgtgcggcccaaccctgtgttcctggtgtatgacttcatgctgctgctgtgtgccagcctgcagaggcagatctttgaagatgagaacaaggctgctgtgcgcatcatggccggggacaacgtggagatctgcatgaacctggatgctgccagcttcagccagcacaaccctgtgcctgacttcatccactgccgcagctacctggacatgagcaaggtgatcatcttctcctacctgttctggtttgtgctgaccatcatcttcatcaccggcaccacccgcatcagcatcttctgcatgggctacctggtggcctgcttctacttcctgctgtttggaggagacctgctgctgaagcccatcaagagcatcctgcgctactgggactggctgattgcctacaacgtgtttgtgatcaccatgaagaacatcctgagcattggagcctgtggctacatcggcaccctggtgcacaacagctgctggctgatccaggccttcagcctggcctgcaccgtgaagggctaccagatgcctgctgccaacagcccctgcaccctgcccagcggggaggccggcatcatctgggacagcatctgctttgccttcctgctgctgcagaggagggtcttcatgagctactacttcctgcacgtggtggccgacatcaaggccagccagatcctggccagcagaggagctgagctgttccaggccaccatcgtgaaggctgtgaaggccagaattgaggaggagaagaagtccatggaccagctgaagaggcagatggaccgcatcaaggcccggcagcagaagtacaagaagggcaaggagaggatgctgagcctgacccaggagcctggagagggccaggacatgcagaagctgtctgaagaagatgatgagcgggaggccgacaagcagaaggccaagggcaagaagaagcagtggtggaggccctgggtggaccacgcctccatggtgcgcagcggggactactacctgtttgaaacagacagcgaggaggaggaggaggaggagctgaagaaggaggatgaggagcccccaagaagaagtgccttccagtttgtgtaccaggcctggatcacagaccccaagacagccctgcggcagaggcacaaggagaagaagaggtctgcccgggaggagaggaagagaagaaggaagggcagcaaggagggccctgtggagtgggaggacagagaagatgagcccatcaagaagaagagtgatggccctgacaacatcatcaagaggatcttcaacatcctgaagttcacctgggtgctcttcctggccaccgtggacagcttcaccacctggctgaacagcatcagccgggagcacatcgacatcagcacagtgctgagaattgagcgctgcatgctgacccgggagatcaagaagggaaatgtgcccacccgggagagcatccacatgtactaccagaaccacatcatgaacctgagccgggagagcggcctggacaccattgatgagcaccctggagctgccagcggggcccagacagcccacaggatggacagcctggacagccatgacagcatcagcagcgagcccacccagtgcaccatgctgtacagccggcagggcaccacagagaccatcgaggaggtggaggccgagcaggaggaggaggccggcagcacagcccctgagccccgggaggccaaggagtatgaggccaccggctatgatgtgggcgccatgggcgctgaggaggccagcctgaccccagaggaggagctgacccagttcagcaccctggatggagatgtggaggccccacccagctacagcaaggctgtgtcctttgagcacctgagctttggcagccaggatgacagcgctgggaagaacaggatggctgtgtccccagatgacagcaggacagacaagctgggcagcagcatcctgccccccctgacccatgagctgacagccagcgagctgctgctgaagaagatgtttcatgatgatgagctggaggagagcgagaagttctacgtgggccagccccgcttcctgctgctcttctacgccatgtacaacaccctggtggcccggtctgagatggtgtgctacttcgtcatcatcctgaaccacatggtgtctgcctccatgatcaccctgctgctgcccatcctgatcttcctgtgggccatgctgtctgtgccccggcccagccgccgcttctggatgatggccatcgtgtacacagaggtggccatcgtggtgaagtacttcttccagtttggcttcttcccctggaacaagaatgtggaggtgaacaaggacaagccctaccacccccccaacatcattggagtggagaagaaggagggctacgtgctgtatgacctgatccagctgctggccctcttcttccacaggagcatcctgaagtgccacggcctgtgggatgaagatgacatgacagaaagtggcatggcccgggaggagagtgatgatgagctgagcctgggccacggccggcgggacagcagtgacagcctgaagagcatcaacctggccgcctctgtggagagcgtgcacgtgaccttccctgagcagcagacagctgtgcggaggaagaggagcggcagcagcagcgagcccagccagaggagcagcttcagcagcaacagaagccagaggggcagcaccagcaccaggaacagcagccagaagggcagctctgtgctgagcatcaagcagaagggcaagcgggagctgtacatggagaagctgcaggagcacctgatcaaggccaaggccttcaccatcaagaagaccctggagatctacgtgcccatcaagcagttcttctacaacctgatccaccctgagtacagcgctgtgacagatgtgtatgtgctgatgttcctggccgacacagtggacttcatcatcatcgtgtttggcttctgggccttcggcaagcacagcgctgctgctgacatcaccagcagcctgtctgaggaccaggtgcccggccccttcctggtgatggtgctgatccagtttggcaccatggtggtggaccgggccctgtacctgaggaagacagtgctgggcaaggtgatcttccaggtgatcctggtgtttggcatccacttctggatgttcttcatcctgcccggggtgacagagaggaagttcagccagaacctggtggcccagctgtggtactttgtgaagtgtgtgtacttcggcctgagcgcctaccagatccgctgtggctaccccaccagggtgctgggcaacttcctgaccaagagctacaactacgtgaacctcttcctgttccagggcttccggctggtgcccttcctgacagagctgcgggctgtgatggactgggtgtggacagacaccaccctgagcctgagctcctggatctgtgtggaggacatctatgcccacatcttcatcctgaagtgctggagggagagcgagaagcgctacccccagccccggggccagaagaagaagaaggtggtgaagtatggcatgggcggcatgatcatcgtgctgctgatctgcatcgtgtggttccccctgctcttcatgagcctcatcaagtctgtggccggggtcatcaaccagcccctggatgtgtctgtgaccatcaccctgggcggctaccagcccatcttcaccatgtctgcccagcagagccagctgaaggtgatggaccagcagagcttcaacaagttcatccaggccttcagccgggacaccggggccatgcagttcctggagaactatgagaaggaggacatcaccgtggccgagctggagggcaacagcaacagcctgtggaccatcagcccccccagcaagcagaagatgattcatgagctgctggaccccaacagcagcttctctgtggtgttctcctggagcatccagaggaacctgagcctgggcgccaagtctgagatcgccacagacaagctgtccttccccctgaagaacatcaccaggaagaacatcgccaagatgattgctggcaacagcacagagagcagcaagacccctgtgaccatcgagaagatctacccctactacgtgaaggcccccagcgacagcaacagcaagcccatcaagcagctgctgtctgagaacaacttcatggacatcaccatcatcctgagccgggacaacaccaccaagtacaacagcgagtggtgggtgctgaacctgaccggcaaccgcatctacaaccccaacagccaggccctggagctggtggtgttcaatgacaaggtgtccccacccagcctgggcttcctggccggctacggcatcatgggcctgtatgcctctgtggtgctggtgattggcaagtttgtgcgggagttcttcagcggcatcagccacagcatcatgtttgaggagctgcccaacgtggaccgcatcctgaagctgtgcacagacatcttcctggtgcgggagaccggggagctggagctggaggaggacctgtatgccaagctgatcttcctgtaccgcagccctgagaccatgatcaagtggacccgggagaagaccaactag

SEQ ID NO: 164261 - DNA, 1692 bp, synthetic construct
  misc_feature 1..1692: note = Description of Artificial Sequence: Synthetic coding sequence
  source 1..1692: mol_type = other DNA
atgtctgtggtgatctacaccatgctggtgctgatcttcatctacacctaccagtttgagaacttccctggcctgtggcagaacatgacaggcctgaagaaggagaagctggaggacctgggcctgaagcagttcaccgtggccgagctgttcacccgcatcttcatccccaccagcttcctgctggtgtgcatcctgcacctgcactacttccatgaccgcttcctggagctgacagacctgaagagcatccccagcaaggaggacaacaccatctacagccacgccaaggtgaatggccgggtgtacctgatcatcaacagcatcaagaagaagctgcccatccaccagaatgagctggcccaccctgagggcagcctgcctgacctgaccatgatgcacctgacagccagcctggagaagccagaggtgaggaagctggccgagcccggggaggagaagctggagggctacagcgagaaggcccagaagggggacctgggcaaggacagcgaggagagcgaggaggatggagaggaggaggaggagagcgaggaggaggaggagaccagtgacctgaggaacaagtggcacctggtgattgaccggctgactgtgctcttcctgaagttcctggagtacttccacaagctgcaggtgttcatgtggtggatcctggagctgcacatcatcaagatcgtgagcagctacatcatctgggtgtctgtgaaggaggtgtccctcttcaactacgtgttcctgatctcctgggcctttgccctgccctatgccaagctgcggcggctggccagctctgtgtgcaccgtgtggacctgtgtgatcatcgtgtgcaagatgctgtaccagctgcagaccatcaagccagagaacttctctgtgaactgcagcctgcccaatgaaaaccagaccaacatccccttcaatgagctgaacaagagcctgctgtacagcgcccccatcgaccccacagagtgggtgggcctgaggaagagcagccccctgctggtgtacctgaggaacaacctgctgatgctggccatcctggcctttgaggtgaccatctaccgccaccaggagtactaccggggcaggaacaacctgacagcccctgtgtccaggaccatcttccatgacatcacccggctgcacctggatgatggcctcatcaactgtgccaagtacttcatcaactacttcttctacaagtttggcctggagacctgcttcctgatgtctgtgaatgtgattggccagaggatggacttctacgccatgatccacgcctgctggctgattgctgtgctgtacagaagaagaaggaaggccatcgccgagatctggcccaagtactgctgcttcctggcctgcatcatcaccttccagtacttcatctgcatcggcatccccccagccccctgccgggactacccctggaggttcaagggggccagcttcaatgacaacatcatcaagtggctgtacttcccagacttcatcgtgcggcccaaccctgtgttcctggtgtatgacttcatgctgctgctgtgtgccagcctgcagaggcagatctttgaagatgagaacaaggctgctgtgcgcatcatggccggggacaacgtggagatctgcatgaacctggatgctgccagcttcagccagcacaacccctag

SEQ ID NO: 164262 - DNA, 1941 bp, synthetic construct
  misc_feature 1..1941: note = Description of Artificial Sequence: Synthetic coding sequence
  source 1..1941: mol_type = other DNA
atgacagagagcggcatggcccgggaggagagtgatgatgagctgagcctgggccatggaagaagagacagcagtgacagcctgaagagcatcaacctggccgcctctgtggagagcgtgcacgtgaccttccctgagcagcagacagctgtgcggaggaagaggagcggcagcagcagcgagcccagccagaggagcagcttcagcagcaacagaagccagaggggcagcaccagcaccaggaacagcagccagaagggcagctctgtgctgagcatcaagcagaagggcaagcgggagctgtacatggagaagctgcaggagcacctgatcaaggccaaggccttcaccatcaagaagaccctggagatctacgtgcccatcaagcagttcttctacaacctgatccaccctgagtacagcgctgtgacagatgtgtatgtgctgatgttcctggccgacacagtggacttcatcatcatcgtgtttggcttctgggccttcggcaagcacagcgctgctgctgacatcaccagcagcctgtctgaggaccaggtgcccggccccttcctggtgatggtgctgatccagtttggcaccatggtggtggaccgggccctgtacctgaggaagacagtgctgggcaaggtgatcttccaggtgatcctggtgtttggcatccacttctggatgttcttcatcctgcccggggtgacagagaggaagttcagccagaacctggtggcccagctgtggtactttgtgaagtgtgtgtacttcggcctgagcgcctaccagatccgctgtggctaccccaccagggtgctgggcaacttcctgaccaagagctacaactacgtgaacctcttcctgttccagggcttccggctggtgcccttcctgacagagctgcgggctgtgatggactgggtgtggacagacaccaccctgagcctgagctcctggatctgtgtggaggacatctatgcccacatcttcatcctgaagtgctggagggagagcgagaagcccatcttcaccatgtctgcccagcagagccagctgaaggtgatggaccagcagagcttcaacaagttcatccaggccttcagccgggacaccggggccatgcagttcctggagaactatgagaaggaggacatcaccgtggccgagctggagggcaacagcaacagcctgtggaccatcagcccccccagcaagcagaagatgattcatgagctgctggaccccaacagcagcttctctgtggtgttctcctggagcatccagaggaacctgagcctgggcgccaagtctgagatcgccacagacaagctgtccttccccctgaagaacatcaccaggaagaacatcgccaagatgattgctggcaacagcacagagagcagcaagacccctgtgaccatcgagaagatctacccctactacgtgaaggcccccagcgacagcaacagcaagcccatcaagcagctgctgtctgagaacaacttcatggacatcaccatcatcctgagccgggacaacaccaccaagtacaacagcgagtggtgggtgctgaacctgaccggcaaccgcatctacaaccccaacagccaggccctggagctggtggtgttcaatgacaaggtgtccccacccagcctgggcttcctggccggctacggcatcatgggcctgtatgcctctgtggtgctggtgattggcaagtttgtgcgggagttcttcagcggcatcagccacagcatcatgtttgaggagctgcccaacgtggaccgcatcctgaagctgtgcacagacatcttcctggtgcgggagaccggggagctggagctggaggaggacctgtatgccaagctgatcttcctgtaccgcagccctgagaccatgatcaagtggacccgggagaagaccaactag

SEQ ID NO: 164263 - DNA, 2130 bp, synthetic construct
  misc_feature 1..2130: note = Description of Artificial Sequence: Synthetic coding sequence
  source 1..2130: mol_type = other DNA
atgacagagagcggcatggcccgggaggagagtgatgatgagctgagcctgggccatggaagaagagacagcagtgacagcctgaagagcatcaacctggccgcctctgtggagagcgtgcacgtgaccttccctgagcagcagacagctgtgcggaggaagaggagcggcagcagcagcgagcccagccagaggagcagcttcagcagcaacagaagccagaggggcagcaccagcaccaggaacagcagccagaagggcagctctgtgctgagcatcaagcagaagggcaagcgggagctgtacatggagaagctgcaggagcacctgatcaaggccaaggccttcaccatcaagaagaccctggagatctacgtgcccatcaagcagttcttctacaacctgatccaccctgagtacagcgctgtgacagatgtgtatgtgctgatgttcctggccgacacagtggacttcatcatcatcgtgtttggcttctgggccttcggcaagcacagcgctgctgctgacatcaccagcagcctgtctgaggaccaggtgcccggccccttcctggtgatggtgctgatccagtttggcaccatggtggtggaccgggccctgtacctgaggaagacagtgctgggcaaggtgatcttccaggtgatcctggtgtttggcatccacttctggatgttcttcatcctgcccggggtgacagagaggaagttcagccagaacctggtggcccagctgtggtactttgtgaagtgtgtgtacttcggcctgagcgcctaccagatccgctgtggctaccccaccagggtgctgggcaacttcctgaccaagagctacaactacgtgaacctcttcctgttccagggcttccggctggtgcccttcctgacagagctgcgggctgtgatggactgggtgtggacagacaccaccctgagcctgagctcctggatctgtgtggaggacatctatgcccacatcttcatcctgaagtgctggagggagagcgagaagcgctacccccagccccggggccagaagaagaagaaggtggtgaagtatggcatgggcggcatgatcatcgtgctgctgatctgcatcgtgtggttccccctgctcttcatgagcctcatcaagtctgtggccggggtcatcaaccagcccctggatgtgtctgtgaccatcaccctgggcggctaccagcccatcttcaccatgtctgcccagcagagccagctgaaggtgatggaccagcagagcttcaacaagttcatccaggccttcagccgggacacaggagccatgcagttcctggagaactatgagaaggaggacatcaccgtggccgagctggagggcaacagcaacagcctgtggaccatcagcccccccagcaagcagaagatgatccacgagctgctggaccccaacagcagcttctctgtggtgttctcctggagcatccagaggaacctgagcctgggcgccaagtcagaaattgccacagacaagctgtccttccccctgaagaacatcaccaggaagaacatcgccaagatgattgctggcaacagcacagagagcagcaagacccctgtgaccatcgagaagatctacccctactacgtgaaggcccccagcgacagcaacagcaagcccatcaagcagctgctgtctgagaacaacttcatggacatcaccatcatcctgagccgggacaacaccaccaagtacaacagcgagtggtgggtgctgaacctgactggaaaccgcatctacaaccccaacagccaggccctggagctggtggtgttcaatgacaaggtgagcccccccagcctgggcttcctggccggctacggcatcatgggcctgtatgcctctgtggtgctggtgattggcaagtttgtgcgggagttcttcagcggcatcagccacagcatcatgtttgaggagctgcccaacgtggaccgcatcctgaagctgtgcacagacatcttcctggtgcgggagactggagagctggagctggaggaggacctgtatgccaagctgatcttcctgtaccgcagccctgagaccatgatcaagtggacccgggagaagaccaactag

SEQ ID NO: 164264 - DNA, 2565 bp, synthetic construct
  misc_feature 1..2565: note = Description of Artificial Sequence: Synthetic coding sequence
  source 1..2565: mol_type = other DNA
atggccctgcggctggtggccgactttgacctgggcaaggatgtgctgccctggctgcgggcccagagagctgtgtctgaggccagcggggccggcagcggcggcgcagatgtgctggagaatgactatgagagcctgcacgtgctgaatgtggagagaaatggaaacatcatctacacctacaaggatgacaagggaaatgtggtgtttggcctgtatgactgccagacccggcagaatgagctgctgtacacctttgagaaggacctgcaggtgttcagctgcagcgtgaacagcgagaggaccctgctggccgccagcctggtgcagagcaccaaggagggcaagagaaatgagctgcagcccggcagcaagtgcctgaccctgctggtggagatccaccctgtgaacaacgtgaaggtgctgaaggctgtggacagctacatctgggtgcagttcctgtacccccacatcgagagccaccccctgcctgagaaccacctgctgctgatcagcgaggagaagtacatcgagcagttccgcatccacgtggcccaggaggatggcaacagagtggtgatcaagaacagcggccacctgccccgggacagaattgctgaagattttgtgtgggcccagtgggacatgtctgagcagaggctgtactacatcgacctgaagaagagccgcagcatcctgaagtgcatccagttctatgcagatgagagctacaacctgatgtttgaggtgcccctggacatcagcctgagcaacagcggcttcaagctggtgaactttggctgtgactaccaccagtacagagacaagttcagcaagcacctgaccctgtgtgtgttcaccaaccacacaggcagcctgtgtgtgtgctacagccccaagtgtgcctcctggggccagatcacctacagcgtcttctacatccacaagggccacagcaagaccttcaccaccagcctggagaatgtgggcagccacatgaccaagggcatcaccttcctgaacctggactactacgtggccgtgtacctgcccggccacttcttccacctgctgaatgtgcagcacccagacctgatctgccacaacctcttcctgactggaaataatgagatgattgacatgctgccccactgccccctgcagagcctgagcggcagcctggtgctggactgctgcagcggcaagctgtaccgggccctgctgagccagagcagcctgctgcagctgctgcagaacacctgcctggactgtgagaagatggccgccctgcactgtgccctgtactgcggccagggcgcccagttcctggaggcccagatcatccagtggatcagtgaaaatgtgtctgcctgccacagctttgacctgatccaggagttcatcatcgccagcagctactggagcgtgtacagcgagaccagcaacatggacaagctgctgccccacagctctgtgctgacctggaacacagagatccctggcatcaccctggtgacagaagatattgccctgcccctgatgaaggtgctgtccttcaagggctactgggagaagctgaacagcaacctggagtatgtgaagtatgccaagccccacttccactacaacaacagcgtggtgcggcgggagtggcacaacctgatcagcgaggagaagacaggcaagagaagatctgctgcctacgtgaggaacatcctggacaatgctgtgaaggtgatcagcaacctggaggccaggaacctgggcccccggctgacccccctgctgcaggaggaggacagccaccagaggctgctgatgggcctgatggtgtctgagctgaaggaccacttcctgcggcacctgcagggcgtggagaagaagaagattgagcagatggtgctggactacatcagcaagctgctggacctgatctgccacatcgtggagaccaactggaggaagcacaacctgcacagctgggtgctgcacttcaacagccggggcagcgctgctgagtttgctgtgttccacatcatgacccgcatcctggaggccaccaacagcctcttcctgcccctgcccccaggcttccacaccctgcacaccatcctgggcgtgcagtgcctgcccctgcacaacctgctgcactgcattgattctggagtgctgctgctgacagaaacagctgtgatccggctgatgaaggacctggacaacacagagaagaatgagaagctgaagttcagcatcatcgtgcggctgccccccctgattggccagaagatctgccgcctgtgggaccaccccatgagcagcaacatcatcagcaggaaccacgtgacccggctgctgcagaactacaagaagcagcccagaaattccatgatcaacaagagcagcttctctgtggagttcctgcccctgaactacttcatcgagatcctgacagacatcgagagcagcaaccaggccctgtacccctttgagggccatgacaacgtggatgctgagtttgtggaggaggccgccctgaagcacacagccatgctgctgggcctgtag

SEQ ID NO: 164265 - DNA, 528 bp, synthetic construct
  misc_feature 1..528: note = Description of Artificial Sequence: Synthetic coding sequence
  source 1..528: mol_type = other DNA
atgacccgcatcctggaggccaccaacagcctcttcctgcccctgcccccaggcttccacaccctgcacaccatcctgggcgtgcagtgcctgcccctgcacaacctgctgcactgcatcgacagcggcgtgctgctgctgacagaaacagctgtgatccggctgatgaaggacctggacaacacagagaagaatgagaagctgaagttcagcatcatcgtgcggctgcccccactcatcggccagaagatctgccgcctgtgggaccaccccatgagcagcaacatcatcagcagaaatcatgtgacccggctgctgcagaactacaagaagcagcccaggaacagcatgatcaacaagagcagcttctctgtggagttcctgcccctgaactacttcatcgagatcctgacagacatcgagagcagcaaccaggccctgtacccctttgagggccatgacaacgtggatgctgagtttgtggaggaggccgccctgaagcacacagccatgctgctgggcctgtag

SEQ ID NO: 164266 - DNA, 873 bp, synthetic construct
  misc_feature 1..873: note = Description of Artificial Sequence: Synthetic coding sequence
  source 1..873: mol_type = other DNA
atggccaaccccaagctgctgggcatgggcctgtctgaggccgaggccatcggggctgacagcgccaggtttgaggagctgctgctgcaggccagcaaggagctgcagcaggcccagaccaccaggcctgagagcacccagatccagccccagcccggcttctgcatcaagaccaacagcagcgagggcaaggtgttcatcaacatctgccacagccccagcatccccccaccagcagatgtgacagaggaggagctgctgcagatgctggaggaggaccaggccggcttccgcatccccatgagcctgggggagccccacgccgagctggatgccaagggccagggctgcacagcctatgatgtggccgtgaacagcgacttctacagaaggatgcagaacagcgacttcctgcgggagctggtgatcaccatcgcccgggagggcctggaggacaagtacaacctgcagctgaaccctgagtggaggatgatgaagaaccggcccttcatgggcagcatcagccagcagaacatccgctctgagcagaggccccgcatccaggagctgggggacctgtacaccccagcccctggccgggcagagagcggccctgagaagccccacctgaacctgtggctggaggccccagacctgctgctggccgaggtggacctgcccaagctggatggagccctgggcctgagcctggagattggagaaaatcggctggtgatgggcggcccccagcagctgtaccacctggatgcctacatccccctgcagatcaacagccatgagagcaaggccgccttccacaggaagaggaagcagctgatggtggccatgcccctgctgcctgtgcccagctag

SEQ ID NO: 164267 - DNA, 942 bp, synthetic construct
  misc_feature 1..942: note = Description of Artificial Sequence: Synthetic coding sequence
  source 1..942: mol_type = other DNA
atgctgctgagcaagatcaacagcctggcccacctgcgggccgccccctgcaatgacctgcacgccaccaagctggcccctgggaaggagaaggagcccctggagagccagtaccaggtgggccccctgctgggcagcggcggctttggatctgtgtacagcggcatccgggtgtctgacaacctgcctgtggccatcaagcacgtggagaaggaccgcatcagtgactggggcgagctgcccaacggcaccagggtgcccatggaggtggtgctgctgaagaaggtgagcagcggcttctctggagtcatccggctgctggactggtttgagaggccagacagctttgtgctgatcctggagaggcctgagcctgtgcaggacctgtttgacttcatcacagagcggggggccctgcaggaggagctggcccggagcttcttctggcaggtgctggaggccgtgcgccactgccacaactgtggggtgctgcaccgggacatcaaggatgagaacatcctgattgacctgaacagaggagagctgaagctgattgactttggaagtggggccctgctgaaggacacagtgtacacagactttgatggcaccagggtgtacagccccccagagtggatccgctaccaccgctaccacggccgctctgctgctgtgtggagcctgggcatcctgctgtatgacatggtgtgtggggacatcccctttgaacatgatgaggagatcatccggggccaggtgttcttccggcagagggtgtcctctgagtgccagcacctgatccgctggtgcctggccctgcggcccagcgaccggcccacctttgaggagatccagaaccacccctggatgcaggatgtgctgctgccccaggagacagctgagatccacctgcacagcctgagccctggccccagcaagtag

SEQ ID NO: 164268 - DNA, 936 bp, synthetic construct
  misc_feature 1..936: note = Description of Artificial Sequence: Synthetic coding sequence
  source 1..936: mol_type = other DNA
atgctgaccaagcccctgcagggccccccagcccctcctggcacccccaccccacctcctgggggcaaggaccgggaggcctttgaggccgagtaccgcctgggccccctgctgggcaagggcggctttggaacagtgtttgctggccaccggctgacagaccggctgcaggtggccatcaaggtgatccccaggaacagagtgctgggctggagccccctgagtgacagcgtgacctgccccctggaggtggccctgctgtggaaggtgggcgctgggggcggccaccctggggtcatccggctgctggactggtttgagacccaggagggcttcatgctggtgctggagcggcccctgcctgcccaggacctgtttgactacatcacagagaagggccccctgggggagggccccagccgctgcttcttcggccaggtggtggccgccatccagcactgccacagccggggcgtggtgcaccgggacatcaaggatgagaacatcctgattgacctgcggcggggctgtgccaagctgattgactttggaagtggggccctgctgcatgatgagccctacacagactttgatggcaccagggtgtacagccccccagagtggatcagccgccaccagtaccacgccctgcctgccaccgtgtggagcctgggcatcctgctgtatgacatggtgtgtggggacatcccctttgagcgggaccaggagatcctggaggccgagctgcacttccctgcccacgtgtccccagactgctgtgccctgatccgccgctgcctggcccccaagcccagcagccggcccagcctggaggagatcctgctggacccctggatgcagaccccagcagaagatgtgcccctgaaccccagcaaaggaggccctgcccccctggcctggagcctgctgccctag

SEQ ID NO: 164269 - DNA, 438 bp, synthetic construct
  misc_feature 1..438: note = Description of Artificial Sequence: Synthetic coding sequence
  source 1..438: mol_type = other DNA
atgctggtgctggagcggcccctgcctgcccaggacctgtttgactacatcacagagaagggccccctgggggagggccccagccgctgcttcttcggccaggtggtggccgccatccagcactgccacagccggggcgtggtgcaccgggacatcaaggatgagaacatcctgattgacctgcggcggggctgtgccaagctgattgactttggaagtggggccctgctgcatgatgagccctacacagactttgatggcaccagggtgtacagccccccagagtggatcagccgccaccagtaccacgccctgcctgccaccgtgtggagcctgggcatcctgctgtatgacatggtgtgtggggacatcccctttgagcgggaccaggagatcctggaggccgagctgcacttccctgcccacgtgagcccctag

SEQ ID NO: 164270 - DNA, 2925 bp, synthetic construct
  misc_feature 1..2925: note = Description of Artificial Sequence: Synthetic coding sequence
  source 1..2925: mol_type = other DNA
atggccaaggccggccgggccggcggccccccacctgggggcggggccccctggcacctgagaaatgtgctgagtgacagcgtggagagcagtgatgatgagttctttgatgcccgggaggagatggccgagggcaagaatgccatcctgattggcatgagccagtggaacagcaatgacctggtggagcagatcgagaccatgggcaagctggatgagcaccagggcgagggcacagccccctgcaccagcagcatcctgcaggagaagcagcgggagctgtacagagtgtccctgcggcggcagcgcttccctgcccagggcagcattgagatccacgaggacagcgaggagggctgcccccagaggagctgcaagacccacgtgctgctgctggtgctgcatggaggcaacatcctggacaccggggccggggaccccagctgcaaggctgctgacatccacaccttcagctctgtgctggagaaggtgacccgggcccacttccctgctgccctgggccacatcctgatcaagtttgtgccctgcccagccatctgcagcgaggccttcagcctggtgagccacctgaacccctacagccatgatgagggctgcctgagcagcagccaggaccacgtgcccctggccgccctgcccctgctggccatcagcagcccccagtaccaggatgctgtggccaccgtgattgagcgggccaaccaggtgtaccgggagttcctgaagagcagtgatggcatcggcttcagcggccaggtgtgcctgattggagactgtgtgggcggcctgctggcctttgatgccatctgctacagcgctggccccagcggggacagccctgccagcagcagcaggaagggcagcatcagcagcacccaggacacccctgtggccgtggaggaggactgcagcctggccagcagcaagaggctgagcaagagcaacatcgacatcagcagcggcctggaggatgaggagcccaagaggcccctgcccaggaagcagagcgacagcagcacctatgactgtgaggccatcacccagcaccacgccttcctgagcagcatccacagctctgtgctgaaggatgagagcgagaccccagctgctgggggcccccagctgcctgaggtgtccctgggccgctttgattttgatgtgtctgacttcttcctgtttggcagccccctgggcctggtgctggccatgagaagaacagtgctgcccggcctggatggcttccaggtgcggcctgcctgcagccaggtgtacagcttcttccactgtgccgaccccagcgccagccggctggagcccctgctggagcccaagttccacctggtgccccctgtgtctgtgccccgctaccagcgcttccccctgggagatggccagagcctgctgctggctgatgccctgcacacccacagccccctcttcctggagggcagcagccgggacagcccccccctgctggatgccccagccagccccccccaggccagccgcttccagaggcctggccgcaggatgtctgagggcagcagccacagcgagagcagcgagagcagtgacagcatggcccctgtgggcgccagccgcatcacagccaagtggtggggcagcaagagaattgattatgccctgtactgcccagatgtgctgacagccttccccaccgtggccctgccccacctgttccacgccagctactgggagagcacagatgtggtggccttcatcctgcggcaggtgatgagatatgaatctgtgaacatcaaggagagcgcccggctggaccctgctgccctgagccctgccaacccccgggagaagtggctgaggaagaggacccaggtgaagctgagaaatgtgacagccaaccaccgggccaatgatgtgattgctgctgaagatggcccccaggtgctggtgggccgcttcatgtatggccccctggacatggtggccctgaccggggagaaggtggacatcctggtgatggccgagcccagcagcggccgctgggtgcacctggacacagagatcaccaacagcagcggccgcatcacctacaacgtgccccggccccggcggctgggcgtgggcgtgtaccctgtgaagatggtggtgcggggggaccagacctgtgccatgagctacctgactgtgctgccccggggcatggagtgtgtggtgttcagcattgatggcagctttgctgcctctgtgtccatcatgggcagtgaccccaaggtgcggcctggagctgtggatgtggtgcgccactggcaggacctgggctacatgatcctgtacatcaccggccgcccagacatgcagaagcagagggtggtgtcctggctgagccagcacaacttcccccagggcatgatcttcttcagtgatggcctggtgcatgaccccctgcggcagaaggccatcttcctgaggaacctgatgcaggagtgcttcatcaagatctctgctgcctacggcagcaccaaggacatctctgtgtacagcgtgctgggcctgcctgccagccagatcttcatcgtgggccggcccaccaagaagtaccagacccagtgccagttcctgtctgagggctacgccgcccacctggccgccctggaggccagccacaggagccggcccaagaagaacaacagcaggatgatcctgaggaagggcagctttggcctgcacgcccagcctgagttcctgaggaagaggaaccacctgcggaggaccatgtctgtgcagcagcctgaccccccagctgccaaccccaagccagagcgggcccagagccagcctgagagtgacaaggaccacgagcggcccctgcctgccctgtcctgggcccggggcccccccaagtttgagagcgtgccctag

SEQ ID NO: 164271 - DNA, 2817 bp, synthetic construct
  misc_feature 1..2817: note = Description of Artificial Sequence: Synthetic coding sequence
  source 1..2817: mol_type = other DNA
atggccaaggccggccgggccggcggccccccacctgggggcggggccccctggcacctgagaaatgtgctgagtgacagcgtggagagcagtgatgatgagttctttgatgcccggggggagggcacagccccctgcaccagcagcatcctgcaggagaagcagcgggagctgtacagagtgtccctgcggcggcagcgcttccctgcccagggcagcattgagatccacgaggacagcgaggagggctgcccccagaggagctgcaagacccacgtgctgctgctggtgctgcatggaggcaacatcctggacaccggggccggggaccccagctgcaaggctgctgacatccacaccttcagctctgtgctggagaaggtgacccgggcccacttccctgctgccctgggccacatcctgatcaagtttgtgccctgcccagccatctgcagcgaggccttcagcctggtgagccacctgaacccctacagccatgatgagggctgcctgagcagcagccaggaccacgtgcccctggccgccctgcccctgctggccatcagcagcccccagtaccaggatgctgtggccaccgtgattgagcgggccaaccaggtgtaccgggagttcctgaagagcagtgatggcatcggcttcagcggccaggtgtgcctgattggagactgtgtgggcggcctgctggcctttgatgccatctgctacagcgctggccccagcggggacagccctgccagcagcagcaggaagggcagcatcagcagcacccaggacacccctgtggccgtggaggaggactgcagcctggccagcagcaagaggctgagcaagagcaacatcgacatcagcagcggcctggaggatgaggagcccaagaggcccctgcccaggaagcagagcgacagcagcacctatgactgtgaggccatcacccagcaccacgccttcctgagcagcatccacagctctgtgctgaaggatgagagcgagaccccagctgctgggggcccccagctgcctgaggtgtccctgggccgctttgattttgatgtgtctgacttcttcctgtttggcagccccctgggcctggtgctggccatgagaagaacagtgctgcccggcctggatggcttccaggtgcggcctgcctgcagccaggtgtacagcttcttccactgtgccgaccccagcgccagccggctggagcccctgctggagcccaagttccacctggtgccccctgtgtctgtgccccgctaccagcgcttccccctgggagatggccagagcctgctgctggctgatgccctgcacacccacagccccctcttcctggagggcagcagccgggacagcccccccctgctggatgccccagccagccccccccaggccagccgcttccagaggcctggccgcaggatgtctgagggcagcagccacagcgagagcagcgagagcagtgacagcatggcccctgtgggcgccagccgcatcacagccaagtggtggggcagcaagagaattgattatgccctgtactgcccagatgtgctgacagccttccccaccgtggccctgccccacctgttccacgccagctactgggagagcacagatgtggtggccttcatcctgcggcaggtgatgagatatgaatctgtgaacatcaaggagagcgcccggctggaccctgctgccctgagccctgccaacccccgggagaagtggctgaggaagaggacccaggtgaagctgagaaatgtgacagccaaccaccgggccaatgatgtgattgctgctgaagatggcccccaggtgctggtgggccgcttcatgtatggccccctggacatggtggccctgaccggggagaaggtggacatcctggtgatggccgagcccagcagcggccgctgggtgcacctggacacagagatcaccaacagcagcggccgcatcacctacaacgtgccccggccccggcggctgggcgtgggcgtgtaccctgtgaagatggtggtgcggggggaccagacctgtgccatgagctacctgactgtgctgccccggggcatggagtgtgtggtgttcagcattgatggcagctttgctgcctctgtgtccatcatgggcagtgaccccaaggtgcggcctggagctgtggatgtggtgcgccactggcaggacctgggctacatgatcctgtacatcaccggccgcccagacatgcagaagcagagggtggtgtcctggctgagccagcacaacttcccccagggcatgatcttcttcagtgatggcctggtgcatgaccccctgcggcagaaggccatcttcctgaggaacctgatgcaggagtgcttcatcaagatctctgctgcctacggcagcaccaaggacatctctgtgtacagcgtgctgggcctgcctgccagccagatcttcatcgtgggccggcccaccaagaagtaccagacccagtgccagttcctgtctgagggctacgccgcccacctggccgccctggaggccagccacaggagccggcccaagaagaacaacagcaggatgatcctgaggaagggcagctttggcctgcacgcccagcctgagttcctgaggaagaggaaccacctgcggaggaccatgtctgtgcagcagcctgaccccccagctgccaaccccaagccagagcgggcccagagccagcctgagagtgacaaggaccacgagcggcccctgcctgccctgtcctgggcccggggcccccccaagtttgagagcgtgccctag

SEQ ID NO: 164272 - DNA, 609 bp, synthetic construct
  misc_feature 1..609: note = Description of Artificial Sequence: Synthetic coding sequence
  source 1..609: mol_type = other DNA
atggccaccctcatctacgtggacaaggaaaatggagagcccggcaccagggtggtggccaaggatggcctgaagctgggcagcggccccagcatcaaggccctggatggccgcagccaggtgtccacccccaggtttgggaagacctttgatgcccccccagccctgcccaaggccaccaggaaggccctgggcaccgtgaacagagccacagagaagtctgtgaagaccaagggccccctgaagcagaagcagcccagcttcagcgccaagaagatgacagagaagacagtgaaggccaagagctctgtgcctgccagtgatgatgcctacccagaaattgagaagttcttccccttcaaccccctggactttgagagctttgacctgcctgaggagcaccagatcgcccacctgcccctgagcggcgtgcccctgatgatcctggatgaggagcgggagctggagaagctgttccagctgggcccccccagccctgtgaagatgcccagccccccctgggagagcaacctgctgcagagccccagcagcatcctgagcaccctggatgtggagctgccccctgtgtgctgtgacatcgacatctag

SEQ ID NO: 164273 - DNA, 609 bp, synthetic construct; identical to SEQ ID NO: 164272
  misc_feature 1..609: note = Description of Artificial Sequence: Synthetic coding sequence
  source 1..609: mol_type = other DNA

SEQ ID NO: 164274 - DNA, 609 bp, synthetic construct; identical to SEQ ID NO: 164272
  misc_feature 1..609: note = Description of Artificial Sequence: Synthetic coding sequence
  source 1..609: mol_type = other DNA

SEQ ID NO: 164275 - DNA, 543 bp, synthetic construct
  misc_feature 1..543: note = Description of Artificial Sequence: Synthetic coding sequence
  source 1..543: mol_type = other DNA
atggcccctggggtggcccggggccccaccccctactggaggctgcggctgggcggggccgccctgctgctgctgctgatccctgtggccgccgcccaggagcccccaggggccgcctgcagccagaacaccaacaagacctgtgaggagtgcctgaagaatgtgtcctgcctgtggtgcaacaccaacaaggcctgcctggactaccctgtgacctctgtgctgcccccagccagcctgtgcaagctgagcagcgcccgctggggcgtgtgctgggtgaactttgaggccctgatcatcaccatgtctgtggtgggcggcaccctgctgctgggcatcgccatctgctgctgctgctgctgcaggaggaagaggagcaggaagccagacagaagtgaggagaaggccatgagggagcgggaggagcggcgcatccggcaggaggagcggcgggcagagatgaagaccaggcatgatgagatcaggaagaagtatggcctcttcaaggaggagaacccctatgccaggtttgagaacaactag

SEQ ID NO: 164276 - DNA, 429 bp, synthetic construct
  misc_feature 1..429: note = Description of Artificial Sequence: Synthetic coding sequence
  source 1..429: mol_type = other DNA
atggcccctggggtggcccggggccccaccccctactggaggctgcggctgggcggggccgccctgctgctgctgctgatccctgtggccgccgcccaggagcccccaggggccgcctgcagccagaacaccaacaagacctgtgaggagtgcctgaagaatgtgtctgcctgcctgaagaagaagaccaggatgctggacctgaagaccaccaaggccctgcagcacatcagcccagatgccagctgtgaggtgcacgccccccagcccagccctgctggccggccccggggccactgcggcctgctgaccctggccagcgagcccgccagcctgcccggccaggccgccggggagctgcccctgaaggacagccccctggtgctgcagacaggagacctgctcttccctgtgcacctgtgcttctag

SEQ ID NO: 164277 - DNA, 576 bp, synthetic construct
  misc_feature 1..576: note = Description of Artificial Sequence: Synthetic coding sequence
  source 1..576: mol_type = other DNA
atggccaccctcatctacgtggacaaggagattggagagcccggcaccagggtggccgccaaggatgtgctgaagctggagagccggcccagcatcaaggccctggatggcatcagccaggtgctgaccaggagatttgggaagacctatgatgcccccagcgccctgcccaaggccaccaggaaggccctgggcaccgtgaacagagccacagagaagtctgtgaagaccaacggccccaggaagcagaagcagcccagcttcagcgccaagaagatgacagagaagacagtgaagaccaagagctctgtgcctgccagtgatgatgcctacccagaaattgagaagttcttccccttcaacctgctggactttgagagctttgacctgcctgaggagcggcagatcgcccacctgcccctgagcggcgtgcccctgatgatcctggatgaggagggggagctggagaagctgttccagctgggcccccccagccctgtgaagatgcccagccccccctgggagtgcaacctgtttgctgtgtccttcaagcacagcgtggaccccggctgctag

SEQ ID NO: 164278 - DNA, 2586 bp, synthetic construct
  misc_feature 1..2586: note = Description of Artificial Sequence: Synthetic coding sequence
  source 1..2586: mol_type = other DNA
atgacaggccgggcccgggcccgggcccggggccgggcccggggccaggagacagcccagctggtgggcagcacagccagccagcagcccggctacatccagccccggccccagcccccacctgctgagggggagctgtttggccggggccggcagaggggcacagctgggggcacagccaagagccagggcctgcagatctctgctggcttccaggagctgagcctggccgagcggggcggcagaagaagagacttccatgacctgggcgtgaacacccggcagaacctggaccacgtgaaggagagcaagacaggcagcagcggcatcatcgtgcggctgagcaccaaccacttccggctgaccagccggccccagtgggccctgtaccagtaccacatcgactacaaccccctgatggaggcccggcggctgcggagcgccctgctcttccagcacgaggacctgattggaaaatgtcatgcctttgatggcaccatcctcttcctgcccaagaggctgcagcagaaggtgacagaggtgttcagcaagaccagaaatggagaagatgtgcgcatcaccatcaccctgaccaatgagctgccccccaccagccccacctgcctgcagttctacaacatcatcttccggcggctgctgaagatcatgaacctgcagcagatcggcaggaactactacaaccccaatgaccccatcgacatccccagccaccggctggtgatctggccaggcttcaccaccagcatcctgcagtatgagaacagcatcatgctgtgcacagatgtgagccacaaggtgctgcggtctgagaccgtgctggacttcatgttcaacttctaccaccagacagaggagcacaagttccaggagcaggtgtccaaggagctgattggcctggtggtgctgaccaagtacaacaacaagacctacagagtggatgacatcgactgggaccagaaccccaagagcaccttcaagaaggcagatggcagcgaggtgtccttcctggagtactacaggaagcagtacaaccaggagatcacagacctgaagcagcctgtgctggtgtcccagcccaagagaagaagaggccctgggggcaccctgcccggccctgccatgctgatccctgagctgtgctacctgaccggcctgacagacaagatgagaaatgacttcaacgtgatgaaggacctggccgtgcacacccggctgaccccagagcagaggcagcgggaggtgggccgcctgattgactacatccacaagaatgacaacgtgcagcgggagctgcgggactggggcctgagctttgacagcaacctgctgtccttcagcggccgcatcctgcagacagagaagatccaccagggcggcaagacctttgactacaacccccagtttgctgactggagcaaggagaccaggggggcccccctcatctctgtgaagcccctggacaactggctgctgatctacaccaggagaaattatgaagctgccaacagcctcatccagaacctcttcaaggtgaccccagccatgggcatgcagatgaggaaggccatcatgattgaggtggatgacagaacagaggcctacctgcgggtgctgcagcagaaggtgacagctgacacccagatcgtggtgtgcctgctgagcagcaacaggaaggacaagtatgatgccatcaagaagtacctgtgcacagactgccccacccccagccagtgtgtggtggcccggaccctgggcaagcagcagacagtgatggccatcgccaccaagatcgccctgcagatgaactgcaagatgggcggggagctgtggagggtggacatccccctgaagctggtgatgattgtgggcatcgactgctaccatgacatgacagctggaagaagaagcattgctggctttgtggccagcatcaatgaaggcatgacccgctggttcagccgctgcatcttccaggaccggggccaggagctggtggatggcctgaaggtgtgcctgcaggccgccctgcgggcctggaacagctgcaatgagtacatgcccagccgcatcatcgtgtacagagatggagtgggagatggccagctgaagaccctggtgaactatgaggtgccccagttcctggactgcctgaagagcatcggccggggctacaacccccggctgaccgtcatcgtggtgaagaagagggtgaacacccgcttctttgcccagagcggcggccgcctgcagaaccccctgcccggcaccgtgattgatgtggaggtgaccaggcctgagtggtatgacttcttcatcgtgtcccaggccgtgcgcagcggctctgtgagccccacccactacaacgtcatctatgacaacagcggcctgaagccagaccacatccagaggctgacctacaagctgtgccacatctactacaactggccaggagtcatccgggtgcctgccccctgccagtatgcccacaagctggccttcctggtgggccagagcatccaccgggagcccaacctgagcctgagcaaccggctgtactacctgtag

SEQ ID NO: 164279 - DNA, 369 bp, synthetic construct
  misc_feature 1..369: note = Description of Artificial Sequence: Synthetic coding sequence
  source 1..369: mol_type = other DNA
atgacaggccgggcccgggcccgggcccggggccgggcccggggccaggagacagcccagctggtgggcagcacagccagccagcagcccggctacatccagccccggccccagcccccacctgctgagggggagctgtttggccggggccggcagaggggcacagctgggggcacagccaagagccagggcctgcagatctctgctggcttccaggagctgagcctggccgagcggggcggcagaagaagagacttccatgacctgggcgtgaacacccggcagaacctggaccacgtgaaggagagcaagacaggcagcagcggcatcatcgtgcggctgagcaccaaccacttccggctgacctag

SEQ ID NO: 164280 - DNA, 453 bp, synthetic construct
  misc_feature 1..453: note = Description of Artificial Sequence: Synthetic coding sequence
  source 1..453: mol_type = other DNA
atgacaggccgggcccgggcccgggcccggggccgggcccggggccaggagacagcccagctggtgggcagcacagccagccagcagcccggctacatccagccccggccccagcccccacctgctgagggggagctgtttggccggggccggcagaggggcacagctgggggcacagccaagagccagggcctgcagatctctgctggcttccaggagctgagcctggccgagcggggcggcagaagaagagacttccatgacctgggcgtgaacacccggcagaacctggaccacgtgaaggagagcaagacaggcagcagcggcatcatcgtgcggctgagcaccaaccacttccggctgaccagccggccccagtgggccctgtaccagtaccacatcgactacaaccccctgatggaggcccggcggctgcggagcgccctgctgtag

SEQ ID NO: 164281 - DNA, 519 bp, synthetic construct
  misc_feature 1..519: note = Description of Artificial Sequence: Synthetic coding sequence
  source 1..519: mol_type = other DNA
atgacaggccgggcccgggcccgggcccggggccgggcccggggccaggagacagcccagctggtgggcagcacagccagccagcagcccggctacatccagccccggccccagcccccacctgctgagggggagctgtttggccggggccggcagaggggcacagctgggggcacagccaagagccagggcctgcagatctctgctggcttccaggagctgagcctggccgagcggggcggcagaagaagagacttccatgacctgggcgtgaacacccggcagaacctggaccacgtgaaggagagcaagacaggcagcagcggcatcatcgtgcggctgagcaccaaccacttccggctgaccagccggccccagtgggccctgtaccagtaccacatcgactacaaccccctgatggaggcccggcggctgcggagcgccctgctcttccagcacgaggacctgattggaaaatgtcatgcctttgatggcaccatcctcttcctgcccaagtag

SEQ ID NO: 164282 - DNA, 498 bp, synthetic construct
  misc_feature 1..498: note = Description of Artificial Sequence: Synthetic coding sequence
  source 1..498: mol_type = other DNA
atgacaggccgggcccgggcccgggcccggggccgggcccggggccaggagacagcccagctggtgggcagcacagccagccagcagcccggctacatccagccccggccccagcccccacctgctgagggggagctgtttggccggggccggcagaggggcacagctgggggcacagccaagagccagggcctgcagatctctgctggcttccaggagctgagcctggccgagcggggcggcagaagaagagacttccatgacctgggcgtgaacacccggcagaacctggaccacgtgaaggagagcaagacaggcagcagcggcatcatcgtgcggctgagcaccaaccacttccggctgaccagccggccccagtgggccctgtaccagtaccacatcgactacaaccccctgatggaggcccggcggctgcggagcgccctgctcttccagcacgaggacctgattggaaaatgtcatgcctttgatggatag

SEQ ID NO: 164283 - DNA, 2922 bp, synthetic construct
  misc_feature 1..2922: note = Description of Artificial Sequence: Synthetic coding sequence
  source 1..2922: mol_type = other DNA
atggaccccttccggcccagcttccggggccagagccccatccaccccagccagtgccaggccgtgaggatgcctggctgctggccccaggccagcaagcccctggaccctgccctgggccgcggggccccagctggccggggccacgtgtttgggaagccagaggagcccagcacccagaggggccctgcccagcgggagagcgtgggcctggtgtccatgttccggggcctgggcatcgagaccgtgtccaagacccccctgaagcgggagatgctgcccagcggccggggcatcctgggccggggcctgagcgccaacctggtgaggaaggaccgggaggagctgagccccaccttctgggaccccaaggtgctggccgccggggacagcaagatggccgagacctctgtgggctggagcaggaccctgggccggggcagcagtgatgccagcctgctgcccctgggccgggccgccggcggcatcagccgggaggtggacaagccaccctgcaccttcagcacccccagccggggccccccccagctgagcagccccccagccctgccccagagccccctgcacagcccagaccggcccctggtgctgactgtggagcacaaggagaaggagctgattgtgaagcagggcagcaagggcaccccccagagcctgggcctgaacctggtgaagatccagtgccacaatgaagctgtgtaccagtaccacgtgaccttcagccccaacgtggagtgcaagtccatgagatttggcatgctgaaggaccaccaggccgtgactggaaatgtgacagcctttgatggcagcatcctgtacctgcctgtgaagctgcagcaggtgctggagctgaagagccagaggaagacagattctgctgagatcagcatcaagatccagatgaccaagatcctggagccctgcagcgacctgtgcatccccttctacaacgtggtgttccggcgggtgatgaagctgctggacatgaagctggtgggcaggaacttctatgaccccaccagcgccatggtgctgcagcagcaccggctgcagatctggccaggctacgccgccagcatccggaggacagatggcggcctcttcctgctggctgatgtgagccacaaggtgatcagaaatgactgtgtgctggatgtgatgcacgccatctaccagcagaacaaggagcacttccaggatgagtgcaccaagctgctggtgggcaacatcgtcatcacccgctacaacaacagaacctacagaattgatgatgtggactggaacaagacccccaaggacagcttcaccatgtctgatggcaaggagatcaccttcctggagtactacagcaagaactacggcatcaccgtgaaggaggaggaccagcccctgctgatccaccggcccagcgagcggcaggacaaccacggcatgctgctgaagggggagatcctgctgctgcctgagctgtccttcatgacaggcatccctgagaagatgaagaaggacttccgggccatgaaggacctggcccagcagatcaacctgagccccaagcagcaccacagcgccctggagtgcctgctgcagagaattgccaagaatgaggccgccaccaatgagctgatgcgctggggcctgcggctgcagaaggatgtgcacaagattgagggccgggtgctgcccatggagcgcatcaacctgaagaacaccagcttcatcaccagccaggagctgaactgggtgaaggaggtgacccgggaccccagcatcctgaccatccccatgcacttctgggccctcttctaccccaagagggccatggaccaggcccgggagctggtgaacatgctggagaagattgctggccccatcggcatgaggatgagccccccagcctgggtggagctgaaggatgacagaattgagacctacgtgaggaccatccagagcaccctgggcgctgagggcaagatccagatggtggtgtgcatcatcatgggccccagagatgacctgtatggagccatcaagaagctgtgctgcgtgcagagccctgtgcccagccaggtggtgaatgtgaggaccatcggccagcccacccggctgcggtctgtggcccagaagatcctgctgcagatcaactgcaagctgggcggggagctgtggggcgtggacatccccctgaagcagctgatggtgattggcatggatgtgtaccatgaccccagccggggcatgaggtctgtggtgggctttgtggccagcatcaacctgaccctgaccaagtggtacagccgggtggtgttccagatgccccaccaggagatcgtggacagcctgaagctgtgcctggtgggcagcctgaagaagttctatgaggtgaaccactgcctgcctgagaagatcgtggtgtacagagatggagtgtctgatggccagctgaagacagtggccaactatgagatcccccagctgcagaagtgctttgaggcctttgagaactaccagcccaagatggtggtgtttgtggtgcagaagaagatcagcaccaacctgtacctggccgccccccagaactttgtgacccccaccccaggcaccgtggtggaccacaccatcaccagctgtgagtgggtggacttctacctgctggcccaccacgtgcggcagggctgcggcatccccacccactacgtgtgtgtgctgaacacagccaacctgagcccagaccacatgcagaggctgaccttcaagctgtgccacatgtactggaactggccaggcaccatccgggtgcctgccccctgcaagtatgcccacaagctggccttcctgagcggccacatcctgcaccacgagcccgccatccagctgtgtgagaacctcttcttcctgtag

SEQ ID NO: 164284 - DNA, 2922 bp, synthetic construct; identical to SEQ ID NO: 164283
  misc_feature 1..2922: note = Description of Artificial Sequence: Synthetic coding sequence
  source 1..2922: mol_type = other DNA

SEQ ID NO: 164285 - DNA, 639 bp, synthetic construct
  misc_feature 1..639: note = Description of Artificial Sequence: Synthetic coding sequence
  source 1..639: mol_type = other DNA
atgaaggtgttcaagttcatcggcctgatgatcctgctgaccagcgccttctctgctggcagcggccagagccccatgacagtgctgtgcagcattgactggttcatggtgacagtgcaccccttcatgctgaacaatgatgtgtgtgtgcacttccacgagctgcacctgggcctgggctgcccccccaaccacgtgcagccccacgcctaccagttcacctacagagtgacagaatgtggcatccgggccaaggctgtgtcccaggacatggtgatctacagcacagagatccactacagcagcaagggcacccccagcaagtttgtgattcctgtgtcctgtgccgccccccagaagagcccctggctgaccaagccctgcagcatgagggtggccagcaagagccgggccacagcccagaaggatgagaagtgctatgaggtgttcagcctgagccagagcagccagaggcccaactgtgactgccccccctgtgtgttttctgaggaggagcacacccaggtgccctgccaccaggccggggcccaggaggcccagcccctgcagcccagccacttcctggacatcagcgaggactggagcctgcacacagatgacatgattggctccatgtag

SEQ ID NO: 164286 - DNA, 294 bp, synthetic construct
  misc_feature 1..294: note = Description of Artificial Sequence: Synthetic coding sequence
  source 1..294: mol_type = other DNA
atgaggcccctgctgtgtgccctgaccggcctggccctgctgcgggctgctggcagcctggccgctgctgagcccttcagcccccccaggggggacagcgcccagagcacagcctgtgacagacacatggctgtgcagaggcggctggatgtgatggaggagatggtggagaagacagtggaccacctgggcacagaggtgaagggcctgctgggcctgctggaggagctggcctggaacctgcccccaggccccttcagccctgccccagacctgctgggagatggcttctag

SEQ ID NO: 164287 - DNA, 264 bp, synthetic construct
  misc_feature 1..264: note = Description of Artificial Sequence: Synthetic coding sequence
  source 1..264: mol_type = other DNA
atgaggcccctgctgtgtgccctgaccggcctggccctgctgcgggctgctggcagcctggccgctgctgagcccttcagcccccccaggggggacagcgcccagagcacagcctgtgacagacacatggctgtgcagaggcggctggatgtgatggaggagatggccagcgagccctggagctggagccctgctgtgggcggcggggccccagcccggcagaggccccagaaccagccctgccccctggacttcctgccctag

SEQ ID NO: 164288 - DNA, 168 bp, synthetic construct
  misc_feature 1..168: note = Description of Artificial Sequence: Synthetic coding sequence
  source 1..168: mol_type = other DNA
atggctgtgcagaggcggctggatgtgatggaggagatggtggagaagacagtggaccacctgggcacagaggtgaagggcctgctgggcctgctggaggagctggcctggaacctgcccccaggccccttcagccctgccccagacctgctgggagatggcttctag

SEQ ID NO: 164289 - DNA, 2244 bp, synthetic construct
  misc_feature 1..2244: note = Description of Artificial Sequence: Synthetic coding sequence
  source 1..2244: mol_type = other DNA
atgaaccacagccccctgaagacagccctggcctatgagtgcttccaggaccaggacaacagcaccctggccctgcccagcgaccagaagatgaagacaggcaccagcggccggcagagggtgcaggagcaggtgatgatgacagtgaagaggcagaagagcaagagcagccagagcagcaccctgagccacagcaacagaggctccatgtatgatggcctggccgacaactacaactacggcaccaccagccgcagcagctactacagcaagttccaggccggaaatggctcctggggctaccccatctacaacggcaccctgaagcgggagccagacaacagacgcttcagcagctacagccagatggagaactggagccgccactacccccggggcagctgcaacaccaccggggccggcagtgacatctgcttcatgcagaagatcaaggccagccgctctgagccagacctgtactgtgacccccggggcaccctgaggaagggcaccctgggcagcaagggccagaagaccacccagaaccgctacagcttctacagcacctgcagcggccagaaggccatcaagaagtgccctgtgcggccccccagctgtgccagcaagcaggaccctgtgtacatcccccccatcagctgcaacaaggacctgagctttggccacagccgggccagcagcaagatctgcagcgaggacattgaatgttctggcctgaccatccccaaggctgtgcagtacctgagcagccaggatgagaagtaccaggccatcggggcctactacatccagcacacctgcttccaggatgagagcgccaagcagcaggtgtaccagctgggcggcatctgcaagctggtggacctgctgcggagccccaaccagaatgtgcagcaggccgccgccggggccctgaggaacctggtgttccgcagcaccaccaacaagctggagacccggcggcagaatggcatccgggaggccgtgtccctgctgcggaggactggaaatgctgagatccagaagcagctgaccggcctgctgtggaacctgagcagcacagatgagctgaaggaggagctgattgctgatgccctgcctgtgctggccgacagagtcatcatccccttcagcggctggtgtgatggcaacagcaacatgagccgggaggtggtggaccctgaggtgttcttcaatgccaccggctgcctgaggaagaggctgggcatgagggagctgctggccctggtgccccagagggccaccagcagccgggtgaacctgagcagcgcagatgctggccggcagaccatgaggaactacagcggcctgattgacagcctgatggcctacgtgcagaactgtgtggccgccagccgctgtgatgacaagtctgtggagaactgcatgtgtgtgctgcacaacctgagctaccgcctggatgctgaggtgcccacccgctaccggcagctggagtacaatgccagaaatgcctacacagagaagagcagcacaggctgcttcagcaacaagagtgacaagatgatgaacaacaactatgactgccccctgcctgaggaggagaccaaccccaagggcagcggctggctgtaccacagtgatgccatccgcacctacctgaacctgatgggcaagagcaagaaggatgccaccctggaggcctgtgccggggccctgcagaacctgacagccagcaagggcctgatgagcagcggcatgagccagctgattggcctgaaggagaagggcctgccccagatcgcccggctgctgcagagcggcaacagtgatgtggtgcgcagcggggccagcctgctgagcaacatgagccgccaccccctgctgcaccgggtgatgggcaaccaggtgtttcctgaggtgacccggctgctgaccagccacacaggcaacaccagcaacagcgaggacatcctgagcagcgcctgctacacagtgaggaacctgatggccagccagccccagctggccaagcagtacttcagcagctccatgctgaacaacatcatcaacctgtgccgcagcagcgccagccccaaggctgctgaggccgcccggctgctgctgagtgacatgtggagcagcaaggagctgcagggcgtgctgcggcagcagggctttgacaggaacatgctgggcaccctggccggggccaacagcctgaggaacttcaccagccgcttctag

SEQ ID NO: 164290 - DNA, 2244 bp, synthetic construct; identical to SEQ ID NO: 164289
  misc_feature 1..2244: note = Description of Artificial Sequence: Synthetic coding sequence
  source 1..2244: mol_type = other DNA

SEQ ID NO: 164291 - DNA, 2181 bp, synthetic construct
  misc_feature 1..2181: note = Description of Artificial Sequence: Synthetic coding sequence
  source 1..2181: mol_type = other DNA
atgaaccacagccccctgaagacagccctggcctatgagtgcttccaggaccaggacaacagcaccctggccctgcccagcgaccagaagatgaagacaggcaccagcggccggcagagggtgcaggagcaggtgatgatgacagtgaagaggcagaagagcaagagcagccagagcagcaccctgagccacagcaacagaggctccatgtatgatggcctggccgacaactacaactacggcaccaccagccgcagcagctactacagcaagttccaggccggaaatggctcctggggctaccccatctacaacggcaccctgaagcgggagccagacaacagacgcttcagcagctacagccagatggagaactggagccgccactacccccggggcagctgcaacaccaccggggccggcagtgacatctgcttcatgcagaagatcaaggccagccgctctgagccagacctgtactgtgacccccggggcaccctgaggaagggcaccctgggcagcaagggccagaagaccacccagaaccgctacagcttctacagcacctgcagcggccagaaggccatcaagaagtgccctgtgcggccccccagctgtgccagcaagcaggaccctgtgtacatcccccccatcagctgcaacaaggacctgagctttggccacagccgggccagcagcaagatctgcagcgaggacattgaatgttctggcctgaccatccccaaggctgtgcagtacctgagcagccaggatgagaagtaccaggccatcggggcctactacatccagcacacctgcttccaggatgagagcgccaagcagcaggtgtaccagctgggcggcatctgcaagctggtggacctgctgcggagccccaaccagaatgtgcagcaggccgccgccggggccctgaggaacctggtgttccgcagcaccaccaacaagctggagacccggcggcagaatggcatccgggaggccgtgtccctgctgcggaggactggaaatgctgagatccagaagcagctgaccggcctgctgtggaacctgagcagcacagatgagctgaaggaggagctgattgctgatgccctgcctgtgctggccgacagagtcatcatccccttcagcggctggtgtgatggcaacagcaacatgagccgggaggtggtggaccctgaggtgttcttcaatgccaccggctgcctgaggaacctgagcagcgcagatgctggccggcagaccatgaggaactacagcggcctgattgacagcctgatggcctacgtgcagaactgtgtggccgccagccgctgtgatgacaagtctgtggagaactgcatgtgtgtgctgcacaacctgagctaccgcctggatgctgaggtgcccacccgctaccggcagctggagtacaatgccagaaatgcctacacagagaagagcagcacaggctgcttcagcaacaagagtgacaagatgatgaacaacaactatgactgccccctgcctgaggaggagaccaaccccaagggcagcggctggctgtaccacagtgatgccatccgcacctacctgaacctgatgggcaagagcaagaaggatgccaccctggaggcctgtgccggggccctgcagaacctgacagccagcaagggcctgatgagcagcggcatgagccagctgattggcctgaaggagaagggcctgccccagatcgcccggctgctgcagagcggcaacagtgatgtggtgcgcagcggggccagcctgctgagcaacatgagccgccaccccctgctgcaccgggtgatgggcaaccaggtgtttcctgaggtgacccggctgctgaccagccacactggaaacaccagcaacagcgaggacatcctgagcagcgcctgctacacagtgaggaacctgatggccagccagccccagctggccaagcagtacttcagcagctccatgctgaacaacatcatcaacctgtgccgcagcagcgccagccccaaggctgctgaggccgcccggctgctgctgagtgacatgtggagcagcaaggagctgcagggcgtgctgcggcagcagggctttgacaggaacatgctgggcaccctggccggggccaacagcctgaggaacttcaccagccgcttctag

SEQ ID NO: 164292 - DNA, 2646 bp, synthetic construct
  misc_feature 1..2646: note = Description of Artificial Sequence: Synthetic coding sequence
  source 1..2646: mol_type = other DNA
atggccgcccctggggccccagcagaatatggctacatcagaacagtgctgggccagcagatcctgggccagctggacagcagcagcctggccctgcccagcgaggccaagctgaagctggccggcagcagcggccggggcggccagacagtgaagagcctgcgcatccaggagcaggtgcagcagaccctggccaggaagggccgcagctctgtgggcaatggaaacctgcacaggaccagctctgtgcctgaatatgtgtacaacctgcacctggtggagaatgactttgtgggcggccgcagccctgtgcccaagacctatgacatgctgaaggccggcaccacagccacctatgagggccgctggggccggggcacagcccagtacagcagccagaagtctgtggaggagaggagcctgcggcaccccctgcggcggctggagatcagcccagacagcagccctgagcgggcccactacacccacagcgactaccagtacagccagaggagccaggccggccacaccctgcaccaccaggagagccggcgggccgccctgctggtgcccccaagatatgcccggagtgaaattgtgggcgtgtccagagctggcaccaccagccggcagaggcactttgacacctaccaccggcagtaccagcacggctctgtgtctgacacagtgtttgacagcatcccagccaacccagccctgctgacctacccccggcccggcaccagccgctccatgggcaacctgctggagaaggagaactacctgacagctggcctgactgtgggccaggtgcggcccctggtgcccctgcagcctgtgacccagaacagagccagccgcagctcctggcaccagagcagcttccacagcaccaggaccctgcgggaggccggccccagcgtggccgtggacagcagtggaagaagagcccacctgactgtgggccaggccgccgccggcggcagcggcaacctgctgacagagaggagcaccttcacagacagccagctgggcaatgctgacatggagatgaccctggagagagctgtgtccatgctggaggccgaccacatgctgcccagccgcatctctgctgctgccaccttcatccagcacgagtgcttccagaagtctgaggccaggaagagggtgaaccagctgcggggcatcctgaagctgctgcagctgctgaaggtgcagaatgaagatgtgcagagagctgtgtgtggggccctgaggaacctggtgtttgaagataatgacaacaagctggaggtggccgagctgaatggagtgccccggctgctgcaggtgctgaagcagacccgggacctggagaccaagaagcagatcacagaccacacagtgaacctgcggagcagaaatggctggccaggagctgtggcccacgcctgcaaccccagcaccctgggcggccagggcggccgcatcaccaggtctggagtgcgggaccagcctgaccagcacggcctgctgtggaacctgagcagcaatgacaagctgaagaacctgatgatcacagaggccctgctgaccctgacagagaacatcatcatccccttcagcggctggccagagggggactaccccaaggccaacggcctgctggactttgacatcttctacaacgtgacaggctgcctgaggaacatgagcagcgctggagcagatggcaggaaggccatgagaagatgtgatggcctgattgacagcctggtgcactacgtgcggggcaccatcgctgactaccagccagatgacaaggccacagagaactgtgtgtgcatcctgcacaacctgagctaccagctggaggccgagctgcctgagaagtacagccagaacatctacatccagaacagaaacatccagacagacaacaacaagagcatcggctgcttcggcagccgcagcaggaaggtgaaggagcagtaccaggatgtgcccatgcctgaggagaagagcaaccccaagggcgtggagtggctgtggcacagcatcgtcatccgcatgtacctgagcctcatcgccaagtctgtgaggaactacacccaggaggccagcctgggcgccctgcagaacctgacagctggcagcggccccatgcccacctctgtggcccagacagtggtgcagaaggagagcggcctgcagcacaccaggaagatgctgcacgtgggggaccccagcgtgaagaagacagccatcagcctgctgaggaacctgagcaggaacctgagcctgcagaatgagatcgccaaggagaccctgcctgacctggtgtccatcatcccagacacagtgcccagcacagacctgctgattgagaccacagccagcgcctgctacaccctgaacaacatcatccagaacagctaccagaatgcccgggacctgctgaacacaggaggcatccagaagatcatggccatctctgctggagatgcctatgccagcaacaaggccagcaaggccgcctctgtgctgctgtacagcctgtgggcccacacagagctgcaccacgcctacaagaaggcccagttcaagaagacagactttgtgaacagcaggacagccaaggcctaccacagcctgaaggactag

SEQ ID NO: 164293 - DNA, 2514 bp, synthetic construct
  misc_feature 1..2514: note = Description of Artificial Sequence: Synthetic coding sequence
  source 1..2514: mol_type = other DNA
atggccgcccctggggccccagcagaatatggctacatcagaacagtgctgggccagcagatcctgggccagctggacagcagcagcctggccctgcccagcgaggccaagctgaagctggccggcagcagcggccggggcggccagacagtgaagagcctgcgcatccaggagcaggtgcagcagaccctggccaggaagggccgcagctctgtgggcaatggaaacctgcacaggaccagctctgtgcctgaatatgtgtacaacctgcacctggtggagaatgactttgtgggcggccgcagccctgtgcccaagacctatgacatgctgaaggccggcaccacagccacctatgagggccgctggggccggggcacagcccagtacagcagccagaagtctgtggaggagaggagcctgcggcaccccctgcggcggctggagatcagcccagacagcagccctgagcgggcccactacacccacagcgactaccagtacagccagaggagccaggccggccacaccctgcaccaccaggagagccggcgggccgccctgctggtgcccccaagatatgcccggagtgaaattgtgggcgtgtccagagctggcaccaccagccggcagaggcactttgacacctaccaccggcagtaccagcacggctctgtgtctgacacagtgtttgacagcatcccagccaacccagccctgctgacctacccccggcccggcaccagccgctccatgggcaacctgctggagaaggagaactacctgacagctggcctgactgtgggccaggtgcggcccctggtgcccctgcagcctgtgacccagaacagagccagccgcagctcctggcaccagagcagcttccacagcaccaggaccctgcgggaggccggccccagcgtggccgtggacagcagtggaagaagagcccacctgactgtgggccaggccgccgccggcggcagcggcaacctgctgacagagaggagcaccttcacagacagccagctgggcaatgctgacatggagatgaccctggagagagctgtgtccatgctggaggccgaccacatgctgcccagccgcatctctgctgctgccaccttcatccagcacgagtgcttccagaagtctgaggccaggaagagggtgaaccagctgcggggcatcctgaagctgctgcagctgctgaaggtgcagaatgaagatgtgcagagagctgtgtgtggggccctgaggaacctggtgtttgaagataatgacaacaagctggaggtggccgagctgaatggagtgccccggctgctgcaggtgctgaagcagacccgggacctggagaccaagaagcagatcaccggcctgctgtggaacctgagcagcaatgacaagctgaagaacctgatgatcacagaggccctgctgaccctgacagagaacatcatcatccccttcagcggctggccagagggggactaccccaaggccaacggcctgctggactttgacatcttctacaacgtgacaggctgcctgaggaacatgagcagcgctggagcagatggcaggaaggccatgagaagatgtgatggcctgattgacagcctggtgcactacgtgcggggcaccatcgctgactaccagccagatgacaaggccacagagaactgtgtgtgcatcctgcacaacctgagctaccagctggaggccgagctgcctgagaagtacagccagaacatctacatccagaacagaaacatccagacagacaacaacaagagcatcggctgcttcggcagccgcagcaggaaggtgaaggagcagtaccaggatgtgcccatgcctgaggagaagagcaaccccaagggcgtggagtggctgtggcacagcatcgtcatccgcatgtacctgagcctcatcgccaagtctgtgaggaactacacccaggaggccagcctgggcgccctgcagaacctgacagctggcagcggccccatgcccacctctgtggcccagacagtggtgcagaaggagagcggcctgcagcacaccaggaagatgctgcacgtgggggaccccagcgtgaagaagacagccatcagcctgctgaggaacctgagcaggaacctgagcctgcagaatgagatcgccaaggagaccctgcctgacctggtgtccatcatcccagacacagtgcccagcacagacctgctgattgagaccacagccagcgcctgctacaccctgaacaacatcatccagaacagctaccagaatgcccgggacctgctgaacacaggaggcatccagaagatcatggccatctctgctggagatgcctatgccagcaacaaggccagcaaggccgcctctgtgctgctgtacagcctgtgggcccacacagagctgcaccacgcctacaagaaggcccagttcaagaagacagactttgtgaacagcaggacagccaaggcctaccacagcctgaaggactag

SEQ ID NO: 164294 - DNA, 2475 bp, synthetic construct
  misc_feature 1..2475: note = Description of Artificial Sequence: Synthetic coding sequence
  source 1..2475: mol_type = other DNA
atggccgcccctggggccccagcagaatatggctacatcagaacagtgctgggccagcagatcctgggccagctggacagcagcagcctggccctgcccagcgaggccaagctgaagctggccggcagcagcggccggggcggccagacagtgaagagcctgcgcatccaggagcaggtgcagcagaccctggccaggaagggccgcagctctgtgggcaatggaaacctgcacaggaccagctctgtgcctgaatatgtgtacaacctgcacctggtggagaatgactttgtgggcggccgcagccctgtgcccaagacctatgacatgctgaaggccggcaccacagccacctatgagggccgctggggccggggcacagcccagtacagcagccagaagtctgtggaggagaggagcctgcggcaccccctgcggcggctggagatcagcccagacagcagccctgagcgggcccactacacccacagcgactaccagtacagccagaggagccaggccggccacaccctgcaccaccaggagagccggcgggccgccctgctggtgcccccaagatatgcccggagtgaaattgtgggcgtgtccagagctggcaccaccagccggcagaggcactttgacacctaccaccggcagtaccagcacggctctgtgtctgacacagtgtttgacagcatcccagccaacccagccctgctgacctacccccggcccggcaccagccgctccatgggcaacctgctggagaaggagaactacctgacagctggcctgactgtgggccaggtgcggcccctggtgcccctgcagcctgtgacccagaacagagccagccgcagctcctggcaccagagcagcttccacagcaccaggaccctgcgggaggccggccccagcgtggccgtggacagcagtggaagaagagcccacctgactgtgggccaggccgccgccggcggcagcggcaacctgctgacagagaggagcaccttcacagacagccagctgggcaatgctgacatggagatgaccctggagagagctgtgtccatgctggaggccgaccacatgctgcccagccgcatctctgctgctgccaccttcatccagcacgagtgcttccagaagtctgaggccaggaagagggtgaaccagctgcggggcatcctgaagctgctgcagctgctgaaggtgcagaatgaagatgtgcagagagctgtgtgtggggccctgaggaacctggtgtttgaagataatgacaacaagctggaggtggccgagctgaatggagtgccccggctgctgcaggtgctgaagcagacccgggacctggagaccaagaagcagatcacagaccacacagtgaacctgcggagcagaaatggctggccaggagctgtggcccacgcctgcaaccccagcaccctgggcggccagggcggccgcatcaccaggtctggagtgcgggaccagcctgaccagcacggcctgctgtggaacctgagcagcaatgacaagctgaagaacctgatgatcacagaggccctgctgaccctgacagagaacatcatcatccccttcagcggctggccagagggggactaccccaaggccaacggcctgctggactttgacatcttctacaacgtgacaggctgcctgaggaacatgagcagcgctggagcagatggcaggaaggccatgagaagatgtgatggcctgattgacagcctggtgcactacgtgcggggcaccatcgctgactaccagccagatgacaaggccacagagaactgtgtgtgcatcctgcacaacctgagctaccagctggaggccgagctgcctgagaagtacagccagaacatctacatccagaacagaaacatccagacagacaacaacaagagcatcggctgcttcggcagccgcagcaggaaggtgaaggagcagtaccaggatgtgcccatgcctgaggagaagagcaaccccaagggcgtggagtggctgtggcacagcatcgtcatccgcatgtacctgagcctcatcgccaagtctgtgaggaactacacccaggaggccagcctgggcgccctgcagaacctgacagctggcagcggccccatgcccacctctgtggcccagacagtggtgcagaaggagagcggcctgcagcacaccaggaagatgctgcacgtgggggaccccagcgtgaagaagacagccatcagcctgctgaggaacctgagcaggaacctgagcctgcagaatgagatcgccaaggagaccctgcctgacctggtgtccatcatcccagacacagtgcccagcacagacctgctgattgagaccacagccagcgcctgctacaccctgaacaacatcatccagaacagctaccagaatgcccgggacctgctgaacagaggccaccctgagaactacggccactag

SEQ ID NO: 164295 - DNA, 2394 bp, synthetic construct
  misc_feature 1..2394: note = Description of Artificial Sequence: Synthetic coding sequence
  source 1..2394: mol_type = other DNA
atgcaggacggcaacttcctgctgagcgccctgcagcctgaggccggcgtgtgcagcctggccctgcccagcgacctgcagctggacagaagaggagctgagggccctgaggccgagcggctgcgggccgcccgggtgcaggagcaggtgcgggcccggctgctgcagctgggccagcagcccaggcacaacggggctgctgagcctgagcctgaggccgagacagcccggggcaccagccggggccagtaccacaccctgcaggccggcttcagcagccgcagccagggcctgagcggggacaagaccagcggcttccggcccatcgccaagccagcctacagccctgcctcctggagcagccgctctgctgtggacctgagctgcagccggcggctgagcagcgcccacaacggcggcagcgcctttggagctgctggctacggcggggcccagcccaccccacccatgcccaccaggcctgtgtccttccacgagcggggcggcgtgggcagcagagctgactatgacaccctgagcctgcggagcctgcggctgggccctgggggcctggatgaccgctacagcctggtgtctgagcagctggagcctgctgccaccagcacctaccgggcctttgcctatgagcggcaggccagcagcagcagcagccgggccggcggcctggactggccagaggccacagaggtgagccccagcaggaccatccgggccccagctgtgaggaccctgcagcgcttccagagcagccacaggagccggggcgtgggcggcgctgtgcctggagctgtgctggagcctgtggcccgggcccccagcgtgcgcagcctgagcctgagcctggccgacagcggccacctgcctgatgtgcacggcttcaacagctatggcagccacaggaccctgcagaggctgagcagcggctttgatgacatcgacctgcccagcgctgtgaagtacctgatggccagtgaccccaacctgcaggtgctgggcgccgcctacatccagcacaagtgctacagtgatgctgctgccaagaagcaggcccggagcctgcaggccgtgccccggctggtgaagctgttcaaccacgccaaccaggaggtgcagagacatgccaccggggccatgaggaacctgatctatgacaatgctgacaacaagctggccctggtggaggagaatggcatctttgagctgctgcggaccctgcgggagcaggatgatgagctgaggaagaatgtgacaggcatcctgtggaacctgagcagcagtgaccacctgaaggaccggctggcccgggacaccctggagcagctgacagacctggtgctgagccccctgtctggagctgggggccccccactcatccagcagaatgccagcgaggccgagatcttctacaatgccaccggcttcctgaggaacctgagcagcgccagccaggccacccggcagaagatgagggagtgccacggcctggtggatgccctggtgaccagcatcaaccacgccctggatgctggaaaatgtgaggacaagtctgtggagaatgctgtgtgtgtgctgaggaacctgagctaccgcctgtatgatgagatgcctccttctgccctgcagaggctggagggccggggcagaagagacctggccggggcccctcctggagaggtggtgggctgcttcaccccccagagccggcggctgcgggagctgcccctggccgcagatgccctgacctttgctgaggtgtccaaggaccccaagggcctggagtggctgtggagcccccagatcgtgggcctgtacaaccggctgctgcagagatgtgagctgaacagacacaccacagaagctgctgctggggccctgcagaacatcacagctggggaccggcgctgggccggcgtgctgagccggctggccctggagcaggagcgcatcctgaaccccctgctggacagagtgaggacagctgaccaccaccagctgcggagcctgaccggcctcatccggaacctgagcagaaatgccaggaacaaggatgagatgagcaccaaggtggtgagccacctgattgagaagctgcccggctctgtgggggagaagagccccccagctgaggtgctggtgaacatcatcgctgtgctgaacaacctggtggtggccagccccatcgccgcccgggacctgctgtactttgatggcctgaggaagctgatcttcatcaagaagaagagggacagcccagacagcgagaagagcagccgggccgccagcagcctgctggccaacctgtggcagtacaacaagctgcaccgggacttccgggccaagggctacaggaaggaggacttcctgggcccctag

SEQ ID NO: 164296 - DNA, 276 bp, synthetic construct
  misc_feature 1..276: note = Description of Artificial Sequence: Synthetic coding sequence
  source 1..276: mol_type = other DNA
acagccttccggaggaccccaggagaggagtttgcctggagggaccctgagctgcctgaggtgatccacatgctgcagcaccagttccccagcgtgcaggccaatgctgctgcctacctgcagcacctgtgctttggagacaacaaggtgaagatggaggtgtgccgcctgggcggcatcaagcacctggtggacctgctggaccaccgggtgggcagcagcgaggagtgcctgtggtgccccagcaagccccgcttctggcaggtgtacagatag

SEQ ID NO: 164297 - DNA, 3450 bp, synthetic construct
  misc_feature 1..3450: note = Description of Artificial Sequence: Synthetic coding sequence
  source 1..3450: mol_type = other DNA
atgcctgcccctgagcaggccagcctggtggaggagggccagccccagacccggcaggaggccgccagcacaggccctggcatggagcctgagaccacagccaccaccatcctggcctctgtgaaggagcaggagctgcagttccagaggctgacccgggagctggaggtggagcggcagatcgtggccagccagctggagcgctgccgcctgggcgctgagagccccagcatcgccagcaccagcagcacagagaagagcttcccctggaggagcacagatgtgcccaacacaggagtgtccaagccccgggtgtctgatgctgtgcagcccaacaactacctgatcagaacagagcctgagcagggcaccctgtacagccctgagcagaccagcctgcacgagagcgagggcagcctgggcaacagccgcagcagcacccagatgaacagctacagcgacagcggctaccaggaggccggcagcttccacaacagccagaatgtgtccaaggctgacaaccggcagcagcacagcttcatcggcagcaccaacaaccacgtggtgaggaacagcagagctgagggccagaccctggtgcagcccagcgtggccaacagagccatgagaagagtgtcctctgtgcccagccgggcccagagccccagctatgtgatcagcactggagtgagccccagccggggcagcctgcggaccagcctgggcagcggcttcggcagccccagcgtgacagacccccggcccctgaaccccagcgcctacagcagcaccaccctgcctgctgcccgggccgccagcccctacagccagaggcctgccagccccacagccatccgccgcatcggctctgtgaccagccggcagaccagcaaccccaacggccccaccccccagtaccagaccacagcccgggtgggcagccccctgaccctgacagatgcccagaccagggtggccagccccagccagggccaggtgggcagcagcagccccaagaggagcggcatgacagctgtgccccagcacctgggccccagcctgcagaggacagtgcatgacatggagcagtttggccagcagcagtatgacatctatgaaagaatggtgccccccaggccagacagcctgaccggcctgcggagcagctatgccagccagcacagccagctgggccaggacctgcggtctgctgtgtccccagacctgcacatcacccccatctatgagggccgcacctactacagccctgtgtaccgcagccccaaccacggcaccgtggagctgcagggcagccagacagccctgtacagaactggatctgtgggcatcggcaacctgcagaggaccagcagccagaggagcaccctgacctaccagaggaacaactatgccctgaacaccacagccacctatgcagagccctaccggcccatccagtacagagtgcaggagtgcaactacaaccggctgcagcacgctgtgcctgcagatgatggcaccaccaggagccccagcattgacagcatccagaaggacccccgggagtttgcctggagggaccctgagctgcctgaggtgatccacatgctgcagcaccagttccccagcgtgcaggccaatgctgctgcctacctgcagcacctgtgctttggagacaacaaggtgaagatggaggtgtgccgcctgggcggcatcaagcacctggtggacctgctggaccaccgggtgctggaggtgcagaagaatgcctgtggggccctgaggaacctggtgtttgggaagagcacagatgagaacaagatcgccatgaagaatgtgggcggcatcccagccctgctgcggctgctgaggaagagcattgatgctgaggtgcgggagctggtgactggagtgctgtggaacctgagcagctgtgatgctgtgaagatgaccatcatcagagatgccctgagcaccctgaccaacacagtgattgtgccccacagcggctggaacaacagcagctttgatgatgaccacaagatcaagttccagaccagcctggtgctgaggaacaccaccggctgcctgaggaacctgagcagcgctggggaggaggccaggaagcagatgaggagctgtgagggcctggtggacagcctgctgtatgtgatccacacctgtgtgaacaccagtgactatgacagcaagacagtggagaactgtgtgtgcaccctgaggaacctgagctaccgcctggagctggaggtgccccaggcccggctgctgggcctgaatgagctggatgacctgctgggcaaggagagccccagcaaggacagcgagcccagctgctggggcaagaagaagaagaagaagaagaggaccccccaggaggaccagtgggatggagtgggccccatccctggcctgagcaagagccccaagggcgtggagatgctgtggcaccccagcgtggtgaagccctacctgaccctgctggccgagagcagcaacccagccaccctggagggcagcgctggcagcctgcagaacctgtctgctggcaactggaagtttgctgcctacatccgggctgctgtgaggaaggagaagggcctgcccatcctggtggagctgctgaggatggacaatgacagagtggtgtcctctgtggccacagccctgaggaacatggccctggatgtgaggaacaaggagctgattggcaagtatgccatgagggacctggtgaaccggctgcccggcggcaatggccccagcgtgctgagtgatgagaccatggccgccatctgctgtgccctgcacgaggtgaccagcaagaacatggagaatgccaaggccctggccgacagcggcggcatcgagaagctggtgaacatcaccaagggccgcggggacaggagcagcctgaaggtggtgaaggccgccgcccaggtgctgaacaccctgtggcagtacagagacctgcggagcatctacaagaaggatggctggaaccagaaccacttcatcacccctgtgtccaccctggagcgggaccgcttcaagagccaccccagcctgagcaccaccaaccagcagatgagccccatcatccagagcggcagcagcaagcccagccccatctacatcagcagctacagcagccctgcccgggagcagaacagaaggctgcagcaccagcagctgtactacagccaggatgacagcaacaggaagaactttgatgcctaccgcctgtacctgcagagcccccacagctatgaggacccctactttgatgacagagtgcacttccctgccagcacagactacagcacccagtatggcctgaagagcaccaccaactacgtggacttctacagcaccaagaggcccagctacagagctgagcagtacccaggcagcccagacagctgggtgtag

SEQ ID NO: 164298 - DNA, 3579 bp, synthetic construct
  misc_feature 1..3579: note = Description of Artificial Sequence: Synthetic coding sequence
  source 1..3579: mol_type = other DNA
atgcctgcccctgagcaggccagcctggtggaggagggccagccccagacccggcaggaggccgccagcacaggccctggcatggagcctgagaccacagccaccaccatcctggcctctgtgaaggagcaggagctgcagttccagaggctgacccgggagctggaggtggagcggcagatcgtggccagccagctggagcgctgccgcctgggcgctgagagccccagcatcgccagcaccagcagcacagagaagagcttcccctggaggagcacagatgtgcccaacacaggagtgtccaagccccgggtgtctgatgctgtgcagcccaacaactacctgatcagaacagagcctgagcagggcaccctgtacagccctgagcagaccagcctgcacgagagcgagggcagcctgggcaacagccgcagcagcacccagatgaacagctacagcgacagcggctaccaggaggccggcagcttccacaacagccagaatgtgtccaaggctgacaaccggcagcagcacagcttcatcggcagcaccaacaaccacgtggtgaggaacagcagagctgagggccagaccctggtgcagcccagcgtggccaacagagccatgagaagagtgtcctctgtgcccagccgggcccagagccccagctatgtgatcagcactggagtgagccccagccggggcagcctgcggaccagcctgggcagcggcttcggcagccccagcgtgacagacccccggcccctgaaccccagcgcctacagcagcaccaccctgcctgctgcccgggccgccagcccctacagccagaggcctgccagccccacagccatccgccgcatcggctctgtgaccagccggcagaccagcaaccccaacggccccaccccccagtaccagaccacagcccgggtgggcagccccctgaccctgacagatgcccagaccagggtggccagccccagccagggccaggtgggcagcagcagccccaagaggagcggcatgacagctgtgccccagcacctgggccccagcctgcagaggacagtgcatgacatggagcagtttggccagcagcagtatgacatctatgaaagaatggtgccccccaggccagacagcctgaccggcctgcggagcagctatgccagccagcacagccagctgggccaggacctgcggtctgctgtgtccccagacctgcacatcacccccatctatgagggccgcacctactacagccctgtgtaccgcagccccaaccacggcaccgtggagctgcagggcagccagacagccctgtacagaactggatctgtgggcatcggcaacctgcagaggaccagcagccagaggagcaccctgacctaccagaggaacaactatgccctgaacaccacagccacctatgcagagccctaccggcccatccagtacagagtgcaggagtgcaactacaaccggctgcagcacgctgtgcctgcagatgatggcaccaccaggagccccagcattgacagcatccagaaggacccccgggagtttgcctggagggaccctgagctgcctgaggtgatccacatgctgcagcaccagttccccagcgtgcaggccaatgctgctgcctacctgcagcacctgtgctttggagacaacaaggtgaagatggaggtgtgccgcctgggcggcatcaagcacctggtggacctgctggaccaccgggtgctggaggtgcagaagaatgcctgtggggccctgaggaacctggtgtttgggaagagcacagatgagaacaagatcgccatgaagaatgtgggcggcatcccagccctgctgcggctgctgaggaagagcattgatgctgaggtgcgggagctggtgactggagtgctgtggaacctgagcagctgtgatgctgtgaagatgaccatcatcagagatgccctgagcaccctgaccaacacagtgattgtgccccacagcggctggaacaacagcagctttgatgatgaccacaagatcaagttccagaccagcctggtgctgaggaacaccaccggctgcctgaggaacctgagcagcgctggggaggaggccaggaagcagatgaggagctgtgagggcctggtggacagcctgctgtatgtgatccacacctgtgtgaacaccagtgactatgacagcaagacagtggagaactgtgtgtgcaccctgaggaacctgagctaccgcctggagctggaggtgccccaggcccggctgctgggcctgaatgagctggatgacctgctgggcaaggagagccccagcaaggacagcgagcccagctgctggggcaagaagaagaagaagaagaagaggaccccccaggaggaccagtgggatggagtgggccccatccctggcctgagcaagagccccaagggcgtggagatgctgtggcaccccagcgtggtgaagccctacctgaccctgctggccgagagcagcaacccagccaccctggagggcagcgctggcagcctgcagaacctgtctgctggcaactggaagtttgctgcctacatccgggctgctgtgaggaaggagaagggcctgcccatcctggtggagctgctgaggatggacaatgacagagtggtgtcctctgtggccacagccctgaggaacatggccctggatgtgaggaacaaggagctgattggcaagtatgccatgagggacctggtgaaccggctgcccggcggcaatggccccagcgtgctgagtgatgagaccatggccgccatctgctgtgccctgcacgaggtgaccagcaagaacatggagaatgccaaggccctggccgacagcggcggcatcgagaagctggtgaacatcaccaagggccgcggggacaggagcagcctgaaggtggtgaaggccgccgcccaggtgctgaacaccctgtggcagtacagagacctgcggagcatctacaagaaggatggctggaaccagaaccacttcatcacccctgtgtccaccctggagcgggaccgcttcaagagccaccccagcctgagcaccaccaaccagcagatgagccccatcatccagagcgtgggcagcaccagcagcagccctgccctgctgggcatccgggaccccaggagtgaatatgacaggacccagccccccatgcagtactacaacagccagggagatgccacccacaagggcctgtacccaggcagcagcaagcccagccccatctacatcagcagctacagcagccctgcccgggagcagaacagaaggctgcagcaccagcagctgtactacagccaggatgacagcaacaggaagaactttgatgcctaccgcctgtacctgcagagcccccacagctatgaggacccctactttgatgacagagtgcacttccctgccagcacagactacagcacccagtatggcctgaagagcaccaccaactacgtggacttctacagcaccaagaggcccagctacagagctgagcagtacccaggcagcccagacagctgggtgtag

SEQ ID NO: 164299 - DNA, 1845 bp, synthetic construct
  misc_feature 1..1845: note = Description of Artificial Sequence: Synthetic coding sequence
  source 1..1845: mol_type = other DNA
atgaacagctacagcgacagcggctaccaggaggccggcagcttccacaacagccagaatgtgtccaaggctgacaaccggcagcagcacagcttcatcggcagcaccaacaaccacgtggtgaggaacagcagagctgagggccagaccctggtgcagcccagcgtggccaacagagccatgagaagagtgtcctctgtgcccagccgggcccagagccccagctatgtgatcagcactggagtgagccccagccggggcagcctgcggaccagcctgggcagcggcttcggcagccccagcgtgacagacccccggcccctgaaccccagcgcctacagcagcaccaccctgcctgctgcccgggccgccagcccctacagccagaggcctgccagccccacagccatccgccgcatcggctctgtgaccagccggcagaccagcaaccccaacggccccaccccccagtaccagaccacagcccgggtgggcagccccctgaccctgacagatgcccagaccagggtggccagccccagccagggccaggtgggcagcagcagccccaagaggagcggcatgacagctgtgccccagcacctgggccccagcctgcagaggacagtgcatgacatggagcagtttggccagcagcagtatgacatctatgaaagaatggtgccccccaggccagacagcctgacagcctacggcgtgcccatgctggtgtccatcgtgtccctgggcaagacctttgtgctgccctgcccagacctgcacatcacccccatctatgagggccgcacctactacagccctgtgtaccgcagccccaaccacggcaccgtggagctgcagggcagccagacagccctgtacagaacaggctctgtgggcatcggcaacctgcagaggaccagcagccagaggagcaccctgacctaccagaggaacaactatgccctgaacaccacagccacctacgccgagccctaccggcccatccagtacagagtgcaggagtgcaactacaaccggctgcagcacgctgtgcctgcagatgatggcaccaccaggagccccagcattgacagcatccagaaggacccccgggagtttgcctggagggaccctgagctgcctgaggtgatccacatgctgcagcaccagttccccagcgtgcaggccaatgctgctgcctacctgcagcacctgtgcttcggggacaacaaggtgaagatggaggtgtgccgcctgggcggcatcaagcacctggtggacctgctggaccaccgggtgctggaggtgcagaagaatgcctgtggggccctgaggaacctggtgtttgggaagagcacagatgagaacaagatcgccatgaagaatgtgggcggcatcccagccctgctgcggctgctgaggaagagcattgatgctgaggtgcgggagctggtgactggagtgctgtggaacctgagcagctgtgatgctgtgaagatgaccatcatcagagatgccctgagcaccctgaccaacacagtcatcgtgccccacagcggctggaacaacagcagctttgatgatgaccacaagatcaagttccagaccagcctggtgctgaggaacaccaccggctgcctgaggaacctgagcagcgctggggaggaggccaggaagcagatgaggagctgtgagggcctggtggacagcctgctgtatgtgatccacacctgtgtgaacaccagtgactatgacagcaagacagtggagaactgtgtgtgcaccctgaggaacctgattggctggagctggcgctgcccccggcccggctactgggactag

SEQ ID NO: 164300 - DNA, 1329 bp, synthetic construct
  misc_feature 1..1329: note = Description of Artificial Sequence: Synthetic coding sequence
  source 1..1329: mol_type = other DNA
atgggcctggccatggagcacggcggcagctatgcccgggccggcggcagcagccggggctgctggtactacctgcgctacttcttcctgtttgtgtccctcatccagttcctgatcatcctgggcctggtgctcttcatggtgtatggaaatgtgcacgtgtccacagagagcaacctgcaggccacagaaagaagagctgagggcctgtacagccagctgctgggcctgacagccagccagagcaacctgaccaaggagctgaacttcaccacccgggccaaggatgccatcatgcagatgtggctgaatgcccggcgggacctggaccgcatcaatgccagcttccggcagtgccagggcgacagagtcatctacaccaacaaccagcgctacatggccgccatcatcctgtctgagaagcagtgccgggaccagttcaaggacatgaacaagagctgtgatgccctgctcttcatgctgaaccagaaggtgaagaccctggaggtggagatcgccaaggagaagaccatctgcaccaaggacaaggagagcgtgctgctgaacaagagggtggccgaggagcagctggtggagtgtgtgaagacccgggagctgcagcaccaggagcggcagctggccaaggagcagctgcagaaggtgcaggccctgtgcctgcccctggacaaggacaagtttgagatggacctgaggaacctgtggagggacagcatcatccccaggagcctggacaacctgggctacaacctgtaccaccccctgggcagcgagctggccagcatcagaagagcctgtgaccacatgcccagcctgatgagcagcaaggtggaggagctggcccggagcctgcgggctgacatcgagcgggtggcccgggagaacagcgacctgcagaggcagaagctggaggcccagcagggcctgcgggccagccaggaggccaagcagaaggtggagaaggaggcccaggcccgggaggccaagctgcaggctgaatgttcccggcagacccagctggccctggaggagaaggctgtgctgaggaaggagcgggacaacctggccaaggagctggaggagaagaagcgggaggccgagcagctgaggatggagctggccatccggaacagcgccctggacacctgcatcaagaccaagagccagcccatgatgcctgtgtcccggcccatgggccctgtgcccaacccccagcccattgatcctgccagcctggaggagttcaagaggaagatcctggagagccagaggcctcctgctggcatccctgtggcccccagcagtggatag

SEQ ID NO: 164301 - DNA, 291 bp, synthetic construct
  misc_feature 1..291: note = Description of Artificial Sequence: Synthetic coding sequence
  source 1..291: mol_type = other DNA
atggagcacaaggaggtggtgctgctgctgctgctcttcctgaagagcggccagggcgagcccctggatgattatgtgaacacccagggccccagcctcttctctgtgaccaagaagcagctgggcgccggcagccgggaggagtgtgccgccaagtgtgaggaggacaaggagttcacctgccgggccttccagtaccacagcaaggagcagcagtgtgtgatcatggccgagaacaggaagagcagcatcatcatccgcatgagagatgctgtgctgtttgagaagtag

SEQ ID NO: 164302 - DNA, 291 bp, synthetic construct; identical to SEQ ID NO: 164301
  misc_feature 1..291: note = Description of Artificial Sequence: Synthetic coding sequence
  source 1..291: mol_type = other DNA

SEQ ID NO: 164303 - DNA, 291 bp, synthetic construct; identical to SEQ ID NO: 164301
  misc_feature 1..291: note = Description of Artificial Sequence: Synthetic coding sequence
  source 1..291: mol_type = other DNA

SEQ ID NO: 164304 - DNA, 492 bp, synthetic construct
  misc_feature 1..492: note = Description of Artificial Sequence: Synthetic coding sequence
  source 1..492: mol_type = other DNA
atggatgccctggagggggagagctttgccctgtccttcagcagcgccagtgatgctgagtttgatgctgtggtgggctacctggaggacatcatcatggatgatgagttccagctgctgcagaggaacttcatggacaagtactacctggagtttgaggacacagaggagaacaagctgatctacacccccatcttcaatgagtacatcagcctggtggagaagtacatcgaggagcagctgctgcagagaattcctgagttcaacatggccgccttcaccaccaccctgcagcaccacaaggatgaggtggccggggacatctttgacatgctgctgaccttcacagacttcctggccttcaaggagatgttcctggactacagagctgagaaggagggccggggcctggacctgagcagcggcctggtggtgaccagcctgtgcaagagcagcagcctgcctgccagccagaacaacctgcggcactag

SEQ ID NO: 164305 - DNA, 1890 bp, synthetic construct
  misc_feature 1..1890: note = Description of Artificial Sequence: Synthetic coding sequence
  source 1..1890: mol_type = other DNA
atggagaacagcaccaccaccatcagccgggaggagctggaggagctgcaggaggccttcaacaagattgatattgacaacagcggctacgtgtctgactatgagctgcaggacctcttcaaggaggccagcctgcccctgcccggctacaaggtgcgggagatcgtggagaagatcctgtctgtggccgacagcaacaaggatggcaagatcagctttgaggagtttgtgtccctgatgcaggagctgaagagcaaggacatcagcaagaccttcaggaagatcatcaacaagcgggagggcatcacagccatcggcggcaccagcaccatcagcagcgagggcacccagcacagctacagcgaggaggagaaggtggcctttgtgaactggatcaacaaggccctggagaatgaccctgactgcaagcacctgatccccatgaaccccaatgatgacagcctcttcaagagcctggctgatggcatcctgctgtgcaagatgatcaacctgtctgagccagacaccattgatgagcgggccatcaacaagaagaagctgacccccttcaccatcagcgagaacctgaacctggccctgaacagcgccagcgccatcggctgcaccgtggtgaacattggagccagtgacctgaaggagggcaagccccacctggtgctgggcctgctgtggcagatcatcaaggtgggcctgtttgctgacatcgagatcagcagaaatgaggccctgattgccctgctgaatgaaggagaggagctggaggagctgatgaagctgagccctgaggagctgctgctgcgctgggtgaactaccacctgaccaatgccggctggcacaccatcagcaacttcagccaggacatcaaggacagccgggcctacttccacctgctgaaccagatcgcccccaagggcggggaggatggccctgccatcgccatcgacctgagcggcatcaatgagaccaatgacctgaagagagctggcctgatgctgcaggaggccgacaagctgggctgcaagcagtttgtgaccccagcagatgtggtgtctggcaaccccaagctgaacctggcctttgtggccaacctcttcaacacctacccctgcctgcacaagcccaacaacaatgacatcgacatgaacctgctggagggggagagcaaggaggagaggaccttcaggaactggatgaacagcctgggcgtgaacccctacatcaaccacctgtacagcgacctggctgatgccctggtgatcttccagctgtatgagatgatccgggtgcctgtgaactggagccacgtgaacaagccaccctacccagccctgggcggcaacatgaagaagattgagaactgcaactatgctgtggagctgggcaagaacaaggccaagttcagcctggtgggcattgctggccaggacctgaatgaaggcaacagcaccctgaccctggccctggtgtggcagctgatgaggcgctacaccctgaatgtgctgagtgacctgggggagggggagaaggtgaatgatgagatcatcatcaagtgggtgaaccagaccctgaagagcgccaacaagaagaccagcatcagcagcttcaaggacaagagcatcagcaccagcctgcctgtgctggacctgattgatgccatcgccccaaatgctgtgcggcaggagatgatcagaagagagaacctgagtgatgaggacaagctgaacaatgccaagtatgccatctctgtggccaggaagatcggggcccgcatctatgccctgcctgatgacctggtggaggtgaagcccaagatggtgatgacagtgtttgcctgcctgatgggcaagggcctgaaccgcatcaagtag

SEQ ID NO: 164306 - DNA, 1890 bp, synthetic construct; identical to SEQ ID NO: 164305
  misc_feature 1..1890: note = Description of Artificial Sequence: Synthetic coding sequence
  source 1..1890: mol_type = other DNA

SEQ ID NO: 164307 - DNA, 165 bp, synthetic construct
  misc_feature 1..165: note = Description of Artificial Sequence: Synthetic coding sequence
  source 1..165: mol_type = other DNA
atggagaacagcaccaccaccatcagccgggaggagctggaggagctgcaggaggccttcaacaagattgatattgacaacagcggctacgtgtctgactatgagctgcaggacctcttcaaggaggccagcctgcccctgcccggctacaaggtgcgggagtag

SEQ ID NO: 164308 - DNA, 363 bp, synthetic construct
  misc_feature 1..363: note = Description of Artificial Sequence: Synthetic coding sequence
  source 1..363: mol_type = other DNA
atggagaacagcaccaccaccatcagccgggaggagctggaggagctgcaggaggccttcaacaagattgatattgacaacagcggctacgtgtctgactatgagctgcaggacctcttcaaggaggccagcctgcccctgcccggctacaaggtgcgggagatcgtggagaagatcctgtctgtggccgacagcaacaaggatggcaagatcagctttgaggagtttgtgtccctgatgcaggagctgaagagcaaggacatcagcaagaccttcaggaagatcatcaacaagcgggagggcatcacagccatcggcggcaccagcaccatcagcagcgagggcacccagcacagctactag

SEQ ID NO: 164309 - DNA, 360 bp, synthetic construct
  misc_feature 1..360: note = Description of Artificial Sequence: Synthetic coding sequence
  source 1..360: mol_type = other DNA
atggagaacagcaccaccaccatcagccgggaggagctggaggagctgcaggaggccttcaacaagattgatattgacaacagcggctacgtgtctgactatgagctgcaggacctcttcaaggaggccagcctgcccctgcccggctacaaggtgcgggagatcgtggagaagatcctgtctgtggccgacagcaacaaggatggcaagatcagctttgaggagtttgtgtccctgatgcaggagctgaagagcaaggacatcagcaagaccttcaggaagatcatcaacaagcgggagggcatcacagccatcggcggcaccagcaccatcagcagcgagggcacccagcacagctag

SEQ ID NO: 164310 - DNA, 102 bp, synthetic construct
  misc_feature 1..102: note = Description of Artificial Sequence: Synthetic coding sequence
  source 1..102: mol_type = other DNA
atggagaacagcaccaccaccatcagccgggaggagctggaggagctgcaggaggccttcaacaagattgatattgacaacagcggctacgtgtctgactag

SEQ ID NO: 164311 - DNA, 177 bp, synthetic construct
  misc_feature 1..177: note = Description of Artificial Sequence: Synthetic coding sequence
  source 1..177: mol_type = other DNA
atggagaacagcaccaccaccatcagccgggaggagctggaggagctgcaggaggccttcaacaagattgatattgacaacagcggctacgtgtctgactatgagctgcaggacctcttcaaggaggccagcctgcccctgcccggctacaaggtgcgggagatcgtggagaagtag

SEQ ID NO: 164312 - DNA, 1890 bp, synthetic construct; identical to SEQ ID NO: 164305
  misc_feature 1..1890: note = Description of Artificial Sequence: Synthetic coding sequence
  source 1..1890: mol_type = other DNA

SEQ ID NO: 164313 - DNA, 162 bp, synthetic construct
  misc_feature 1..162: note = Description of Artificial Sequence: Synthetic coding sequence
  source 1..162: mol_type = other DNA
atggagaacagcaccaccaccatcagccgggaggagctggaggagctgcaggaggccttcaacaagattgatattgacaacagcggctacgtgtctgactatgagctgcaggacctcttcaaggaggccagcctgcccctgcccggctacaaggtgaggtag

SEQ ID NO: 164314 - DNA, 1785 bp, synthetic construct
  misc_feature 1..1785: note = Description of Artificial Sequence: Synthetic coding sequence
  source 1..1785: mol_type = other DNA
atgcccctgcccggctacaaggtgcgggagatcatccagaagctgatgctggatggagacaggaacaaggatggcaagatcagctttgatgaatttgtgtacatcttccaggaggtgaagagcagtgacatcgccaagaccttcaggaaggccatcaacaggaaggagggcatctgtgccctgggcggcaccagcgagctgagcagcgagggcacccagcacagctacagcgaggaggagaagtatgcctttgtgaactggatcaacaaggccctggagaatgaccctgactgccgccacgtgatccccatgaaccccaacacagatgacctcttcaaggctgtgggagatggcatcgtgctgtgcaagatgatcaacctgtctgtgcctgacaccattgatgagcgggccatcaacaagaagaagctgacccccttcatcatccaggagaacctgaacctggccctgaacagcgccagcgccatcggctgccacgtggtgaacattggagctgaggacctgcgggccggcaagccccacctggtgctgggcctgctgtggcagatcatcaagattggcctgtttgctgacatcgagctgagcagaaatgaggccctggccgccctgctgagagatggagagaccctggaggagctgatgaagctgagccctgaggagctgctgctgcgctgggccaacttccacctggagaacagcggctggcagaagatcaacaacttctctgctgacatcaagctgattgacttcagcaacagcgtgaaggacagcaaggcctacttccacctgctgaaccagatcgcccccaagggccagaaggagggggagcccagaattgacatcaacatgagcggcttcaatgaaacagatgacctgaagagagctgagagcatgctgcagcaggccgacaagctgggctgccggcagtttgtgaccccagcagatgtggtgtctggcaaccccaagctgaacctggcctttgtggccaacctcttcaacaagtacccagccctgaccaagccagagaaccaggacatcgactggaccctgctggagggggagacccgggaggagaggaccttcaggaactggatgaacagcctgggcgtgaacccccacgtgaaccacctgtatgctgacctgcaggatgccctggtgatcctgcagctgtatgagcgcatcaaggtgcctgtggactggagcaaggtgaacaagccaccctaccccaagctgggcgccaacatgaagaagctggagaactgcaactatgctgtggagctgggcaagcacccagccaagttcagcctggtgggcattggaggccaggacctgaatgatggcaaccagaccctgaccctggccctggtgtggcagctgatgaggcgctacaccctgaatgtgctggaggacctgggagatggccagaaggccaatgatgacatcatcgtgaactgggtgaacagaaccctgtctgaggccggcaagagcaccagcatccagagcttcaaggacaagaccatcagcagcagcctggccgtggtggacctgattgatgccatccagcccggctgcatcaactatgacctggtgaagagcggcaacctgacagaagatgacaagcacaacaatgccaagtatgctgtgtccatggcccggcgcatcggggcccgggtgtatgccctgcctgaggacctggtggaggtgaagcccaagatggtgatgacagtgtttgcctgcctgatgggccggggcatgaagagggtgtag

SEQ ID NO: 164315 - DNA, 1893 bp, synthetic construct
  misc_feature 1..1893: note = Description of Artificial Sequence: Synthetic coding sequence
  source 1..1893: mol_type = other DNA
atggatgagatggccaccacccagatcagcaaggatgagctggatgagctgaaggaggcctttgccaaggtggacctgaacagcaatggcttcatctgtgactatgagctgcacgagctgttcaaggaggccaacatgcccctgcccggctacaaggtgcgggagatcatccagaagctgatgctggatggagacaggaacaaggatggcaagatcagctttgatgaatttgtgtacatcttccaggaggtgaagagcagtgacatcgccaagaccttcaggaaggccatcaacaggaaggagggcatctgtgccctgggcggcaccagcgagctgagcagcgagggcacccagcacagctacagcgaggaggagaagtatgcctttgtgaactggatcaacaaggccctggagaatgaccctgactgcagacatgtgatccccatgaaccccaacacagatgacctcttcaaggctgtgggagatggcatcgtgctgtgcaagatgatcaacctgtctgtgcctgacaccattgatgagcgggccatcaacaagaagaagctgacccccttcatcatccaggagaacctgaacctggccctgaacagcgccagcgccatcggctgccacgtggtgaacatcggggctgaggacctgcgggccggcaagccccacctggtgctgggcctgctgtggcagatcatcaagattggcctgtttgctgacatcgagctgagcagaaatgaggccctggccgccctgctgagagatggagagaccctggaggagctgatgaagctgagccctgaggagctgctgctgcgctgggccaacttccacctggagaacagcggctggcagaagatcaacaacttctctgctgacatcaaggacagcaaggcctacttccacctgctgaaccagatcgcccccaagggccagaaggagggggagcccagaattgacatcaacatgagcggcttcaatgaaacagatgacctgaagagagctgagagcatgctgcagcaggccgacaagctgggctgccggcagtttgtgaccccagcagatgtggtgtctggcaaccccaagctgaacctggcctttgtggccaacctcttcaacaagtacccagccctgaccaagccagagaaccaggacatcgactggaccctgctggagggggagacccgggaggagaggaccttcaggaactggatgaacagcctgggcgtgaacccccacgtgaaccacctgtatgctgacctgcaggatgccctggtgatcctgcagctgtatgagcgcatcaaggtgcctgtggactggagcaaggtgaacaagccaccctaccccaagctgggcgccaacatgaagaagctggagaactgcaactatgctgtggagctgggcaagcacccagccaagttcagcctggtgggcattggaggccaggacctgaatgatggcaaccagaccctgaccctggccctggtgtggcagctgatgaggcgctacaccctgaatgtgctggaggacctgggagatggccagaaggccaatgatgacatcatcgtgaactgggtgaacagaaccctgtctgaggccggcaagagcaccagcatccagagcttcaaggacaagaccatcagcagcagcctggccgtggtggacctgattgatgccatccagcccggctgcatcaactatgacctggtgaagagcggcaacctgacagaagatgacaagcacaacaatgccaagtatgctgtgtccatggcccggcgcatcggggcccgggtgtatgccctgcctgaggacctggtggaggtgaagcccaagatggtgatgacagtgtttgcctgcctgatgggccggggcatgaagagggtgtag

SEQ ID NO: 164316 - DNA, 1893 bp, synthetic construct; identical to SEQ ID NO: 164315
  misc_feature 1..1893: note = Description of Artificial Sequence: Synthetic coding sequence
  source 1..1893: mol_type = other DNA

SEQ ID NO: 164317 - DNA, 1854 bp, synthetic construct
  misc_feature 1..1854: note = Description of Artificial Sequence: Synthetic coding sequence
  source 1..1854: mol_type = other DNA
atggaggacctgaacagcaatggcttcatctgtgactatgagctgcacgagctgttcaaggaggccaacatgcccctgcccggctacaaggtgcgggagatcatccagaagctgatgctggatggagacaggaacaaggatggcaagatcagctttgatgaatttgtgtacatcttccaggaggtgaagagcagtgacatcgccaagaccttcaggaaggccatcaacaggaaggagggcatctgtgccctgggcggcaccagcgagctgagcagcgagggcacccagcacagctacagcgaggaggagaagtatgcctttgtgaactggatcaacaaggccctggagaatgaccctgactgcagacatgtgatccccatgaaccccaacacagatgacctcttcaaggctgtgggagatggcatcgtgctgtgcaagatgatcaacctgtctgtgcctgacaccattgatgagcgggccatcaacaagaagaagctgacccccttcatcatccaggagaacctgaacctggccctgaacagcgccagcgccatcggctgccacgtggtgaacatcggggctgaggacctgcgggccggcaagccccacctggtgctgggcctgctgtggcagatcatcaagattggcctgtttgctgacatcgagctgagcagaaatgaggccctggccgccctgctgagagatggagagaccctggaggagctgatgaagctgagccctgaggagctgctgctgcgctgggccaacttccacctggagaacagcggctggcagaagatcaacaacttctctgctgacatcaagctgattgacttcagcaacagcgtgaaggacagcaaggcctacttccacctgctgaaccagatcgcccccaagggccagaaggagggggagcccagaattgacatcaacatgagcggcttcaatgaaacagatgacctgaagagagctgagagcatgctgcagcaggccgacaagctgggctgccggcagtttgtgaccccagcagatgtggtgtctggcaaccccaagctgaacctggcctttgtggccaacctcttcaacaagtacccagccctgaccaagccagagaaccaggacatcgactggaccctgctggagggggagacccgggaggagaggaccttcaggaactggatgaacagcctgggcgtgaacccccacgtgaaccacctgtatgctgacctgcaggatgccctggtgatcctgcagctgtatgaaagaatcaaggtgcctgtggactggagcaaggtgaacaagccaccctaccccaagctgggcgccaacatgaagaagctggagaactgcaactatgctgtggagctgggcaagcacccagccaagttcagcctggtgggcatcggcggccaggacctgaatgatggcaaccagaccctgaccctggccctggtgtggcagctgatgaggcgctacaccctgaatgtgctggaggacctgggagatggccagaaggccaatgatgacatcatcgtgaactgggtgaacagaaccctgtctgaggccggcaagagcaccagcatccagagcttcaaggacaagaccatcagcagcagcctggccgtggtggacctgattgatgccatccagcccggctgcatcaactatgacctggtgaagagcggcaacctgacagaagatgacaagcacaacaatgccaagtatgctgtgtccatggccaggagaattggagcccgggtgtatgccctgcctgaggacctggtggaggtgaagcccaagatggtgatgacagtgtttgcctgcctgatgggccggggcatgaagagggtgtag

SEQ ID NO: 164318 - DNA, 1758 bp, synthetic construct
  misc_feature 1..1758: note = Description of Artificial Sequence: Synthetic coding sequence
  source 1..1758: mol_type = other DNA
atgcccctgcccggctacaaggtgcgggagatcatccagaagctgatgctggatggagacaggaacaaggatggcaagatcagctttgatgaatttgtgtacatcttccaggaggtgaagagcagtgacatcgccaagaccttcaggaaggccatcaacaggaaggagggcatctgtgccctgggcggcaccagcgagctgagcagcgagggcacccagcacagctacagcgaggaggagaagtatgcctttgtgaactggatcaacaaggccctggagaatgaccctgactgccgccacgtgatccccatgaaccccaacacagatgacctcttcaaggctgtgggagatggcatcgtgctgtgcaagatgatcaacctgtctgtgcctgacaccattgatgagcgggccatcaacaagaagaagctgacccccttcatcatccaggagaacctgaacctggccctgaacagcgccagcgccatcggctgccacgtggtgaacattggagctgaggacctgcgggccggcaagccccacctggtgctgggcctgctgtggcagatcatcaagattggcctgtttgctgacatcgagctgagcagaaatgaggccctggccgccctgctgagagatggagagaccctggaggagctgatgaagctgagccctgaggagctgctgctgcgctgggccaacttccacctggagaacagcggctggcagaagatcaacaacttctctgctgacatcaaggacagcaaggcctacttccacctgctgaaccagatcgcccccaagggccagaaggagggggagcccagaattgacatcaacatgagcggcttcaatgaaacagatgacctgaagagagctgagagcatgctgcagcaggccgacaagctgggctgccggcagtttgtgaccccagcagatgtggtgtctggcaaccccaagctgaacctggcctttgtggccaacctcttcaacaagtacccagccctgaccaagccagagaaccaggacatcgactggaccctgctggagggggagacccgggaggagaggaccttcaggaactggatgaacagcctgggcgtgaacccccacgtgaaccacctgtatgctgacctgcaggatgccctggtgatcctgcagctgtatgaaagaatcaaggtgcctgtggactggagcaaggtgaacaagccaccctaccccaagctgggcgccaacatgaagaagctggagaactgcaactatgctgtggagctgggcaagcacccagccaagttcagcctggtgggcatcggcggccaggacctgaatgatggcaaccagaccctgaccctggccctggtgtggcagctgatgaggcgctacaccctgaatgtgctggaggacctgggagatggccagaaggccaatgatgacatcatcgtgaactgggtgaacagaaccctgtctgaggccggcaagagcaccagcatccagagcttcaaggacaagaccatcagcagcagcctggccgtggtggacctgattgatgccatccagcccggctgcatcaactatgacctggtgaagagcggcaacctgacagaagatgacaagcacaacaatgccaagtatgctgtgtccatggccaggagaattggagcccgggtgtatgccctgcctgaggacctggtggaggtgaagcccaagatggtgatgacagtgtttgcctgcctgatgggccggggcatgaagagggtgtag

SEQ ID NO: 164319 - DNA, 675 bp, synthetic construct
  misc_feature 1..675: note = Description of Artificial Sequence: Synthetic coding sequence
  source 1..675: mol_type = other DNA
atgaacagcctgggcgtgaacccccacgtgaaccacctgtatgctgacctgcaggatgccctggtgatcctgcagctgtatgagcgcatcaaggtgcctgtggactggagcaaggtgaacaagccaccctaccccaagctgggcgccaacatgaagaagctggagaactgcaactatgctgtggagctgggcaagcacccagccaagttcagcctggtgggcattggaggccaggacctgaatgatggcaaccagaccctgaccctggccctggtgtggcagctgatgaggcgctacaccctgaatgtgctggaggacctgggagatggccagaaggccaatgatgacatcatcgtgaactgggtgaacagaaccctgtctgaggccggcaagagcaccagcatccagagcttcaaggacaagaccatcagcagcagcctggccgtggtggacctgattgatgccatccagcccggctgcatcaactatgacctggtgaagagcggcaacctgacagaagatgacaagcacaacaatgccaagtatgctgtgtccatggcccggcgcatcggggcccgggtgtatgccctgcctgaggacctggtggaggtgaagcccaagatggtgatgacagtgtttgcctgcctgatgggccggggcatgaagagggtgtag

SEQ ID NO: 164320 - DNA, 306 bp, synthetic construct
  misc_feature 1..306: note = Description of Artificial Sequence: Synthetic coding sequence
  source 1..306: mol_type = other DNA
atgagcagcgctgctggcttctgtgccagccggcccggcctgctcttcctgggcctgctgctgctgcccctggtggtggcctttgccagcgctgaggccgaggaggatggagacctgcagtgcctgtgtgtgaagaccaccagccaggtgcggcccaggcacatcaccagcctggaggtgatcaaggccggcccccactgccccacagcccagctgattgccaccctgaagaatggaaggaagatctgcctggacctgcaggcccccctgtacaagaagatcatcaagaagctgctggagagctag

SEQ ID NO: 164321 - DNA, 405 bp, synthetic construct
  misc_feature 1..405: note = Description of Artificial Sequence: Synthetic coding sequence
  source 1..405: mol_type = other DNA
atgaagagcctgacctggatcctgggcctgtgggccctggccgcctgcttcaccccaggagagagccagaggggcccccggggcccctacccacctggccccctggcccctcctcctccaccctgcttcccctttggaactggatttgtgcccccaccccaccccccaccctacggccctggccgcttccccccacccctgagccccccctacggccctggccgcatcccccccagccccccaccaccctacggccctggccgcatccagagccacagcctgcccccaccctacggccctggctacccccagccccccagccagccccggccctacccacctggcccccccttcttccctgtgaacagccccacagatcctgccctgcccaccccagccccctag

SEQ ID NO: 164322 - DNA, 399 bp, synthetic construct
  misc_feature 1..399: note = Description of Artificial Sequence: Synthetic coding sequence
  source 1..399: mol_type = other DNA
atgagccagggcgacagcaacccagctgccatcccccacgccgctgaggacatccagggagatgaccgctggatgagccagcacaacagatttgtgctggactgcaaggacaaggagccagatgtgctgtttgtgggggacagcatggtgcagctgatgcagcagtatgagatctggagggagctgttcagccccctgcacgccctgaactttggaattggaggagacaccaccaggcatgtgctgtggaggctgaagaatggagagctggagaacatcaagcccaaggtgattgtggtgtgggtgggcaccaacaaccacgagaacacagctgaggaggtggccggcggcatcgaggccatcgtgcagctgatcaacacccggcagccccaggcctag

SEQ ID NO: 164323 - DNA, 690 bp, synthetic construct
  misc_feature 1..690: note = Description of Artificial Sequence: Synthetic coding sequence
  source 1..690: mol_type = other DNA
atgagccagggcgacagcaacccagctgccatcccccacgccgctgaggacatccagggagatgaccgctggatgagccagcacaacagatttgtgctggactgcaaggacaaggagccagatgtgctgtttgtgggggacagcatggtgcagctgatgcagcagtatgagatctggagggagctgttcagccccctgcacgccctgaactttggaattggaggagacaccaccaggcatgtgctgtggaggctgaagaatggagagctggagaacatcaagcccaaggtgattgtggtgtgggtgggcaccaacaaccacgagaacacagctgaggaggtggccggcggcatcgaggccatcgtgcagctgatcaacacccggcagccccaggccaagatcatcgtgctgggcctgctgcccagaggagagaagcccaaccccctgcggcagaagaatgccaaggtgaaccagctgctgaaggtgtccctgcccaagctggccaacgtgcagctgctggacacagatggcggctttgtgcacagtgatggagccatcagctgccacgacatgtttgacttcctgcacctgaccggcggcggctacgccaagatctgcaagcccctgcacgagctgatcatgcagctgctggaggagaccccagaggagaagcagaccaccatcgcctag

SEQ ID NO: 164324 - DNA, 468 bp, synthetic construct
  misc_feature 1..468: note = Description of Artificial Sequence: Synthetic coding sequence
  source 1..468: mol_type = other DNA
atgagccagggcgacagcaacccagctgccatcccccacgccgctgaggacatccagggagatgaccgctggatgagccagcacaacagatttgtgctggactgcaaggacaaggagccagatgtgctgtttgtgggggacagcatggtgcagctgatgcagcagtatgagatctggagggagctgttcagccccctgcacgccctgaactttggaattggaggagacaccaccaggcatgtgctgtggaggctgaagaatggagagctggagaacatcaagcccaaggtgattgtggtgtgggtgggcaccaacaaccacgagaacacagctgaggaggtggccggcggcatcgaggccatcgtgcagctgatcaacacccggcagccccaggccaagatcatcgtgctgatcatctactggcaggatgagcaggactaccacgagaggaaggtgcagatggactag

SEQ ID NO: 164325 - DNA, 609 bp, synthetic construct
  misc_feature 1..609: note = Description of Artificial Sequence: Synthetic coding sequence
  source 1..609: mol_type = other DNA
atgagccagggcgacagcaacccagctgccatcccccacgccgctgaggacatccagggagatgaccgctggatgagccagcacaacagatttgtgctggactgcaaggacaaggagccagatgtgctgtttgtgggggacagcatggtgcagctgatgcagcagtatgagatctggagggagctgttcagccccctgcacgccctgaactttggaattggaggagacaccaccaggcatgtgctgtggaggctgaagaatggagagctggagaacatcaagcccaaggtgattgtggtgtgggtgggcaccaacaaccacgagaacacagctgaggaggtggccggcggcatcgaggccatcgtgcagctgatcaacacccggcagccccaggccaagatcatcgtgctgggcaaggctgctgccagcaagtacagcatcagcgagatcgtgcggctggagcagggctctgtgaactggagcatcggcacctacccagatgacaccccagccaccaccaggcctgccatcctgcagctgttcaccgggaagatgagccgcatcaccatgaaggagaagagccgctggacagaggagatcctgcactag

SEQ ID NO: 164326 - DNA, 696 bp, synthetic construct
  misc_feature 1..696: note = Description of Artificial Sequence: Synthetic coding sequence
  source 1..696: mol_type = other DNA
atgtctggagaagaaaatcctgccagcaagcccacccctgtgcaggatgtgcagggagatggccgctggatgagcctgcaccacagatttgtggccgacagcaaggacaaggagcctgaggtggtgttcatcggggacagcctggtgcagctgatgcaccagtgtgagatctggagggagctgttcagccccctgcacgccctgaactttggaattggaggagatggcacccagcacgtgctgtggaggctggagaatggagagctggagcacatccggcccaagatcgtggtggtgtgggtgggcaccaacaaccacggccacacagctgagcaggtgactggaggcatcaaggccatcgtgcagctggtgaatgaaaggcagccccaggcccgggtggtggtgctgggcctgctgccccggggccagcaccccaaccccctgcgggagaagaaccggcaggtgaatgagctggtgcgggccgccctggccggccacccccgggcccacttcctggatgctgaccccggctttgtgcacagtgatggcaccatcagccaccacgacatgtatgactacctgcacctgagccggctgggctacacccctgtgtgccgggccctgcacagcctgctgctgcggctgctggcccaggaccagggccagggcgcccccctgctggagcccgccccctag

SEQ ID NO: 164327 - DNA, 696 bp, synthetic construct; identical to SEQ ID NO: 164326
  misc_feature 1..696: note = Description of Artificial Sequence: Synthetic coding sequence
  source 1..696: mol_type = other DNA

SEQ ID NO: 164328 - DNA, 720 bp, synthetic construct
  misc_feature 1..720: note = Description of Artificial Sequence: Synthetic coding sequence
  source 1..720: mol_type = other DNA
atgaccatcaagctgtgggacttccagggctttgagtgcatccgcaccatgcacggccatgaccacaacgtgtcctctgtggccatcatgcccaacggggaccacatcgtgtctgccagccgggacaagaccatcaagatgtgggaggtgcagacaggctactgtgtgaagaccttcaccggccaccgggagtgggtgaggatggtgcggcccaaccaggacggcaccctcatcgccagctgcagcaatgaccagacagtgcgggtgtgggtggtggccaccaaggagtgcaaggccgagctgcgggagcacgagcacgtggtggagtgcatctcctgggcccctgagagcagctacagcagcatcagcgaggccaccggcagcgagaccaagaagagcggcaagccaggccccttcctgctgagcggcagccgggacaagaccatcaagatgtgggatgtgtccacaggcatgtgcctgatgaccctggtgggccatgacaactgggtgcggggcgtgctcttccacagcggcggcaagttcatcctgagctgtgctgatgacaagaccctgcgggtgtgggactacaagaacaagcgctgcatgaagaccctgaatgcccacgagcactttgtgaccagcctggacttccacaagacagccccctacgtggtgacaggctctgtggaccagacagtgaaggtgtgggagtgcaggtag

SEQ ID NO: 164329 - DNA, 1233 bp, synthetic construct
  misc_feature 1..1233: note = Description of Artificial Sequence: Synthetic coding sequence
  source 1..1233: mol_type = other DNA
atggtgctgagccagaggcagagagatgagctgaacagagccatcgctgactacctgcggagcaatggctatgaggaggcctacagcgtcttcaagaaggaggccgagctggatgtgaatgaggagctggacaagaagtatgccggcctgctggagaagaagtggaccagcgtcatccggctgcagaagaaggtgatggagctggagagcaagctgaatgaggccaaggaggagttcaccagcggcggccccctgggccagaagagggaccccaaggagtggatcccccggcccccagagaagtatgccctgagcggccacaggagccctgtgaccagggtcatcttccaccctgtgttttctgtgatggtgtctgcctctgaagatgccaccatcaaggtgtgggactatgaaacaggagactttgagaggaccctgaagggccacacagacagcgtgcaggacatcagctttgaccacagcggcaagctgctggccagctgcagcgctgacatgaccatcaagctgtgggacttccagggctttgagtgcatccgcaccatgcacggccatgaccacaacgtgtcctctgtggccatcatgcccaatggagaccacatcgtgtctgccagccgggacaagaccatcaagatgtgggaggtgcagacaggctactgtgtgaagaccttcaccggccaccgggagtgggtgaggatggtgcggcccaaccaggacggcaccctgattgccagctgcagcaatgaccagacagtgcgggtgtgggtggtggccaccaaggagtgcaaggccgagctgcgggagcatgaacatgtggtggagtgcatctcctgggcccctgagagcagctacagcagcatcagcgaggccactggaagtgagaccaagaagagcggcaagccaggccccttcctgctgagcggcagccgggacaagaccatcaagatgtgggatgtgtccacaggcatgtgcctgatgaccctggtgggccatgacaactgggtgcggggcgtgctcttccacagcggcggcaagttcatcctgagctgtgctgatgacaagaccctgcgggtgtgggactacaagaacaagcgctgcatgaagaccctgaatgcccacgagcactttgtgaccagcctggacttccacaagacagccccctacgtggtgactggatctgtggaccagacagtgaaggtgtgggagtgcaggtag

SEQ ID NO: 164330 - DNA, 618 bp, synthetic construct
  misc_feature 1..618: note = Description of Artificial Sequence: Synthetic coding sequence
  source 1..618: mol_type = other DNA
atgaccatcaagctgtgggacttccagggctttgagtgcatccgcaccatgcacggccatgaccacaacgtgtcctctgtggccatcatgcccaacggggaccacatcgtgtctgccagccgggacaagaccatcaagatgtgggaggtgcagacaggctactgtgtgaagaccttcaccggccaccgggagtgggtgaggatggtgcggcccaaccaggacggcaccctcatcgccagctgcagcaatgaccagacagtgcgggtgtgggtggtggccaccaaggagtgcaaggccgagctgcgggagcacgagcacgtggtggagtgcatctcctgggcccctgagagcagctacagcagcatcagcgaggccaccggcagcgaggtgggccatgacaactgggtgcggggcgtgctcttccacagcggcggcaagttcatcctgagctgtgctgatgacaagaccctgcgggtgtgggactacaagaacaagcgctgcatgaagaccctgaatgcccacgagcactttgtgaccagcctggacttccacaagacagccccctacgtggtgacaggctctgtggaccagacagtgaaggtgtgggagtgcaggtag

SEQ ID NO: 164331 - DNA, 1029 bp, synthetic construct
  misc_feature 1..1029: note = Description of Artificial Sequence: Synthetic coding sequence
  source 1..1029: mol_type = other DNA
atggagccccatgacagcagccacatggattctgagttccgctacaccctcttccccatcgtgtacagcatcatctttgtgctgggcgtgattgccaacggctacgtgctgtgggtgtttgcccggctgtacccctgcaagaagttcaatgagatcaagatcttcatggtgaacctgaccatggctgacatgctgttcctgatcaccctgcccctgtggatcgtgtactaccagaaccagggcaactggatcctgcccaagttcctgtgcaatgtggccggctgcctcttcttcatcaacacctactgcagcgtggccttcctgggcgtcatcacctacaaccgcttccaggccgtgacccggcccatcaagacagcccaggccaacaccaggaagaggggcatcagcctgagcctggtgatctgggtggccatcgtgggcgccgccagctacttcctgatcctggacagcaccaacacagtgcctgacagcgctggcagcggaaatgtgacccgctgctttgagcactatgaaaaaggatctgtgcctgtgctgatcatccacatcttcatcgtgttctccttcttcctggtgttcctgatcatcctcttctgcaacctggtgatcatccgcaccctgctgatgcagcctgtgcagcagcagagaaatgctgaggtgaagaggcgggccctgtggatggtgtgcaccgtgctggccgtgttcatcatctgctttgtgccccaccacgtggtgcagctgccctggaccctggccgagctgggcttccaggacagcaagttccaccaggccatcaatgatgcccaccaggtgaccctgtgcctgctgagcaccaactgtgtgctggaccccgtcatctactgcttcctgaccaagaagttcaggaagcacctgacagagaagttctacagcatgaggagcagcaggaagtgcagccgggccaccacagacacagtgacagaggtggtggtgcccttcaaccagatccctggcaacagcctgaagaactag

SEQ ID NO: 164332 - DNA, 1029 bp, synthetic construct; identical to SEQ ID NO: 164331
  misc_feature 1..1029: note = Description of Artificial Sequence: Synthetic coding sequence
  source 1..1029: mol_type = other DNA

SEQ ID NO: 164333 - DNA, 1029 bp, synthetic construct; identical to SEQ ID NO: 164331
  misc_feature 1..1029: note = Description of Artificial Sequence: Synthetic coding sequence
  source 1..1029: mol_type = other DNA

SEQ ID NO: 164334 - DNA, 1128 bp, synthetic construct
  misc_feature 1..1128: note = Description of Artificial Sequence: Synthetic coding sequence
  source 1..1128: mol_type = other DNA
atgaaggtgtggctgctgctgggcctgctgctggtgcatgaggccctggaggatgtgacaggccagcacctgcccaagaacaagaggcccaaggagcctggagaaaatcgcatcaagcccaccaacaagaaggtgaagcccaagatccccaagatgaaggaccgggacagcgccaacagcgcccccaagacccagagcatcatgatgcaggtgctggacaagggccgcttccagaagccagctgccaccctgagcctgctggccggccagacagtggagctgcgctgcaagggcagcagaattggctggagctacccagcctacctggacaccttcaaggacagccggctgtctgtgaagcagaatgaaagatatggccagctgaccctggtgaacagcaccagcgctgacaccggggagttcagctgctgggtgcagctgtgcagcggctacatctgcaggaaggatgaggccaagacaggcagcacctacatcttcttcacagagaagggggagctgtttgtgcccagccccagctactttgatgtggtgtacctgaacccagaccggcaggccgtggtgccctgccgggtgacagtgctgagcgccaaggtgaccctgcaccgggagttccctgccaaggagatcccagccaatggaacagacatcgtgtatgacatgaagaggggctttgtgtacctgcagccccacagcgagcaccagggcgtggtgtactgcagagctgaggccggcggccgcagccagatctctgtgaagtaccagctgctgtatgtggccgtgcccagcggcccccccagcaccaccatcctggccagcagcaacaaggtgaagtctggagatgacatctctgtgctgtgcaccgtgctgggggagccagatgtggaggtggagttcacctggatcttccctggccagaaggatgagaggcctgtgaccatccaggacacctggaggctcatccaccggggcctgggccacaccacccgcatcagccagagcgtcatcaccgtggaggactttgagaccattgatgctggctactacatctgcacagcccagaacctgcagggccagaccaccgtggccaccaccgtggagttctcctag

SEQ ID NO: 164335 - DNA, 1128 bp, synthetic construct; identical to SEQ ID NO: 164334
  misc_feature 1..1128: note = Description of Artificial Sequence: Synthetic coding sequence
  source 1..1128: mol_type = other DNA

SEQ ID NO: 164336 - DNA, 1128 bp, synthetic construct; identical to SEQ ID NO: 164334
  misc_feature 1..1128: note = Description of Artificial Sequence: Synthetic coding sequence
  source 1..1128: mol_type = other DNA

SEQ ID NO: 164337 - DNA, 3075 bp, synthetic construct
  misc_feature 1..3075: note = Description of Artificial Sequence: Synthetic coding sequence
  source 1..3075: mol_type = other DNA
atggcccagggcgccatgaggttctgcagcgagggggactgtgccatcagccccccacgctgcccccggcgctggctgcctgagggccctgtgccccagagccccccagcctccatgtatggcagcacaggcagcctgctgcggcgggtggccggccctggcccccggggccgggagctgggccgggtgacagccccctgcacccccctgcggggcccccccagcccccgggtggcccccagcccctgggcccccagcagccccaccggccagcccccacctggggcccagagctctgtggtgatcttccgctttgtggagaaggcctctgtgcggcccctgaatggcctgcctgcccctgggggcctgagccgctcctgggacctgggcggcgtgagccccccccggcccaccccagccctgggccctggcagcaacaggaagctgcggctggaggccagcaccagtgaccccctgcctgcccggggcggcagcgccctgcccggcagcaggaacctggtgcacggccccccagccccaccccaggtgggcgcagatggcctgtacagcagcctgcccaacggcctgggcggccccccagagcggctggccaccctgtttggaggccctgctgacaccggcttcctgaaccagggcgacacctggagcagcccccgggaggtgagcagccacgcccagagaattgcccgggccaagtgggagttcttctacggcagcctggacccccccagcagcggggccaagcccccagagcaggccccacccagccccccaggagtgggcagccggcagggcagcggcgtggccgtgggccgggccgccaagtacagcgagacagacctggacacagtgcccctgcgctgctaccgggagacagacattgatgaggtgctggccgagcgggaggaggccgacagcgccatcgagagccagcccagcagcgagggccccccaggcacagcctaccccccagcccccaggcctggccccctgcccggcccccaccccagcctgggcagcggaaatgaagatgaagatgatgatgaagctggaggagaagaagatgtggatgatgaggtgtttgaggccagcgagggcgcccggcccggcagcaggatgcccctgaagagccctgtgcccttcctgcccggcaccagccccagcgcagatggccctgacagcttcagctgtgtgtttgaggccatcctggagagccaccgggccaagggcaccagctacaccagcctggccagcctggaggccctggccagccctggccccacccagagccccttcttcacctttgagctgcccccccagcccccagcccccaggccagaccccccagccccagcccccctggcccccctggagccagacagcggcaccagcagcgctgctgatggcccctggacccagagaggagaggaggaggaggccgaggcccgggccaagctggcccctggccgggagccccccagcccctgccacagcgaggacagcctgggcctgggcgccgcccccctgggcagcgagccccccctgagccagctggtgtctgacagcgacagcgagctggacagcacagagcggctggccctgggcagcacagacaccctgagcaatggccagaaggctgacctggaggccgcccagaggctggccaagaggctgtaccgcctggatggcttcaggaaggcagatgtggcccggcacctgggcaagaacaatgacttcagcaagctggtggccggggagtacctgaagttctttgtgttcaccggcatgaccctggaccaggccctgcgggtcttcctgaaggagctggccctgatgggagagacccaggagcgggagcgggtgctggcccacttcagccagcgctacttccagtgcaaccctgaggccctgagcagtgaagatggagcccacaccctgacctgtgccctgatgctgctgaacacagacctgcacggccacaacatcggcaagaggatgacctgtggggacttcatcggcaacctggagggcctgaatgatggaggagacttcccccgggagctgctgaaggccctgtacagcagcatcaagaatgagaagctgcagtgggccattgatgaggaggagctgcggcgcagcctgtctgagctggccgaccccaaccccaaggtgatcaagaggatcagcggcggcagcggcagcggcagcagccccttcctggacctgaccccagagcctggagctgctgtgtacaagcacggggccctggtgaggaaggtgcatgctgaccctgactgcaggaagaccccccggggcaagaggggctggaagagcttccacggcatcctgaagggcatgatcctgtacctgcagaaggaggagtacaagccaggcaaggccctgtctgaaacagagctgaagaatgccatcagcatccaccacgccctggccacccgggccagtgactacagcaagaggcctcatgtgttctacctgaggacagctgactggagggtcttcctgttccaggcccccagcctggagcagatgcagagctggatcacccgcatcaacgtggtggccgccatgttcagcgccccacccttccctgctgctgtgagcagccagaagaagttcagccggcccctgctgcccagcgctgccacccggctgagccaggaggagcaggtgaggacccatgaggccaagctgaaggccatggccagcgagctgcgggagcacagagctgcccagctgggcaagaagggccggggcaaggaggccgaggagcagaggcagaaggaggcctacctggagtttgagaagagccgctacagcacctacgccgccctgctgcgggtgaagctgaaggccggcagcgaggagctggatgctgtggaggccgccctggcccaggccggcagcacagaagatggcctgccccccagccacagcagccccagcctgcagcccaagcccagcagccagccccgggcccagaggcacagcagcgagcccaggcctggagctggcagcggccgcaggaagccctag

SEQ ID NO: 164338 - DNA, 3075 bp, synthetic construct; identical to SEQ ID NO: 164337
  misc_feature 1..3075: note = Description of Artificial Sequence: Synthetic coding sequence
  source 1..3075: mol_type = other DNA

SEQ ID NO: 164339 - DNA, 2784 bp, synthetic construct
  misc_feature 1..2784: note = Description of Artificial Sequence: Synthetic coding sequence
  source 1..2784: mol_type = other DNA
cagatctggcgctgccccctgcagcaccacgccgagagcgccccacccctgcctgccctgtcctgggcccagcccctgctgtgcctgagctctgtgtctgccctgggggagcagaggcccaccccagccctgggccctggcagcaacaggaagctgcggctggaggccagcaccagtgaccccctgcctgcccggggcggcagcgccctgcccggcagcaggaacctggtgcacggccccccagccccaccccaggtgggcgcagatggcctgtacagcagcctgcccaacggcctgggcggccccccagagcggctggccaccctgtttggaggccctgctgacaccggcttcctgaaccagggcgacacctggagcagcccccgggaggtgagcagccacgcccagagaattgcccgggccaagtgggagttcttctacggcagcctggacccccccagcagcggggccaagcccccagagcaggccccacccagccccccaggagtgggcagccggcagggcagcggcgtggccgtgggccgggccgccaagtacagcgagacagacctggacacagtgcccctgcgctgctaccgggagacagacattgatgaggtgctggccgagcgggaggaggccgacagcgccatcgagagccagcccagcagcgagggccccccaggcacagcctaccccccagccccccggcccggccccctgcccggcccccaccccagcctgggcagcggaaatgaagatgaagatgatgatgaggccggcggggaggaggatgtggatgatgaggtgtttgaggccagcgagggcgcccggcccggcagcaggatgcccctgaagagccctgtgcccttcctgcccggcaccagccccagcgcagatggccctgacagcttcagctgtgtgtttgaggccatcctggagagccaccgggccaagggcaccagctacaccagcctggccagcctggaggccctggccagccctggccccacccagagccccttcttcacctttgagctgcccccccagcccccagcccccaggccagaccccccagccccagcccccctggcccccctggagccagattctggcaccagcagcgctgctgatggcccctggacccagagaggagaggaggaggaggccgaggcccgggccaagctggcccctggccgggagccccccagcccctgccacagcgaggacagcctgggcctgggcgccgcccccctgggcagcgagccccccctgagccagctggtgtctgacagcgacagcgagctggacagcacagagcggctggccctgggcagcacagacaccctgagcaatggccagaaggctgacctggaggccgcccagaggctggccaagaggctgtaccgcctggatggcttcaggaaggcagatgtggcccggcacctgggcaagaacaatgacttcagcaagctggtggccggggagtacctgaagttctttgtgttcaccggcatgaccctggaccaggccctgcgggtcttcctgaaggagctggccctgatgggagagacccaggagcgggagcgggtgctggcccacttcagccagcgctacttccagtgcaaccctgaggccctgagcagtgaagatggagcccacaccctgacctgtgccctgatgctgctgaacacagacctgcacggccacaacatcggcaagaggatgacctgtggggacttcatcggcaacctggagggcctgaatgatggaggagacttcccccgggagctgctgaaggccctgtacagcagcatcaagaatgagaagctgcagtgggccattgatgaggaggagctgcggcgcagcctgtctgagctggccgaccccaaccccaaggtgatcaagaggatcagcggcggcagcggcagcggcagcagccccttcctggacctgaccccagagcccggggctgctgtgtacaagcatggagccctggtgaggaaggtgcacgccgaccctgactgcaggaagaccccccggggcaagaggggctggaagagcttccacggcatcctgaagggcatgatcctgtacctgcagaaggaggagtacaagccaggcaaggccctgtctgaaacagagctgaagaatgccatcagcatccaccacgccctggccacccgggccagtgactacagcaagaggccccacgtgttctacctgaggacagctgactggagggtcttcctgttccaggcccccagcctggagcagatgcagagctggatcacccgcatcaacgtggtggccgccatgttttctgccccacccttccctgctgctgtgagcagccagaagaagttcagccggcccctgctgcccagcgctgccacccggctgagccaggaggagcaggtgaggacccatgaggccaagctgaaggccatggccagcgagctgcgggagcaccgggccgcccagctgggcaagaagggccggggcaaggaggccgaggagcagaggcagaaggaggcctacctggagtttgagaagagccgctacagcacctatgctgccctgctgcgggtgaagctgaaggccggcagcgaggagctggatgctgtggaggccgccctggcccaggccggcagcacagaagatggcctgccccccagccacagcagccccagcctgcagcccaagcccagcagccagccccgggcccagaggcacagcagcgagcccaggcctggggccggcagcggccgcaggaagccctag

SEQ ID NO: 164340 - DNA, 1542 bp, synthetic construct
  misc_feature 1..1542: note = Description of Artificial Sequence: Synthetic coding sequence
  source 1..1542: mol_type = other DNA
atgggcagctcctggtgcctgtatggctgctgcaatgccggcgtgaagaccacccggctggaggcccacagcgagatgggcagcacagagatcctggagaaggagaccccagagaacctgagcaatggcaccagcagcaatgtggaggccgccaagaggctggccaagaggctgtaccagctggaccgcttcaagagaagtgatgtggccaagcacctgggcaagaacaatgagttcagcaagctggtggccgaggagtacctgaagttctttgacttcaccggcatgaccctggaccagagcctgcgctacttcttcaaggccttcagcctggtgggggagacccaggagcgggagcgggtgctgatccacttcagcaaccgctacttctactgcaacccagacaccatcgccagccaggatggagtgcactgcctgacctgtgccatcatgctgctgaacacagacctgcacggccacaacatcggcaagaagatgacctgccaggagttcatcgccaacctgcagggcgtgaatgaaggagtggacttcagcaaggacctgctgaaggccctgtacaacagcatcaagaatgagaagctggagtgggccgtggatgatgaggagaagaagaagagccccagcgagagcacagaggagaaggccaacggcacccaccccaagaccatcagcagaattggcagcaccaccaaccccttcctggacatcccccatgaccccaatgctgctgtgtacaagagcggcttcctggccaggaagatccatgctgacatggatggcaagaagaccccccggggcaagaggggctggaagaccttctatgctgtgctgaagggcaccgtgctgtacctgcagaaggatgagtacaagccagagaaggccctgtctgaggaggacctgaagaatgctgtgtctgtgcaccacgccctggccagcaaggccacagattatgagaagaagcccaacgtgttcaagctgaagacagctgactggagggtgctgctcttccagacccagagccctgaggagatgcagggctggatcaacaagatcaactgtgtggccgctgtgttcagcgccccacccttccctgctgccatcggcagccagaagaagttcagccggcccctgctgcctgccaccaccaccaagctgagccaggaggagcagctgaagagccatgagagcaagctgaagcagatcaccacagagctggccgagcacaggagctaccccccagacaagaaggtgaaggccaaggatgtggatgagtacaagctgaaggaccactacctggagtttgagaagaccaggtatgagatgtatgtgtccatcctgaaggagggcggcaaggagctgctgagcaatgatgagagcgaggccgccggcctgaagaagagccacagcagccccagcctgaacccagacaccagccccatcacagccaaggtgaagagaaatgtgtctgagaggaaggaccacaggcctgagacccccagcatcaagcagaaggtgacctag

SEQ ID NO: 164341 - DNA, 3144 bp, synthetic construct
  misc_feature 1..3144: note = Description of Artificial Sequence: Synthetic coding sequence
  source 1..3144: mol_type = other DNA
atggagggccgctctgctgctgctgagacctttgtgtgggtgaacaatgccagcgcccacagccagagcgtggccaaggccaagtatgagttcctgtttggccgctctgagggcaaggccccagacaccagtgaccacggcggcagcaccctgctgcccccaaatgtgaccaatgagttcccagaatatggcaccatggaggagggcggggagggcctgcgggccagcctggagtttgatggagaggccctgccctgccacccccaggagcagcagggcgtgcagcccctgaccggctgccacagcggcctggacagcgtgacagagggccccaaggatgtgcgggaggcccccagccagagccacctgaaggagcagagcctgcagcccatcgacagcctcatcagcgccctgaaggccacagaggcccgcatcatcagcggcaccctgcaggccaccaaggtgctggaccaggatgctgtgtcctccttctctgtgcagcaggtggagaaggagctggacacagccagcaggaagacccagagggtgaacaagaccctgcctgctggccagaagaacctgcctgagatccccctgtctgctgaggtgaccacagaggagagcttctacctgagcatccagaaggacctgacagccctgctgaccggggacacccaggccgagatcagccagatcatgaacaatggaagaaaaggagctgtgtgtgtgcaggagcccagctgccccctggccagcctgggcagcagcgctgtgacctgccacagcgctggctctgtgggcttcctgaaggagcagaggtctgccctgggccgggagcaccctgggggctgtgacaggagcagctccatgggccggcccggccgggtgaagcacgtggagttccagggcgtggagatcctgtggacaggaggagacaagcgggagacccagcaccccatcgactttgagaccagcctgcagaggacagccagcccagacagcaaggagagcagcaaggtgcccaggcacctgatcagcagcgctggcctgtgcaacagcagcagcctgacagaaaatgtgtgggatgagagctggaaggcccccagcgagcggcccggcaccagcagcggcaccttcagccctgtgcggctggatgaaagtggagaagatgaggtgttcctgcaggagaacaagcagcacctggagaagacccccaagccagagcgggaccgggagcgcatcagcgagcaggaggagcacgtgaagggggaggatgaggacatcctgggccctggctacacagaggacagcacagatgtgtacagcagccagtttgagaccatcctggacaacaccagcctgtactacagcgctgagagcctggagaccctgtacagcgagccagacagctacttctcctttgagatgcccctgacccccatgatccagcagaggatcaaggagggcggccagttcctggagaggaccagcggcggcggccaccaggacatcctgtctgtgtctgcagatggcggcatcgtgatgggctacagcagtggagtgaccaacggcctgaatgatgccagtgacagcatctacaccaagggcaccccagagatcgccttctggggcagcaatgccggcgtgaagaccacccggctggaggcccacagcgagatgggcagcacagagatcctggagaaggagaccccagagaacctgagcaatggcaccagcagcaatgtggaggccgccaagaggctggccaagaggctgtaccagctggaccgcttcaagagaagtgatgtggccaagcacctgggcaagaacaatgagttcagcaagctggtggccgaggagtacctgaagttctttgacttcaccggcatgaccctggaccagagcctgcgctacttcttcaaggccttcagcctggtgggggagacccaggagcgggagcgggtgctgatccacttcagcaaccgctacttctactgcaacccagacaccatcgccagccaggatggagtgcactgcctgacctgtgccatcatgctgctgaacacagacctgcacggccacaacatcggcaagaagatgacctgccaggagttcatcgccaacctgcagggcgtgaatgaaggagtggacttcagcaaggacctgctgaaggccctgtacaacagcatcaagaatgagaagctggagtgggccgtggatgatgaggagaagaagaagagccccagcgagagcacagaggagaaggccaacggcacccaccccaagaccatcagcagaattggcagcaccaccaaccccttcctggacatcccccatgaccccaatgctgctgtgtacaagagcggcttcctggccaggaagatccatgctgacatggatggcaagaagaccccccggggcaagaggggctggaagaccttctatgctgtgctgaagggcaccgtgctgtacctgcagaaggatgagtacaagccagagaaggccctgtctgaggaggacctgaagaatgctgtgtctgtgcaccacgccctggccagcaaggccacagattatgagaagaagcccaacgtgttcaagctgaagacagctgactggagggtgctgctcttccagacccagagccctgaggagatgcagggctggatcaacaagatcaactgtgtggccgctgtgttcagcgccccacccttccctgctgccatcggcagccagaagaagttcagccggcccctgctgcctgccaccaccaccaagctgagccaggaggagcagctgaagagccatgagagcaagctgaagcagatcaccacagagctggccgagcacaggagctaccccccagacaagaaggtgaaggccaaggatgtggatgagtacaagctgaaggaccactacctggagtttgagaagaccaggtatgagatgtatgtgtccatcctgaaggagggcggcaaggagctgctgagcaatgatgagagcgaggccgccggcctgaagaagagccacagcagccccagcctgaacccagacaccagccccatcacagccaaggtgaagagaaatgtgtctgagaggaaggaccacaggcctgagacccccagcatcaagcagaaggtgacctag

SEQ ID NO: 164342 - DNA, 810 bp, synthetic construct
  misc_feature 1..810: note = Description of Artificial Sequence: Synthetic coding sequence
  source 1..810: mol_type = other DNA
atgattggagtgaacagcgtgcagagcgccagcaaggtgcgggtgaggaccagcggctctgtgaagtacagccgggaggacagcatccggcggcagagccacaggagcaagtccatgaagatcagcaacagcagcgagttcagcgccaaggagaacaaggccctgtacaacagcatcaagaatgagaagctggagtgggccgtggatgatgaggagaagaagaagagccccagcgagagcacagaggagaaggccaacggcacccaccccaagaccatcagccgcatcggcagcaccaccaaccccttcctggacatcccccatgaccccaatgctgctgtgtacaagagcggcttcctggccaggaagatccacgccgacatggatggcaagaagaccccccggggcaagaggggctggaagaccttctatgctgtgctgaagggcaccgtgctgtacctgcagaagcatgagagcaagctgaagcagatcaccacagagctggccgagcacaggagctaccccccagacaagaaggtgaaggccaaggatgtggatgagtacaagctgaaggaccactacctggagtttgagaagaccaggtatgagatgtatgtgtccatcctgaaggagggcggcaaggagctgctgagcaatgatgagagcgaggccgccggcctgaagaagagccacagcagccccagcctgaacccagacaccagccccatcacagccaaggtgaagagaaatgtgtctgagaggaaggaccacaggcctgagacccccagcatcaagcagaaggtgacctag

SEQ ID NO: 164343 - DNA, 3150 bp, synthetic construct
  misc_feature 1..3150: note = Description of Artificial Sequence: Synthetic coding sequence
  source 1..3150: mol_type = other DNA
atggagggccgctctgctgctgctgagacctttgtgtgggtgaacaatgccagcgcccacagccagagcgtggccaaggccaagtatgagttcctgtttggccgctctgagggcaaggccccagacaccagtgaccacggcggcagcaccctgctgcccccaaatgtgaccaatgagttcccagaatatggcaccatggaggagggcggggagggcctgcgggccagcctggagtttgatggagaggccctgccctgccacccccaggagcagcagggcgtgcagcccctgaccggctgccacagcggcctggacagcgtgacagagggccccaaggatgtgcgggaggcccccagccagagccacctgaaggagcagagcctgcagcccatcgacagcctcatcagcgccctgaaggccacagaggcccgcatcatcagcggcaccctgcaggccaccaaggtgctggaccaggatgctgtgtcctccttctctgtgcagcaggtggagaaggagctggacacagccagcaggaagacccagagggtgaacaagaccctgcctgctggccagaagaacctgcctgagatccccctgtctgctgaggtgaccacagaggagagcttctacctgagcatccagaaggacctgacagccctgctgaccggggacacccaggccgagatcagccagatcatgaacaatggaagaaaaggagctgtgtgtgtgcaggagcccagctgccccctggccagcctgggcagcagcgctgtgacctgccacagcgctggctctgtgggcttcctgaaggagcagaggtctgccctgggccgggagcaccctgggggctgtgacaggagcagctccatgggccggcccggccgggtgaagcacgtggagttccagggcgtggagatcctgtggacaggaggagacaagcgggagacccagcaccccatcgactttgagaccagcctgcagaggacagccagcccagacagcaaggagagcagcaaggtgcccaggcacctgatcagcagcgctggcctgtgcaacagcagcagcctgacagaaaatgtgtgggatgagagctggaaggcccccagcgagcggcccggcaccagcagcggcaccttcagccctgtgcggctggatgaaagtggagaagatgaggtgttcctgcaggagaacaagcagcacctggagaagacccccaagccagagcgggaccgggagcgcatcagcgagcaggaggagcacgtgaagggggaggatgaggacatcctgggccctggctacacagaggacagcacagatgtgtacagcagccagtttgagaccatcctggacaacaccagcctgtactacagcgctgagagcctggagaccctgtacagcgagccagacagctacttctcctttgagatgcccctgacccccatgatccagcagaggatcaaggagggcggccagttcctggagaggaccagcggcggcggccaccaggacatcctgtctgtgtctgcagatggcggcatcgtgatgggctacagcagtggagtgaccaacggcctgaatgatgccagtgacagcatctacaccaagggcaccccagagatcgccttctggggcagcaatgccggcgtgaagaccacccggctggaggcccacagcgagatgggcagcacagagatcctggagaaggagaccccagagaacctgagcaatggcaccagcagcaatgtggaggccgccaagaggctggccaagaggctgtaccagctggaccgcttcaagagaagtgatgtggccaagcacctgggcaagaacaatgagttcagcaagctggtggccgaggagtacctgaagttctttgacttcaccggcatgaccctggaccagagcctgcgctacttcttcaaggccttcagcctggtgggggagacccaggagcgggagcgggtgctgatccacttcagcaaccgctacttctactgcaacccagacaccatcgccagccaggatggagtgcactgcctgacctgtgccatcatgctgctgaacacagacctgcacggccacgtgagcaacatcggcaagaagatgacctgccaggagttcatcgccaacctgcagggcgtgaatgaaggagtggacttcagcaaggacctgctgaaggccctgtacaacagcatcaagaatgagaagctggagtgggccgtggatgatgaggagaagaagaagagccccagcgagagcacagaggagaaggccaacggcacccaccccaagaccatcagcagaattggcagcaccaccaaccccttcctggacatcccccatgaccccaatgctgctgtgtacaagagcggcttcctggccaggaagatccatgctgacatggatggcaagaagaccccccggggcaagaggggctggaagaccttctatgctgtgctgaagggcaccgtgctgtacctgcagaaggatgagtacaagccagagaaggccctgtctgaggaggacctgaagaatgctgtgtctgtgcaccacgccctggccagcaaggccacagattatgagaagaagcccaacgtgttcaagctgaagacagctgactggagggtgctgctcttccagacccagagccctgaggagatgcagggctggatcaacaagatcaactgtgtggccgctgtgttcagcgccccacccttccctgctgccatcggcagccagaagaagttcagccggcccctgctgcctgccaccaccaccaagctgagccaggaggagcagctgaagagccatgagagcaagctgaagcagatcaccacagagctggccgagcacaggagctaccccccagacaagaaggtgaaggccaaggatgtggatgagtacaagctgaaggaccactacctggagtttgagaagaccaggtatgagatgtatgtgtccatcctgaaggagggcggcaaggagctgctgagcaatgatgagagcgaggccgccggcctgaagaagagccacagcagccccagcctgaacccagacaccagccccatcacagccaaggtgaagagaaatgtgtctgagaggaaggaccacaggcctgagacccccagcatcaagcagaaggtgacctag

SEQ ID NO: 164344 - DNA, 3171 bp, synthetic construct
  misc_feature 1..3171: note = Description of Artificial Sequence: Synthetic coding sequence
  source 1..3171: mol_type = other DNA
atgatgggagactaccgcctgcctgaccacccccagcccatggagatcctgaacctgtacctgggggacagcctggagccccaccctggagaatgtccccgggagacctgcagccatgaggaccccccagagccctttgaggagcagacctgggccacagatcctcctgagcccacccggcagaatgtgcccccctggggcagcggcgtggagctgacccacctgggctcctgggtgcaccaggacggcctggagccctgccaggagcagacccgggccacagaccccccagagagcacccggcaggatgccccaccctggggcagcggcgtggagctgacccacctgggcagccccagcgcccagcgggagcaccggcagaacacagccagccctggcagccctgtgaacagccacctgcccggcagccccaagcagaacagaagcaccagcacccaggtggtgttctgggccggcatcctgcaggcccagatgtgtgtgctggacctggaggaggagctggagaagacagagggcctgaaggccggcctgaagtgctgcctgcccaccccacctgtggacctgcccggggacaccggcctgcacagcagccccccagaaaatgaagattctggagaggacagcagcgagcctgagggggagggccaggcctggctgcgggagggcaccccagacagcagcccccagtggggcgctgaggaggagagcatgttcttcagcaaccccctcttcctggccagcccctgcagcgagaacagcgccagcggggagtgcttctcctggggcgccagtgacagccatgctggggtgaggactggacctgagagccctgccaccctggagccccccctgcctgaagatactgtgctgtgggagctggagagcgagccagacctgggagatggagctgccatcagcggccactgcaccccacccttccctgtgcccatctacaagccccacagcatctgctgggcctctgtggccgctgctgagggcgccccagctgcccctcctggccacggggagagcgagggggaccggctgggccctgcccccagcgctgccccctgtgtggatgaggccctgacctgggagagcggctgtgtgggcagtgacctgggccctgctgcccaccctgtgcagccctgggccagcctgagccctgagggctggcagaggggcggccccttctggccccaggtgaccctgaacagccaggacagagatgagcgggagggcggccacccccaggagagcctgccctgcaccctggccccctgcccctggaggagccctgccagcagccctgagcccagcagccctgagagcgagagccggggccctggcccccggcccagccctgccagcagccaggagggcagcccccagctgcagcaccacagcagcggcatcctgcccaagtggaccctggatgccagccagagcagcctgctggagacagatggagagcagcccagcagcctgaagaagaaggaggccggggaggcccccaagccaggagaggaggtgaagtctgagggcacagcccggcctgctgagactggagatgtgcagcctgacatccacctgaccagcgctgagcacgagaacctgcggacccccatgaacagctcctggctgcccggcagccccatgccccaggcccagagccctgaggagggccagaggcccccagctggggacaagctggccaacggggtgaggaacaacaaggtggcctggaacctggccagccggctgtaccgcctggagggcttcaggaagtctgaggtggccgcctacctgcagaagaacaatgacttcagcagagctgtggccgaggagtacctgtccttcttccagtttggaggccagagcctggaccgggccctgcgctccttcctgcaggccctggtgctgtctggagagacccaggagcgggagcgcatcctgtaccagttcagccgccgcttccaccactgcaaccctggcatcttccccagcgtggacagcgtgcacaccctgacctgtgccatcatgctgctgaacacagacctgcacggccagaacatcggcaagtccatgagctgccaggagttcatcaccaacctgaatggcctgagagatggcggcaacttccccaaggagctgctgaaggccctgtactggagcatccgctctgagaagctggagtgggccgtggatgaggaggacacagcccggcctgagaaggcccagcccagcctgcctgctgggaagatgagcaagcccttcctgcagctggcccaggaccccaccgtgcccacctacaagcagggcatcctggccaggaagatgcaccaggatgctgatggcaagaagaccccctggggcaagaggggctggaagatgttccacaccctgctgcggggcatggtgctgtacttcctgaagcagggcgaggaccactgcctggagggggagagcctggtgggccagatggtggatgagcctgtgggcgtgcaccacagcctggccaccccagccacccactacaccaagaagccccacgtgttccagctgaggacagctgactggaggctgtacctgttccaggcccccacagccaaggagatgagctcctggatcgcccgcatcaacctggccgccgccacccacagcgccccacccttccctgctgctgtgggcagccagaggagatttgtgcggcccatcctgcctgtgggccctgcccagagcagcctggaggagcagcacaggagccatgagaactgcctggatgctgctgctgatgacctgctggacctgcagaggaacctgcctgagcggcggggccggggccgggagctggaggagcaccggctgaggaaggagtacctggagtatgagaagaccaggtatgagacctacgtgcagctgctggtggcccggctgcactgccccagtgatgccctggacctgtgggaggagcagctgggccgggaggccggcggcacccgggagcccaagctgagcctgaagaagagccacagcagccccagcctgcaccaggatgaggcccccaccacagccaaggtgaagaggaacatcagcgagaggaggacctacaggaagatcatccccaagaggaacagaaaccagctgtag

SEQ ID NO: 164345 - DNA, 1152 bp, synthetic construct
  misc_feature 1..1152: note = Description of Artificial Sequence: Synthetic coding sequence
  source 1..1152: mol_type = other DNA
atgccctacgtggaccggcagaaccgcatctgtggcttcctggacatcgaggagaatgaaaacagcggcaagttcctgcggcgctacttcatcctggacacccgggaggacagctttgtgtggtacatggacaacccccagaacctgcccagcggcagcagccgggtgggcgccatcaagctgacctacatcagcaaggtgtctgatgccaccaagctgcggcccaaggccgagttctgctttgtgatgaatgccggcatgaggaagtacttcctgcaggccaatgaccagcaggacctggtggagtgggtgaatgtgctgaacaaggccatcaagatcaccgtgcccaagcagagcgacagccagcccaacagcgacaacctgagcagacatggagaatgtgggaagaagcaggtgtcctacagaacagacatcgtgggcggcgtgcccatcatcacccccacccagaaggaggaggtgaatgaatgtggggagagcattgacaggaacaacctgaagaggagccagagccacctgccctacttcacccccaagccaccccaggacagcgctgtgatcaaggccggctactgtgtgaagcagggcgctgtgatgaagaactggaagaggcgctacttccagctggatgagaacaccatcggctacttcaagtctgagctggagaaggagcccctgcgggtcatccccctgaaggaggtgcacaaggtgcaggagtgcaagcagagcgacatcatgatgagggacaacctgtttgagatcgtgaccaccagcaggaccttctacgtgcaggccgacagccctgaggagatgcacagctggatcaaggctgtgtctggggccatcgtggcccagaggggccctggccgcagcgccagctccatgaggcaggcccggcggctgagcaacccctgcatccagaggagcatcccccctgtgctgcagaaccccaacaccctgtctgtgctgcccacccagcccccaccaccccacatcccccagcccctggccgccaccctgtggagccagcccctgccctggaggtctgaggacttcaccagcctgctgcccaggagcagccagggcaccagccgcagccggctgagcctgcaggagaaccagctgcccaagtag

SEQ ID NO: 164346 - DNA, 1152 bp, synthetic construct; identical to SEQ ID NO: 164345
  misc_feature 1..1152: note = Description of Artificial Sequence: Synthetic coding sequence
  source 1..1152: mol_type = other DNA

SEQ ID NO: 164347 - DNA, 1215 bp, synthetic construct
  misc_feature 1..1215: note = Description of Artificial Sequence: Synthetic coding sequence
  source 1..1215: mol_type = other DNA
atgccctacgtggaccggcagaaccgcatctgtggcttcctggacatcgaggagaatgaaaacagcggcaagttcctgcggcgctacttcatcctggacacccgggaggacagctttgtgtggtacatggacaacccccagaacctgcccagcggcagcagccgggtgggcgccatcaagctgacctacatcagcaaggtgtctgatgccaccaagctgcggcccaaggccgagttctgctttgtgatgaatgccggcatgaggaagtacttcctgcaggccaatgaccagcaggacctggtggagtgggtgaatgtgctgaacaaggccatcaagatcaccgtgcccaagcagagcgacagccagcccaacagcgacaacctgagcagacatggagaatgtgggaagaagcaggtgtcctacagaacagacatcgtgggcggcgtgcccatcatcacccccacccagaaggaggaggtgaatgaatgtggggagagcattgacaggaacaacctgaagaggagccagagccacctgccctacttcacccccaagccaccccaggacagcgctgtgatcaaggccggctactgtgtgaagcagggcgctgtgatgaagaactggaagaggcgctacttccagctggatgagaacaccatcggctacttcaagtctgagctggagaaggagcccctgcgggtcatccccctgaaggaggtgcacaaggtgcaggagtgcaagcagagcgacatcatgatgagggacaacctgtttgagatcgtgaccaccagcaggaccttctacgtgcaggccgacagccctgaggagatgcacagctggatcaaggctgtgtctggggccatcgtggcccagaggggccctggccgcagcgccagcagcgagcaccccccaggccccagcgagagcaagcacgccttccggcccaccaatgctgccacagccaccagccacagcacagccagccgcagcaacagcctggtgtccaccttcaccatggagaagaggggcttctatgagagcctggccaaggtgaagccaggcaacttcaaggtgcagacagtgagcccccgggagcccgccagcaaggtgacagagcaggccctgctgcggccccagagcaagaatggcccccaggagaaggactgtgacctggtggacctggatgatgccagcctgcctgtgtctgatgtgtag

SEQ ID NO: 164348 - DNA, 345 bp, synthetic construct
  misc_feature 1..345: note = Description of Artificial Sequence: Synthetic coding sequence
  source 1..345: mol_type = other DNA
atgccctacgtggaccggcagaaccgcatctgtggcttcctggacatcgaggagaatgaaaacagcggcaagttcctgcggcgctacttcatcctggacacccgggaggacagctttgtgtggtacatggacaacccccagaacctgcccagcggcagcagccgggtgggcgccatcaagctgacctacatcagcaaggtgtctgatgccaccaagctgcggcccaaggccgagttctgctttgtgatgaatgccggcatgaggaagtacttcctgcaggccaatgaccagcaggacctggtggagtgggtgaatgtgctgaacaaggccatcaagatcacctag

SEQ ID NO: 164349 - DNA, 1215 bp, synthetic construct; identical to SEQ ID NO: 164347
  misc_feature 1..1215: note = Description of Artificial Sequence: Synthetic coding sequence
  source 1..1215: mol_type = other DNA

SEQ ID NO: 164350 - DNA, 1215 bp, synthetic construct; identical to SEQ ID NO: 164347
  misc_feature 1..1215: note = Description of Artificial Sequence: Synthetic coding sequence
  source 1..1215: mol_type = other DNA

SEQ ID NO: 164351 - DNA, 1005 bp, synthetic construct
  misc_feature 1..1005: note = Description of Artificial Sequence: Synthetic coding sequence
  source 1..1005: mol_type = other DNA
atgccctacgtggaccggcagaaccgcatctgtggcttcctggacatcgaggagaatgaaaacagcggcaagttcctgcggcgctacttcatcctggacacccgggaggacagctttgtgtggtacatggacaacccccagaacctgcccagcggcagcagccgggtgggcgccatcaagctgacctacatcagcaaggtgtctgatgccaccaagctgcggcccaaggccgagttctgctttgtgatgaatgccggcatgaggaagtacttcctgcaggccaatgaccagcaggacctggtggagtgggtgaatgtgctgaacaaggccatcaagatcaccgtgcccaagcagagcgacagccagcccaacagcgacaacctgagcagacatggagaatgtgggaagaagcaggtgtcctacagaacagacatcgtgggcggcgtgcccatcatcacccccacccagaaggaggaggtgaatgaatgtggggagagcattgacaggaacaacctgaagaggagccagagccacctgccctacttcacccccaagccaccccaggacagcgctgtgatcaaggccggctactgtgtgaagcagggcgctgtgatgaagaactggaagaggcgctacttccagctggatgagaacaccatcggctacttcaagtctgagctggagaaggagcccctgcgggtcatccccctgaaggaggtgcacaaggtgcaggagtgcaagcagagcgacatcatgatgagggacaacctgtttgagatcgtgaccaccagcaggaccttctacgtgcaggccgacagccctgaggagatgcacagctggatcaaggctgtgtctggggccatcgtggcccagaggggccctggccgcagcgccagctccatgaggcaggcccggcggctgagcaacccctgcatccagcgctacaccagcagagctggagaatgttccacctacgtgggcagccacgccaacgtgcccagctag

SEQ ID NO: 164352 - DNA, 1278 bp, synthetic construct
  misc_feature 1..1278: note = Description of Artificial Sequence: Synthetic coding sequence
  source 1..1278: mol_type = other DNA
atgccctacgtggaccggcagaaccgcatctgtggcttcctggacatcgaggagcacgagaacagcggcaagttcctgcggcgctacttcatcctggacacccaggccaactgcctgctgtggtacatggacaacccccagaacctggccatgggcgctggagctgtgggcgccctgcagctgacctacatcagcaaggtgtccatcgccacccccaagcagaagcccaagacccccttctgcttcgtcatcaatgccctgagccagcgctacttcctgcaggccaatgaccagaaggacatgaaggactgggtggaggccctgaaccaggccagcaagatcaccgtgcccaagggcggcggcctgcccatgaccacagaggtgctgaagagcctggccgcccccccagccctggagaagaagccccaggtggcctacaagacagagatcattggaggagtggtggtgcacacccccatcagccagaatggaggagatggccaggagggcagcgagcccggcagccacaccatcctgcggcgcagccagagctacatccccaccagcggctgccgggccagcactggacctcctctcatcaagagcggctactgtgtgaagcagggcaatgtgaggaagtcctggaagaggcgcttctttgccctggatgacttcaccatctgctacttcaagtgtgagcaggaccgggagcccctgcggaccatcttcctgaaggatgtgctgaagacccatgagtgcctggtgaagagcggggacctgctgatgagggacaacctgtttgagatcatcaccagcagcaggaccttctacgtgcaggccgacagccctgaggacatgcacagctggatcaaggagattggagctgctgtgcaggccctgaagtgccacccccgggagaccagcttcagccgcagcatcagcctgacccggcccggcagcagcagcctgagcagcggccccaacagcatcctgtgccggggccggccccccctggaggagaagaaggccctgtgcaaggcccccagcgtggccagctcctggcagccctggacccctgtgccccaggccggggagaagctgctgcccccaggggacaccagcgaggacagcctcttcacccccaggcctggagagggcagcgcccctggggtgctgcccagcagccgcatccgccacaggtctgagccccagcaccccaaggagaagcccttcatgttcaacctggatgatgagaacatccgcaccagtgatgtgtag

SEQ ID NO: 164353 - DNA, 348 bp, synthetic construct
  misc_feature 1..348: note = Description of Artificial Sequence: Synthetic coding sequence
  source 1..348: mol_type = other DNA
atgccctacgtggaccggcagaaccgcatctgtggcttcctggacatcgaggagcacgagaacagcggcaagttcctgcggcgctacttcatcctggacacccaggccaactgcctgctgtggtacatggacaacccccagaacctggccatgggcgctggagctgtgggcgccctgcagctgacctacatcagcaaggtgtccatcgccacccccaagcagaagcccaagacccccttctgcttcgtcatcaatgccctgagccagcgctacttcctgcaggccaatgaccagaaggacatgaaggactgggtggaggccctgaaccaggccagcaagatcacctag

SEQ ID NO: 164354 - DNA, 1128 bp, synthetic construct
  misc_feature 1..1128: note = Description of Artificial Sequence: Synthetic coding sequence
  source 1..1128: mol_type = other DNA
atgggcgctggagctgtgggcgccctgcagctgacctacatcagcaaggtgtccatcgccacccccaagcagaagcccaagacccccttctgcttcgtcatcaatgccctgagccagcgctacttcctgcaggccaatgaccagaaggacatgaaggactgggtggaggccctgaaccaggccagcaagatcaccgtgcccaagggcggcggcctgcccatgaccacagaggtgctgaagagcctggccgcccccccagccctggagaagaagccccaggtggcctacaagacagagatcattggaggagtggtggtgcacacccccatcagccagaatggaggagatggccaggagggcagcgagcccggcagccacaccatcctgcggcgcagccagagctacatccccaccagcggctgccgggccagcactggacctcctctcatcaagagcggctactgtgtgaagcagggcaatgtgaggaagtcctggaagaggcgcttctttgccctggatgacttcaccatctgctacttcaagtgtgagcaggaccgggagcccctgcggaccatcttcctgaaggatgtgctgaagacccatgagtgcctggtgaagagcggggacctgctgatgagggacaacctgtttgagatcatcaccagcagcaggaccttctacgtgcaggccgacagccctgaggacatgcacagctggatcaaggagattggagctgctgtgcaggccctgaagtgccacccccgggagaccagcttcagccgcagcatcagcctgacccggcccggcagcagcagcctgagcagcggccccaacagcatcctgtgccggggccggccccccctggaggagaagaaggccctgtgcaaggcccccagcgtggccagctcctggcagccctggacccctgtgccccaggccggggagaagctgctgcccccaggggacaccagcgaggacagcctcttcacccccaggcctggagagggcagcgcccctggggtgctgcccagcagccgcatccgccacaggtctgagccccagcaccccaaggagaagcccttcatgttcaacctggatgatgagaacatccgcaccagtgatgtgtag

SEQ ID NO: 164355 - DNA, 4083 bp, synthetic construct
  misc_feature 1..4083: note = Description of Artificial Sequence: Synthetic coding sequence
  source 1..4083: mol_type = other DNA
atgagccggcagagcaccctgtacagcttcttccccaagagccctgccctgagtgatgccaacaaggccagcgcccgggccagccgggagggcggccgggctgctgctgcccctggggccagccccagccctggaggagatgctgcctggagcgaggccggccctggcccccggcccctggcccggagcgccagcccccccaaggccaagaacctgaatggaggcctgcggcgctctgtggccccagctgcccccaccagctgtgacttcagccctggggacctggtgtgggccaagatggagggctacccctggtggccctgcctggtgtacaaccacccctttgatggcaccttcatccgggagaagggcaagtctgtgcgggtgcacgtgcagttctttgatgacagccccacccggggctgggtgtccaagaggctgctgaagccctacacaggcagcaagagcaaggaggcccagaagggcggccacttctacagcgccaagccagagatcctgcgggccatgcagagagcagatgaggccctgaacaaggacaagatcaagaggctggagctggccgtgtgtgatgagcccagcgagcctgaggaggaggaggagatggaggtgggcaccacctacgtgacagacaagtcagaagaagataatgaaattgaaagtgaggaggaggtgcagcccaagacccagggcagcagaagaagcagccggcagatcaagaagagaagagtcatcagtgacagcgagagtgacatcggcggcagtgatgtggagttcaagccagacaccaaggaggagggcagcagtgatgagatcagcagcggcgtgggggacagcgagagcgagggcctgaacagccctgtgaaggtggccaggaagaggaagaggatggtgactggaaatggcagcctgaagaggaagagcagcaggaaggagaccccatctgccaccaagcaggccaccagcatcagcagcgagaccaagaacaccctgcgggccttcagcgccccccagaacagcgagagccaggcccacgtgtctggaggaggagatgacagcagccggcccaccgtgtggtaccacgagaccctggagtggctgaaggaggagaagagaagagatgagcacagaagaagaccagaccacccagactttgatgccagcaccctgtatgtgcctgaggacttcctgaacagctgcaccccaggcatgaggaagtggtggcagatcaagagccagaactttgacctggtgatctgctacaaggtgggcaagttctatgagctgtaccacatggatgccctgattggagtgtctgagctgggcctggtgttcatgaagggcaactgggcccacagcggcttccctgagatcgccttcggccgctacagcgacagcctggtgcagaagggctacaaggtggcccgggtggagcagacagagaccccagagatgatggaggcccgctgcaggaagatggcccacatcagcaaatatgacagagtggtgcggcgggagatctgccgcatcatcaccaagggcacccagacctacagcgtgctggagggggaccccagcgagaactacagcaagtacctgctgagcctgaaggagaaggaggaggacagcagcggccacacccgggcctacggcgtgtgctttgtggacaccagcctgggcaagttcttcatcggccagttcagtgatgacagacactgcagccgcttccgcaccctggtggcccactacccacctgtgcaggtgctgtttgagaagggcaacctgagcaaggagaccaagaccatcctgaagagcagcctgagctgcagcctgcaggagggcctcatccctggcagccagttctgggatgccagcaagaccctgcggaccctgctggaggaggagtacttccgggagaagctgagtgatggcattggagtgatgctgccccaggtgctgaagggcatgaccagcgagagtgacagcatcggcctgaccccaggagagaagtctgagctggccctgagcgccctgggcggctgtgtgttctacctgaagaagtgcctgattgaccaggagctgctgtccatggccaactttgaggagtacatccccctggacagcgacacagtgtccaccaccaggtctggggccatcttcaccaaggcctaccagaggatggtgctggatgctgtgaccctgaacaacctggagatcttcctgaatggcaccaacggcagcacagagggcaccctgctggagcgggtggacacctgccacaccccatttgggaagaggctgctgaagcagtggctgtgtgcccccctgtgcaaccactacgccatcaatgaccggctggatgccatcgaggacctgatggtggtgcctgacaagatcagcgaggtggtggagctgctgaagaagctgcctgacctggagcggctgctgagcaagatccacaacgtgggcagccccctgaagagccagaaccacccagacagccgggccatcatgtatgaggagaccacctacagcaagaagaagatcatcgacttcctgagcgccctggagggcttcaaggtgatgtgcaagatcatcggcatcatggaggaggtggctgatggcttcaagagcaagatcctgaagcaggtgatcagcctgcagaccaagaaccctgagggccgcttcccagacctgactgtggagctgaaccgctgggacacagcctttgaccacgagaaggccaggaagacaggcctcatcacccccaaggccggctttgacagcgactatgaccaggccctggccgacatccgggagaatgagcagagcctgctggagtacctggagaagcagaggaaccgcatcggctgcaggaccatcgtgtactggggcatcggcaggaaccgctaccagctggagatccctgagaacttcaccaccaggaacctgcctgaggagtatgagctgaagagcaccaagaagggctgcaagcgctactggaccaagaccatcgagaagaagctggccaacctgatcaatgctgaggagaggagagatgtgtccctgaaggactgcatgaggaggctcttctacaactttgacaagaactacaaggactggcagagcgctgtggagtgcatcgctgtgctggatgtgctgctgtgcctggccaactacagcagaggaggagatggccccatgtgcaggcctgtgatcctgctgcctgaggacaccccacccttcctggagctgaagggcagccgccacccctgcatcaccaagaccttctttggagatgacttcatccccaatgacatcctgattggctgtgaggaggaggagcaggagaatggcaaggcctactgtgtgctggtgacaggccccaacatgggcggcaagagcaccctgatgaggcaggccggcctgctggccgtgatggcccagatgggctgctacgtgcctgctgaggtgtgccgcctgacccccatcgacagagtcttcacccggctgggcgccagtgaccgcatcatgtctggagagagcaccttctttgtggagctgtctgaaacagccagcatcctgatgcacgccacagcccacagcctggtgctggtggatgagctgggccggggcacagccacctttgatggaacagccatcgccaatgctgtggtgaaggagctggccgagaccatcaagtgcaggaccctcttcagcacccactaccacagcctggtggaggactacagccagaatgtggccgtgcggctgggccacatggcctgcatggtggagaatgaatgtgaggaccccagccaggagaccatcaccttcctgtacaagttcatcaagggggcctgccccaagagctatggcttcaatgctgcccggctggccaacctgcctgaggaggtgatccagaagggccacaggaaggcccgggagtttgagaagatgaaccagagcctgcggctcttccgggaggtgtgcctggccagcgagaggagcacagtggatgctgaggccgtgcacaagctgctgaccctcatcaaggagctgtag

SEQ ID NO: 164356 - DNA, 2340 bp, synthetic construct
  misc_feature 1..2340: note = Description of Artificial Sequence: Synthetic coding sequence
  source 1..2340: mol_type = other DNA
atggagggcagccggcccaggagcagcctgagcctggccagcagcgccagcaccatcagcagcctgagcagcctgagccccaagaagcccaccagggctgtgaacaagatccacgccttcggcaagagaggaaatgccctgcggcgggaccccaacctgcctgtgcacatccggggctggctgcacaagcaggacagcagcggcctgcggctgtggaagaggcgctggtttgtgctgagcggccactgcctcttctactacaaggacagccgggaggagagcgtgctgggctctgtgctgctgcccagctacaacatccggccagatggccctggggccccccggggccgccgcttcaccttcaccgctgagcaccctggcatgaggacctacgtgctggccgctgacaccctggaggacctgcggggctggctgcgggccctgggccgggccagcagagcagaaggagatgattatggccagcccaggagccctgcccggccccagcccggggagggccctgggggccctgggggccccccagaggtgtccagaggagaggagggccgcatcagcgagagccctgaggtgacccggctgagccggggccggggccggccccggctgctgacccccagccccaccacagacctgcacagcggcctgcagatgagaagagcccggagcccagacctcttcacccccctgagcaggcctcccagccccctgagcctgccccggcccaggtctgccccagcccggcggcccccagcccccagcggggacacagcccccccagcccggccccacacccccctgagcagaattgatgtgcggccccccctggactggggcccccagaggcagaccctgagccggccccccaccccccggcggggccccccatctgaggccggcggcggcaagccacccaggagcccccagcactggagccaggagcccaggacccaggcccacagcggcagccccacctacctgcagctgccccccaggcctcctggcacccgggcctccatggtgctgctgcccggcccccccctggagagcaccttccaccagagcctggagacagacaccctgctgaccaagctgtgtggccaggaccggctgctgcggcggctgcaggaggagattgaccagaagcaggaggagaaggagcagctggaggccgccctggagctgacccggcagcagctgggccaggccacccgggaggccggggcccctggccgggcctggggccggcagaggctgctgcaggaccggctggtgtctgtgcgggccaccctgtgccacctgacccaggagcgggagcgggtgtgggacacctacagcggcctggagcaggagctgggcaccctgcgggagaccctggagtacctgctgcacctgggcagcccccaggacagagtgtctgcccagcagcagctgtggatggtggaggacaccctggccggcctgggcggcccccagaagcccccaccccacacagagccagacagccccagccctgtgctgcagggcgaggagagcagcgagcgggagagcctgcctgagagcctggagctgagcagccccaggagccctgagacagactggggccggcccccaggaggagacaaggacctggccagcccccacctgggcctgggcagcccccgggtgtcccgggccagcagccctgagggccgccacctgcccagcccccagctgggcaccaaggcccctgtggcccggcccaggatgtctgcccaggagcagctggagaggatgagaagaaaccaggagtgtggccggcccttcccccggcccaccagcccccggctgctgaccctgggccgcaccctgagccctgcccggcggcagccagatgtggagcagaggcctgtggtgggccacagcggggcccagaagtggctgcggagcagcggctcctggagcagccccaggaacaccaccccctacctgcccaccagcgagggccaccgggagcgggtgctgagcctgagccaggccctggccacagaggccagccagtggcacaggatgatgactggaggcaacctggacagccagggcgaccccctgcccggggtgcccctgcccccaagtgaccccacccggcaggagaccccaccacccaggagcccccctgtggccaacagcggcagcacaggcttcagccggcggggcagcggccggggcggcggccccaccccctggggccctgcctgggatgctggcatcgcccctcctgtgctgccccaggatgagggcgcctggcccctgcgggtgaccctgctgcagagcagcttctag

SEQ ID NO: 164357 - DNA, 1752 bp, synthetic construct
  misc_feature 1..1752: note = Description of Artificial Sequence: Synthetic coding sequence
  source 1..1752: mol_type = other DNA
atggagggcagccggcccaggagcagcctgagcctggccagcagcgccagcaccatcagcagcctgagcagcctgagccccaagaagcccaccagggctgtgaacaagatccacgccttcggcaagagaggaaatgccctgcggcgggaccccaacctgcctgtgcacatccggggctggctgcacaagcaggacagcagcggcctgcggctgtggaagaggcgctggtttgtgctgagcggccactgcctcttctactacaaggacagccgggaggagagcgtgctgggctctgtgctgctgcccagctacaacatccggccagatggccctggggccccccggggccgccgcttcaccttcaccgctgagcaccctggcatgaggacctacgtgctggccgctgacaccctggaggacctgcggggctggctgcgggccctgggccgggccagcagagcagaaggagatgattatggccagcccaggagccctgcccggccccagcccggggagggccctgggggccctgggggccccccagaggtgtccagaggagaggagggccgcatcagcgagagccctgaggtgacccggctgagccggggccggggccggccccggctgctgacccccagccccaccacagacctgcacagcggcctgcagatgagaagagcccggagcccagacctcttcacccccctgagcaggcctcccagccccctgagcctgccccggcccaggtctgccccagcccggcggcccccagcccccagcggggacacagcccccccagcccggccccacacccccctgagcagaattgatgtgcggccccccctggactggggcccccagaggcagaccctgagccggccccccaccccccggcggggccccccatctgaggccggcggcggcaagccacccaggagcccccagcactggagccaggagcccaggacccagcccggcccccccctggagagcaccttccaccagagcctggagacagacaccctgctgaccaagctgtgtggccaggaccggctgctgcggcggctgcaggaggagattgaccagaagcaggaggagaaggagcagctggaggccgccctggagctgacccggcagcagctgggccaggccacccgggaggccggggcccctggccgggcctggggccggcagaggctgctgcaggaccggctggtgtctgtgcgggccaccctgtgccacctgacccaggagcgggagcgggtgtgggacacctacagcggcctggagcaggagctgggcaccctgcgggagaccctggagtacctgctgcacctgggcagcccccaggacagagtgtctgcccagcagcagctgtggatggtggaggacaccctggccggcctgggcggcccccagaagcccccaccccacacagagccagacagccccagccctgtgctgcagggcgaggagagcagcgagcgggagagcctgcctgagagcctggagctgagcagccccaggagccctgagacagactggggccggcccccaggaggagacaaggacctggccagcccccacctgggcctgggcagcccccgggtgtcccgggccagcagccctgagggccgccacctgcccagcccccagctgggcaccaagagcaaggagcaccaccccctgctggccgacttccgccgcagccctggagctggcagccagcccctgcccagccctggctactag

SEQ ID NO: 164358 - DNA, 3366 bp, synthetic construct
  misc_feature 1..3366: note = Description of Artificial Sequence: Synthetic coding sequence
  source 1..3366: mol_type = other DNA
atggctgctgccaccgtgggccgggacaccctgcctgagcactggagctatggagtgtgcagagatggccgggtcttcttcatcaatgaccagctgcgctgcaccacctggctgcaccccaggactggagagcctgtgaacagcggccacatgatccgcagtgacctgccccggggctgggaggagggcttcacagaggagggcgccagctacttcatcgaccacaaccagcagaccacagccttccgccaccctgtgacaggccagttctccccagaaaattctgagttcatcctgcaggaggagcccaacccccacatgagcaagcaggacaggaaccagaggcccagctccatggtgtctgagaccagcacagctggaacagccagcaccctggaggccaagccaggccccaagatcatcaagagcagcagcaaggtgcacagctttgggaagagggaccaggccatcagaagaaaccccaacgtgcctgtggtggtgcggggctggctgcacaagcaggacagcagcggcatgaggctgtggaagaggcgctggtttgtgctggccgactactgcctcttctactacaaggacagccgggaggaggccgtgctgggcagcatccccctgcccagctatgtgatcagccctgtggcccctgaggaccgcatcagcaggaagtacagcttcaaggctgtgcacacaggcatgagggccctgatctacaacagcagcacagctggcagccaggccgagcagagcggcatgaggacctactacttctctgctgacacccaggaggacatgaatgcctgggtgcgggccatgaaccaggccgcccaggtgctgagccgcagcagcctgaagagggacatggagaaggtggagcggcaggccgtgccccaggccaaccacacagagagctgccatgaatgtggccgggtgggccctggccacacccgggactgcccccaccggggccatgatgacatcgtgaactttgagcggcaggagcaggagggggagcagtaccgcagccagagggaccccctggagggcaagagggacaggagcaaggcccggagcccctacagccctgctgaggaggatgccctcttcatggacctgcccaccggcccccggggccagcaggcccagccccagagagctgagaagaatggcatgctgcctgccagctatggccctggagagcagaatggaactggaggctaccagagggccttcccccccaggaccaaccctgagaagcacagccagaggaagagcaacctggcccaggtggagcactgggcccgggcccagaagggggacagccgcagcctgcccctggaccagaccctgccccggcagggccctggccagagcctgtccttccctgagaactaccagaccctgcccaagagcaccaggcaccccagcggcggcagcagccccccaccaagaaacctgcccagcgactacaagtatgcccaggaccgggccagccacctgaagatgagcagcgaggagcggcgggcccacagagatggcaccgtgtggcagctgtatgagtggcagcagaggcagcagttccgccacggcagccccacagcccccatctgcctgggcagccctgagttcacagaccagggccgcagccgctccatgctggaggtgcccaggagcatctctgtgccccccagccccagcgacatccccccacctggcccccccagggtcttccccccaagaagaccccacaccccagctgagcgggtgacagtgaagcccccagaccagaggagatctgtggacatcagcctgggggacagcccccggcgggcccggggccatgctgtgaagaacagcagccacgtggacagaagatccatgcccagcatgggctacatgacccacacagtgtctgcccccagcctgcacggcaagtctgcagatgacacctacctgcagctgaagaaggacctggagtacctggacctgaagatgacaggccgggacctgctgaaggacaggagcctgaagcctgtgaagattgctgagagtgacacagatgtgaagctgagcatcttctgtgagcaggacagagtgctgcaggacctggaggacaagatccgggccctgaaggagaacaaggaccagctggagagcgtgctggaggtgctgcaccggcagatggagcagtacagagaccagccccagcacctggagaagatcgcctaccagcagaagctgctgcaggaggacctggtgcacatccgggcagagctgagccgggagagcacagagatggagaatgcctggaatgagtacctgaagctggagaatgatgtggagcagctgaagcagaccctgcaggagcagcacagaagagccttcttcttccaggagaagagccagatccagaaggacctgtggagaattgaagatgtgacagctggcctgagcgccaacaaggagaacttccgcatcctggtggagagcgtgaagaaccctgagaggaagacagtgcccctcttcccccacccccctgtgcccagcctgagcaccagcgagagcaagcccccaccccagcccagcccccccaccagccctgtgaggacccccctggaggtgcggctcttcccccagctgcagacctacgtgccctaccggccccaccccccccagctgaggaaggtgaccagccccctgcagagccccaccaaggccaagcccaaggtggaggatgaggccccacccaggcctcccctgcctgagctgtacagccctgaggaccagcccccagctgtgccccccctgccccgggaggccaccatcatccgccacacctctgtgcggggcctgaagaggcagagtgatgagaggaagagggaccgggagctgggccagtgtgtgaatggagacagccgggtggagctgcggagctatgtgtctgagcctgagctggccaccctgagcggggacatggcccagcccagcctgggcctggtgggccctgagagccgctaccagaccctgcccggccggggcctgagcggcagcaccagccggctgcagcagagcagcaccatcgccccctacgtgaccctgcggcggggcctgaatgctgagagcagcaaggccaccttcccccggcccaagagcgccctggagcggctgtacagcggggaccaccagaggggcaagatgtctgctgaggagcagctggagaggatgaagaggcaccagaaggccctggtgcgggagaggaagaggaccctgggccagggcgagaggacaggcctgcccagcagccgctacctgagccggcccctgcccggggacctgggctctgtgtgctag

SEQ ID NO: 164359 - DNA, 3369 bp, synthetic construct
  misc_feature 1..3369: note = Description of Artificial Sequence: Synthetic coding sequence
  source 1..3369: mol_type = other DNA
atggctgctgccaccgtgggccgggacaccctgcctgagcactggagctatggagtgtgcagagatggccgggtcttcttcatcaatgaccagctgcgctgcaccacctggctgcaccccaggactggagagcctgtgaacagcggccacatgatccgcagtgacctgccccggggctgggaggagggcttcacagaggagggcgccagctacttcatcgaccacaaccagcagaccacagccttccgccaccctgtgacaggccagttctccccagaaaattctgagttcatcctgcaggaggagcccaacccccacatgagcaagcaggacaggaaccagaggcccagctccatggtgtctgagaccagcacagctggaacagccagcaccctggaggccaagccaggccccaagatcatcaagagcagcagcaaggtgcacagctttgggaagagggaccaggccatcagaagaaaccccaacgtgcctgtggtggtgcggggctggctgcacaagcaggacagcagcggcatgaggctgtggaagaggcgctggtttgtgctggccgactactgcctcttctactacaaggacagccgggaggaggccgtgctgggcagcatccccctgcccagctatgtgatcagccctgtggcccctgaggaccgcatcagcaggaagtacagcttcaaggctgtgcacacaggcatgagggccctgatctacaacagcagcacagctggcagccaggccgagcagagcggcatgaggacctactacttctctgctgacacccaggaggacatgaatgcctgggtgcgggccatgaaccaggccgcccaggtgctgagccgcagcagcctgaagagggacatggagaaggtggagcggcaggccgtgccccaggccaaccacacagagagctgccatgaatgtggccgggtgggccctggccacacccgggactgcccccaccggggccatgatgacatcgtgaactttgagcggcaggagcaggagggggagcagtaccgcagccagagggaccccctggagggcaagagggacaggagcaaggcccggagcccctacagccctgctgaggaggatgccctcttcatggacctgcccaccggcccccggggccagcaggcccagccccagagagctgagaagaatggcatgctgcctgccagctatggccctggagagcagaatggaactggaggctaccagagggccttcccccccaggaccaaccctgagaagcacagccagaggaagagcaacctggcccaggtggagcactgggcccgggcccagaagggggacagccgcagcctgcccctggaccagaccctgccccggcagggccctggccagagcctgtccttccctgagaactaccagaccctgcccaagagcaccaggcaccccagcggcggcagcagccccccaccaagaaacctgcccagcgactacaagtatgcccaggaccgggccagccacctgaagatgagcagcgaggagcggcgggcccacagagatggcaccgtgtggcagctgtatgagtggcagcagaggcagcagttccgccacggcagccccacagcccccatctgcctgggcagccctgagttcacagaccagggccgcagccgctccatgctggaggtgcccaggagcatctctgtgccccccagccccagcgacatccccccacctggcccccccagggtcttccccccaagaagaccccacaccccagctgagcgggtgacagtgaagcccccagaccagaggagatctgtggacatcagcctgggggacagcccccggcgggcccggggccatgctgtgaagaacagcagccacgtggacagaagatccatgcccagcatgggctacatgacccacacagtgtctgcccccagcctgcacggcaagtctgcagatgacacctacctgcagctgaagaaggacctggagtacctggacctgaagatgacaggccgggacctgctgaaggacaggagcctgaagcctgtgaagattgctgagagtgacacagatgtgaagctgagcatcttctgtgagcaggacagagtgctgcaggacctggaggacaagatccgggccctgaaggagaacaaggaccagctggagagcgtgctggaggtgctgcaccggcagatggagcagtacagagaccagccccagcacctggagaagatcgcctaccagcagaagctgctgcaggaggacctggtgcacatccgggcagagctgagccgggagagcacagagatggagaatgcctggaatgagtacctgaagctggagaatgatgtggagcagctgaagcagaccctgcaggagcagcacagaagagccttcttcttccaggagaagagccagatccagaaggacctgtggagaattgaagatgtgacagctggcctgagcgccaacaaggagaacttccgcatcctggtggagagcgtgaagaaccctgagaggaagacagtgcccctcttcccccacccccctgtgcccagcctgagcaccagcgagagcaagcccccaccccagcccagcccccccaccagccctgtgaggacccccctggaggtgcggctcttcccccagctgcagacctacgtgccctaccggccccaccccccccagctgaggaaggtgaccagccccctgcagagccccaccaaggccaagcccaaggtgcaggaggatgaggccccaccccggccccccctgcctgagctgtacagccctgaggaccagcccccagctgtgccccccctgccccgggaggccaccatcatccgccacacctctgtgcggggcctgaagaggcagagtgatgagaggaagagggaccgggagctgggccagtgtgtgaatggagacagccgggtggagctgcggagctatgtgtctgagcctgagctggccaccctgagcggggacatggcccagcccagcctgggcctggtgggccctgagagccgctaccagaccctgcccggccggggcctgagcggcagcaccagccggctgcagcagagcagcaccatcgccccctacgtgaccctgcggcggggcctgaatgctgagagcagcaaggccaccttcccccggcccaagagcgccctggagcggctgtacagcggggaccaccagaggggcaagatgtctgctgaggagcagctggagaggatgaagaggcaccagaaggccctggtgcgggagaggaagaggaccctgggccagggcgagaggacaggcctgcccagcagccgctacctgagccggcccctgcccggggacctgggctctgtgtgctag

SEQ ID NO: 164360 - DNA, 2262 bp, synthetic construct
  misc_feature 1..2262: note = Description of Artificial Sequence: Synthetic coding sequence
  source 1..2262: mol_type = other DNA
tgagatgccctcttcatggacctgcccaccggcccccggggccagcaggcccagccccagagagctgagaagaatggcatgctgcctgccagctatggccctggagagcagaatggcaccggcggctaccagagggccttcccccccaggaccaaccctgagaagcacagccagaggaagagcaacctggcccaggtggagcactgggcccgggcccagaagggggacagccgcagcctgcccctggaccagaccctgccccggcagggccctggccagagcctgtccttccctgagaactaccagaccctgcccaagagcaccaggcaccccagcggcggcagcagccccccacccaggaacctgcccagcgactacaagtatgcccaggaccgggccagccacctgaagatgagcagcgaggagcggcgggcccacagagatggcaccgtgtggcagctgtatgagtggcagcagaggcagcagttcagacatggcagccccacagcccccatctgcctgggcagccctgagttcacagaccagggccgcagccgctccatgctggaggtgcccaggagcatctctgtgccccccagccccagcgacatccccccacctggcccccccagggtcttccccccccggcggccccacaccccagctgagcgggtgacagtgaagcccccagaccagaggagatctgtggacatcagcctgggggacagcccccggcgggcccggggccatgctgtgaagaacagcagccacgtggaccggcgctccatgcccagcatgggctacatgacccacacagtgtctgcccccagcctgcacggcaagtctgcagatgacacctacctgcagctgaagaaggacctggagtacctggacctgaagatgacaggccgggacctgctgaaggacaggagcctgaagcctgtgaagattgctgagagtgacacagatgtgaagctgagcatcttctgtgagcaggacagagtgctgcaggacctggaggacaagatccgggccctgaaggagaacaaggaccagctggagagcgtgctggaggtgctgcaccggcagatggagcagtacagagaccagccccagcacctggagaagatcgcctaccagcagaagctgctgcaggaggacctggtgcacatccgggcagagctgagccgggagagcacagagatggagaatgcctggaatgagtacctgaagctggagaatgatgtggagcagctgaagcagaccctgcaggagcagcaccggcgggccttcttcttccaggagaagagccagatccagaaggacctgtggagaattgaagatgtgacagctggcctgagcgccaacaaggagaacttccgcatcctggtggagagcgtgaagaaccctgagaggaagacagtgcccctcttcccccacccccctgtgcccagcctgagcaccagcgagagcaagcccccaccccagcccagcccccccaccagccctgtgaggacccccctggaggtgcggctcttcccccagctgcagacctacgtgccctaccggccccaccccccccagctgaggaaggtgaccagccccctgcagagccccaccaaggccaagcccaaggtgcaggaggatgaggccccacccaggcctcccctgcctgagctgtacagccctgaggaccagcccccagctgtgccccccctgccccgggaggccaccatcatccgccacacctctgtgcggggcctgaagaggcagagtgatgagaggaagagggaccgggagctgggccagtgtgtgaatggagacagccgggtggagctgcggagctatgtgtctgagcctgagctggccaccctgagcggggacatggcccagcccagcctgggcctggtgggccctgagagccgctaccagaccctgcccggccggggcctgagcggcagcaccagccggctgcagcagagcagcaccatcgccccctacgtgaccctgcggcggggcctgaatgctgagagcagcaaggccaccttcccccggcccaagagcgccctggagcggctgtacagcggggaccaccagaggggcaagatgtctgctgaggagcagctggagaggatgaagaggcaccagaaggccctggtgcgggagaggaagaggaccctgggccagggcgagaggacaggcctgcccagcagccgctacctgagccggcccctgcccggggacctgggctctgtgtgctag

SEQ ID NO: 164361 - DNA, 816 bp, synthetic construct
  misc_feature 1..816: note = Description of Artificial Sequence: Synthetic coding sequence
  source 1..816: mol_type = other DNA
atgctgcaggcctgcaagatggagggcttccccctggtgcccccccagcccagcgaggacctggtgccctatgacacagacctgtaccagaggcagacccatgagtactacccctacctgagcagtgatggagagagccacagcgaccactactgggacttccacccccaccacgtgcacagcgagtttgagagctttgctgagaacaacttcacagagctgcagagcgtgcagcccccccagctgcagcagctgtaccgccacatggagctggagcagatgcacgtgctggacacccccatggtgcccccccaccccagcctgggccaccaggtgtcctacctgcccaggatgtgcctgcagtaccccagcctgagccctgcccagcccagcagtgatgaggaggagggggagcggcagagcccccccctggaggtgtctgatggagaggctgatggcctggagcccggccctggcctgctgcccggggagaccggcagcaagaagaagatccggctgtaccagttcctgctggacctgctgcggagcggggacatgaaggacagcatctggtgggtggacaaggacaagggcaccttccagttcagcagcaagcacaaggaggccctggcccaccgctggggcatccagaagggcaacaggaagaagatgacctaccagaagatggcccgggccctgaggaactacggcaagacaggagaggtgaagaaggtgaagaagaagctgacctaccagttcagcggggaggtgctgggccggggcggcctggccgagcggcggcaccccccccactag

SEQ ID NO: 164362 - DNA, 732 bp, synthetic construct
  misc_feature 1..732: note = Description of Artificial Sequence: Synthetic coding sequence
  source 1..732: mol_type = other DNA
atgagccctgctgcccctgtgcccccagattctgccctggagagcccctttgaggagatggccctggtgcggggcggctggctgtggaggcagagcagcatcctgcggcgctggaagaggaactggtttgccctgtggctggatggcaccctgggctactaccatgatgaaacagcccaggatgaagaagatagagtgctgatccacttcaacgtgcgggacatcaagattggccctgagtgccatgatgtgcagcccccagagggccgcagcagagatggcctgctgactgtgaacctgcgggagggcggccgcctgcacctgtgtgccgagaccaaggatgatgccctggcctggaagacagccctgctggaggccaacagcaccccagccccagctggggccaccgtgccccccaggagccggcgggtgtgcagcaaggtgcgctgtgtgaccaggtcctggagcccctgcaaggtggagcggcgcatctgggtgcgggtgtacagcccctaccaggactactatgaggtggtgcccccaaatgcccacgaggccacctacgtgcgcagctactacggccccccctatgccggccctggggtgacccacgtgattgtgcgggaggacccctgctacagcgctggggcccccctggccatgggcatgctggccggggccgccactggagctgccctgggcagcctgatgtggagcccctgctggttctag

SEQ ID NO: 164363 - DNA, 627 bp, synthetic construct
  misc_feature 1..627: note = Description of Artificial Sequence: Synthetic coding sequence
  source 1..627: mol_type = other DNA
atgagccctgctgcccctgtgcccccagattctgccctggagagcccctttgaggagatggccctggtgcggggcggctggctgtggaggcagagcagcatcctgcggcgctggaagaggaactggtttgccctgtggctggatggcaccctgggctactaccatgatgaaacagcccaggatgaagaagatagagtgctgatccacttcaacgtgcgggacatcaagattggccctgagtgccatgatgtgcagcccccagagggccgcagcagagatggcctgctgactgtgaacctgcgggagggcggccgcctgcacctgtgtgccgagaccaaggatgatgccctggcctggaagacagccctgctggaggccaacagcacccctgtgcgggtgtacagcccctaccaggactactatgaggtggtgcccccaaatgcccacgaggccacctacgtgcgcagctactacggccccccctatgccggccctggggtgacccacgtgattgtgcgggaggacccctgctacagcgctggggcccccctggccatgggcatgctggccggggccgccaccggggccgccctgggcagcctgatgtggagcccctgctggttctag

SEQ ID NO: 164364 - DNA, 675 bp, synthetic construct
  misc_feature 1..675: note = Description of Artificial Sequence: Synthetic coding sequence
  source 1..675: mol_type = other DNA
atggccctggtgcggggcggctggctgtggaggcagagcagcatcctgcggcgctggaagaggaactggtttgccctgtggctggatggcaccctgggctactaccatgatgaaacagcccaggatgaggaggacagagtgctgatccacttcaacgtgcgggacatcaagattggaccagaatgtcatgatgtgcagcccccagagggccgcagcagagatggcctgctgactgtgaacctgcgggagggcggccgcctgcacctgtgtgccgagaccaaggatgatgccctggcctggaagacagccctgctggaggccaacagcaccccagccccagctggggccaccgtgcccccaagaagcagaagagtgtgcagcaaggtgcgctgtgtgaccaggtcctggagcccctgcaaggtggagcggcgcatctgggtgcgggtgtacagcccctaccaggactactatgaggtggtgcccccaaatgcccacgaggccacctacgtgcgcagctactacggccccccctatgccggccctggggtgacccacgtgattgtgcgggaggacccctgctacagcgctggggcccccctggccatgggcatgctggccggggccgccaccggggccgccctgggcagcctgatgtggagcccctgctggttctag

SEQ ID NO: 164365 - DNA, 570 bp, synthetic construct; identical to SEQ ID NO: 148585
  misc_feature 1..570: note = Description of Artificial Sequence: Synthetic coding sequence
  source 1..570: mol_type = other DNA

SEQ ID NO: 164366 - DNA, 354 bp, synthetic construct
  misc_feature 1..354: note = Description of Artificial Sequence: Synthetic coding sequence
  source 1..354: mol_type = other DNA
atggccctggtgcggggcggctggctgtggaggcagagcagcatcctgcggcgctggaagaggaactggtttgccctgtggctggatggcaccctgggctactaccatgatgaaacagcccaggatgaggaggacagagtgctgatccacttcaacgtgcgggacatcaagattggaccagaatgtcatgatgtgcagcccccagagggccgcagcagagatggcctgctgactgtgaacctgcgggagggcggccgcctgcacctgtgtgccgagaccaaggatgatgccctggcctggaagacagccctgctggaggccaacagcacccctgtgcgggtgtacagcccctag

SEQ ID NO: 164367 - DNA, 492 bp, synthetic construct
  misc_feature 1..492: note = Description of Artificial Sequence: Synthetic coding sequence
  source 1..492: mol_type = other DNA
atggccctggtgcggggcggctggctgtggaggcagagcagcatcctgcggcgctggaagaggaactggtttgccctgtggctggatggcaccctgggctactaccatgatgaaacagcccaggatgaggaggacagagtgctgatccacttcaacgtgcgggacatcaagattggaccagaatgtcatgatgtgcagcccccagagggccgcagcagagatggcctgctgactgtgaacctgcgggagggcggccgcctgcacctgtgtgccgagaccaaggatgatgccctggcctggaagacagccctgctggaggccaacagcacccctgtgcgggtgtacagcccctaccaggactactatgaggtggtgcccccaaatgcccacgaggccacctacgtgcgcagctactacggccccccctatgccggccctggggtgacccacgtgattgtgcgggaggacccctgctacagcgctggggcctag

SEQ ID NO: 164368 - DNA, 480 bp, synthetic construct
  misc_feature 1..480: note = Description of Artificial Sequence: Synthetic coding sequence
  source 1..480: mol_type = other DNA
atggccctggtgcggggcggctggctgtggaggcagagcagcatcctgcggcgctggaagaggaactggtttgccctgtggctggatggcaccctgggctactaccatgatgaaacagcccaggatgaggaggacagagtgctgatccacttcaacgtgcgggacatcaagattggaccagaatgtcatgatgtgcagcccccagagggccgcagcagagatggcctgctgactgtgaacctgcgggagggcggccgcctgcacctgtgtgccgagaccaaggatgatgccctggcctggaagacagccctgctggaggccaacagcacccccatgatccggctgaagctgatccacccccacaacaagtacctgctgagctgctacagcgctggggcccccctggccatgggcatgctggccggggccgccactggagctgccctgggcagcctgatgtggagcccctgctggttctag

SEQ ID NO: 164369 - DNA, 483 bp, synthetic construct
  misc_feature 1..483: note = Description of Artificial Sequence: Synthetic coding sequence
  source 1..483: mol_type = other DNA
atggccctggtgcggggcggctggctgtggaggcagagcagcatcctgcggcgctggaagaggaactggtttgccctgtggctggatggcaccctgggctactaccatgatgaaacagcccaggatgaggaggacagagtgctgatccacttcaacgtgcgggacatcaagattggaccagaatgtcatgatgtgcagcccccagagggccgcagcagagatggcctgctgactgtgaacctgcgggagggcggccgcctgcacctgtgtgccgagaccaaggatgatgccctggcctggaagacagccctgctggaggccaacagcaccccagccccagctggggccaccgtgcccccaagaagcagaagagtgtgcagcaaggtgcgctgtgtgaccaggtcctggagcccctgcaaggtggagcggcgcatctgggtgcgggtgtacagcccctaccaggactactatgaggtggtgtag

SEQ ID NO: 164370 - DNA, 465 bp, synthetic construct
  misc_feature 1..465: note = Description of Artificial Sequence: Synthetic coding sequence
  source 1..465: mol_type = other DNA
atggccctggtgcggggcggctggctgtggaggcagagcagcatcctgcggcgctggaagaggaactggtttgccctgtggctggatggcaccctgggctactaccatgatgaaacagcccaggatgaggaggacagagtgctgatccacttcaacgtgcgggacatcaagattggaccagaatgtcatgatgtgcagcccccagagggccgcagcagagatggcctgctgactgtgaacctgcgggagggcggccgcctgcacctgtgtgccgagaccaaggatgatgccctggcctggaagacagccctgctggaggccaacagcacccctgtgcgggtgtacagcccctaccaggactactatgaggtggtgcccccaaatgcccacgaggccacctacgtgcgcagctactacggccccccctatgccggccctggggtgacccacgtgattgtgaggtag

SEQ ID NO: 164371 - DNA, 258 bp, synthetic construct
  misc_feature 1..258: note = Description of Artificial Sequence: Synthetic coding sequence
  source 1..258: mol_type = other DNA
atggccctggtgcggggcggctggctgtggaggcagagcagcatcctgcggcgctggaagaggaactggtttgccctgtggctggatggcaccctgggctactaccatgatgaaacagcccaggatgaggaggacagagtgctgatccacttcaacgtgcgggacatcaagattggaccagaatgtcatgatgtgcagcccccagagggccgcagcagagatggcctgctgactgtgaacctgcgggagggcggctag

SEQ ID NO: 164372 - DNA, 3576 bp, synthetic construct
  misc_feature 1..3576: note = Description of Artificial Sequence: Synthetic coding sequence
  source 1..3576: mol_type = other DNA
atggagcggcccctggagaatggagatgagagcccagacagccagggccacgccacagactggaggtttgctgtgtgcagcttcagagatgcctgggaggaggaggagcccgccagccagatgcacgtgaaggaccccggcccccccaggcctcctgctggggccacccaggatgaggagctgcagggcagccccctgagcaggaagttccagctgcccccagctgctgatgaaagtggagatgcccagaggggcaccgtggagagcagctctgtgctgtctgagggccctggccccagcggcgtggagagcctgctgtgccccatgagcagccacctgagcctggcccagggcgagagtgacaccccaggagtgggcctggtgggggaccccggccccagccgggccatgcccagcggcctgagccctggggccctggacagcgaccctgtgggcctgggggaccccctgtctgagatcagcaagctgctggaggccgcccccagcggcagcggcctgcccaagccagctgactgcctgctggcccaggacctgtgctgggagctgctggccagcggcatggccaccctgcccggcaccagagatgtgcagggccgggctgtgctgctgctgtgtgcccacagccctgcctggctgcagagcgagtgcagcagccaggagctgatccggctgctgctgtacctgcggagcatccccaggcctgaggtgcaggccctgggcctgactgtgctggtggatgcccgcatctgtgcccccagcagcagcctcttcagcggcctgagccagctgcaggaggccgcccctggagctgtgtaccaggtgctgctggtgggcagcaccctgctgaaggaggtgcccagcggcctgcagctggagcagctgcccagccagagcctgctgacccacatccccacagctggcctgcccaccagcctgggcggcggcctgccctactgccaccaggcctggctggacttcagaagaaggctggaggccctgctgcagaactgccaggccgcctgtgccctgctgcagggcgccattgaatctgtgaaggctgtgccccagcccatggagcctggagaggtgggccagctgctgcagcagacagaggtgctgatgcagcaggtgctggacagcccctggctggcctggctgcagtgccagggcggccgggagctgacctggctgaagcaggaggtgcctgaggtgaccctgagcccagactacagaacagccatggacaaggcagatgagctgtatgacagagtggatggcctgctgcaccagctgaccctgcagagcaaccagaggatccaggccctggagctggtgcagaccctggaggcccgggagagcggcctgcaccagatcgaggtgtggctgcagcaggtgggctggccagccctggaggaggccggggagcccagcctggacatgctgctgcaggcccagggcagcttccaggagctgtaccaggtggcccaggagcaggtgcggcagggcgagaagttcctgcagcccctgaccggctgggaggccgctgagctggaccccccaggggcccgcttcctggccctgcgggcccagctgacagagttcagccgggccctggcccagcgctgccagaggctggctgatgctgagcggctcttccagctgttccgggaggccctgacctgggccgaggagggccagagggtgctggccgagctggagcaggagaggcctggggtggtgctgcagcagctgcagctgcactggaccaggcacccagacctgcccccagcccacttcaggaagatgtgggccctggccaccggcctgggcagcgaggccatccggcaggagtgccgctgggcctgggcccgctgccaggacacctggctggccctggaccagaagctggaggccagcctgaagctgccccctgtgggcagcacagccagcctgtgtgtgtcccaggtgcctgctgccccagcccacccccccctgaggaaggcctacagctttgacaggaacctgggccagagcctgtctgagcccgcctgccactgccaccacgccgccaccatcgccgcctgcagaagacctgaggccggcggcggggccctgccccaggccagccccaccgtgcccccacctggcagcagtgaccccaggagcctgaaccggctgcagctggtgctggccgagatggtggccacagagcgggagtatgtgcgggccctggagtacaccatggagaactacttccctgagctggacagaccagatgtgccccagggcctgcggggccagagggcccacctgtttggaaacctggagaagctgcgggacttccactgccacttcttcctgcgggagctggaggcctgcaccaggcaccccccccgggtggcctatgccttcctgcggcaccgggtgcagtttggcatgtatgccctgtacagcaagaacaagcccaggagtgatgccctgatgagcagctatggccacaccttcttcaaggacaagcagcaggccctgggggaccacctggacctggccagctacctgctgaagcccatccagaggatgggcaagtatgccctgctgctgcaggagctggcccgggcctgtggcggccccacccaggagctgagcgccctgcgggaggcccagagcctggtgcacttccagctgcggcacggcaatgacctgctggccatggatgccatccagggctgtgatgtgaacctgaaggagcagggccagctggtgcggcaggatgaatttgtggtgaggacaggccgccacaagtctgtgcggcgcatcttcctgtttgaggagctgctgctcttcagcaagcccaggcatggccccactggagtggacacctttgcctacaagaggagcttcaagatggctgacctgggcctgacagagtgctgcggcaacagcaacctgcgctttgagatctggttcagaagaaggaaggcccgggacacctttgtgctgcaggccagcagcctggccatcaagcaggcctggacagctgacatcagccacctgctgtggaggcaggccgtgcacaacaaggaggtgaggatggccgagatggtgtccatgggcgtgggcaacaaggccttccgggacatcgcccccagcgaggaggccatcaatgacagaacagtgaactacgtgctgaagtgccgggaggtgcgcagccgggccagcattgctgtggccccctttgaccatgacagcctgtacctgggcgccagcaacagcctgcccggggaccctgccagctgcagcgtgctgggcagcctgaacctgcacctgtacagagatcctgccctgctgggcctgcgctgccccctgtaccccagcttccctgaggaggccgccctggaggccgaggccgagctgggcggccagcccagcctgacagctgaggacagcgagatcagcagccagtgccccagcgccagcggcagcagcggcagtgacagcagctgtgtgtctggccaggccctgggccggggcctggaggacctgccctgtgtgtag

SEQ ID NO: 164373 - DNA, 3576 bp, synthetic construct; identical to SEQ ID NO: 164372
  misc_feature 1..3576: note = Description of Artificial Sequence: Synthetic coding sequence
  source 1..3576: mol_type = other DNA

SEQ ID NO: 164374 - DNA, 582 bp, synthetic construct
  misc_feature 1..582: note = Description of Artificial Sequence: Synthetic coding sequence
  source 1..582: mol_type = other DNA
atggagcggcccctggagaatggagatgagagcccagacagccagggccacgccacagactggaggtttgctgtgtgcagcttcagagatgcctgggaggaggaggagcccgccagccagatgcacgtgaaggaccccggcccccccaggcctcctgctggggccacccaggatgaggagctgcagggcagccccctgagcaggaagttccagctgcccccagctgctgatgaaagtggagatgcccagaggggcaccgtggagagcagctctgtgctgtctgagggccctggccccagcggcgtggagagcctgctgtgccccatgagcagccacctgagcctggcccagggcgagagtgacaccccaggagtgggcctggtgggggaccccggccccagccgggccatgcccagcggcctgagccctggggccctggacagcgaccctgtgggcctgggggaccccctgtctgagatcagcaagctgctggaggccggcaaggagggctgggcccgggaggtgtgggagggcaatggagatgcctggagagatgagtgccaggactttggaggcctgtag

SEQ ID NO: 164375 - DNA, 3576 bp, synthetic construct; identical to SEQ ID NO: 164372
  misc_feature 1..3576: note = Description of Artificial Sequence: Synthetic coding sequence
  source 1..3576: mol_type = other DNA

SEQ ID NO: 164376 - DNA, 3333 bp, synthetic construct
  misc_feature 1..3333: note = Description of Artificial Sequence: Synthetic coding sequence
  source 1..3333: mol_type = other DNA
atggagcggcccctggagaatggagatgagagcccagacagccagggccacgccacagactggaggtttgctgtgtgcagcttcagagatgcctgggaggaggaggagcccgccagccagatgcacgtgaaggaccccggcccccccaggcctcctgctggggccacccaggatgaggagctgcagggcagccccctgagcaggaagttccagctgcccccagctgctgatgaaagtggagatgcccagaggggcaccgtggagagcagctctgtgctgtctgagggccctggccccagcggcgtggagagcctgctgtgccccatgagcagccacctgagcctggcccagggcaccagagatgtgcagggccgggctgtgctgctgctgtgtgcccacagccctgcctggctgcagagtgaatgtagcagccaggagctgatccggctgctgctgtacctgcggagcatccccaggcctgaggtgcaggccctgggcctgactgtgctggtggatgcccgcatctgtgcccccagcagcagcctcttcagcggcctgagccagctgcaggaggccgcccctggagctgtgtaccaggtgctgctggtgggcagcaccctgctgaaggaggtgcccagcggcctgcagctggagcagctgcccagccagagcctgctgacccacatccccacagctggcctgcccaccagcctgggcggcggcctgccctactgccaccaggcctggctggacttcagaagaaggctggaggccctgctgcagaactgccaggccgcctgtgccctgctgcagggcgccatcgagagcgtgaaggctgtgccccagcccatggagcccggggaggtgggccagctgctgcagcagacagaggtgctgatgcagcaggtgctggacagcccctggctggcctggctgcagtgccagggcggccgggagctgacctggctgaagcaggaggtgcctgaggtgaccctgagcccagactacagaacagccatggacaaggcagatgagctgtatgacagagtggatggcctgctgcaccagctgaccctgcagagcaaccagaggatccaggccctggagctggtgcagaccctggaggcccgggagagcggcctgcaccagatcgaggtgtggctgcagcaggtgggctggccagccctggaggaggccggggagcccagcctggacatgctgctgcaggcccagggcagcttccaggagctgtaccaggtggcccaggagcaggtgcggcagggcgagaagttcctgcagcccctgaccggctgggaggccgctgagctggaccccccaggggcccgcttcctggccctgcgggcccagctgacagagttcagccgggccctggcccagcgctgccagaggctggctgatgctgagcggctcttccagctgttccgggaggccctgacctgggccgaggagggccagagggtgctggccgagctggagcaggagaggcctggggtggtgctgcagcagctgcagctgcactggaccaggcacccagacctgcccccagcccacttcaggaagatgtgggccctggccaccggcctgggcagcgaggccatccggcaggagtgccgctgggcctgggcccgctgccaggacacctggctggccctggaccagaagctggaggccagcctgaagctgccccctgtgggcagcacagccagcctgtgtgtgtcccaggtgcctgctgccccagcccacccccccctgaggaaggcctacagctttgacaggaacctgggccagagcctgtctgagcccgcctgccactgccaccacgccgccaccatcgccgcctgccggcggcctgaggccggcggcggggccctgccccaggccagccccaccgtgcccccacctggcagcagtgaccccaggagcctgaaccggctgcagctggtgctggccgagatggtggccacagagcgggagtatgtgcgggccctggagtacaccatggagaactacttccctgagctggacagaccagatgtgccccagggcctgcggggccagagggcccacctgtttggaaacctggagaagctgcgggacttccactgccacttcttcctgcgggagctggaggcctgcaccaggcaccccccccgggtggcctatgccttcctgcggcaccgggtgcagtttggcatgtatgccctgtacagcaagaacaagcccaggagtgatgccctgatgagcagctatggccacaccttcttcaaggacaagcagcaggccctgggggaccacctggacctggccagctacctgctgaagcccatccagaggatgggcaagtatgccctgctgctgcaggagctggcccgggcctgtggcggccccacccaggagctgagcgccctgcgggaggcccagagcctggtgcacttccagctgcggcatggaaatgacctgctggccatggatgccatccagggctgtgatgtgaacctgaaggagcagggccagctggtgcggcaggatgaatttgtggtgaggacaggccgccacaagtctgtgcggcgcatcttcctgtttgaggagctgctgctcttcagcaagcccaggcatggccccaccggggtggacacctttgcctacaagaggagcttcaagatggctgacctgggcctgacagagtgctgcggcaacagcaacctgcgctttgagatctggttcagaagaaggaaggcccgggacacctttgtgctgcaggccagcagcctggccatcaagcaggcctggacagctgacatcagccacctgctgtggaggcaggccgtgcacaacaaggaggtgaggatggccgagatggtgtccatgggcgtgggcaacaaggccttccgggacatcgcccccagcgaggaggccatcaatgacagaacagtgaactacgtgctgaagtgccgggaggtgcgcagccgggccagcattgctgtggccccctttgaccatgacagcctgtacctgggcgccagcaacagcctgcccggggaccctgccagctgcagcgtgctgggcagcctgaacctgcacctgtacagagatcctgccctgctgggcctgcgctgccccctgtaccccagcttccctgaggaggccgccctggaggccgaggccgagctgggcggccagcccagcctgacagcagaagattctgagatcagcagccagtgccccagcgccagcggcagcagcggcagtgacagcagctgtgtgtctggccaggccctgggccggggcctggaggacctgccctgtgtgtag

SEQ ID NO: 164377 - DNA, 3021 bp, synthetic construct
  misc_feature 1..3021: note = Description of Artificial Sequence: Synthetic coding sequence
  source 1..3021: mol_type = other DNA
atgcactatgatggccacgtgcgctttgacctgcccccccagggctctgtgctggccagaaatgtgtccaccaggagctgcccccccaggaccagccctgctgtggacctggaggaggaggaggaggagagctctgtggatggaaaaggagacaggaagagcacaggcctgaagctgagcaagaagaaggcccggcggcggcacacagatgaccccagcaaagaatgcttcaccctgaagtttgacctgaatgtggacattgaaacagaaattgtgcctgccatgaagaagaagagcctgggggaggtgctgctgcctgtgtttgagaggaaaggaattgccctgggcaaggtggacatctacctggaccagagcaacacccccctgagcctgacctttgaggcctacagatttggaggccactacctgcgggtgaaggccccagccaagccaggagatgagggcaaggtggagcagggcatgaaggacagcaagagcctgagcctgcccatcctgcggcctgctggcactggacctccagccctggagcgggtggatgcccagagccggcgggagagcctggacatcctggcccctggaagaagaaggaagaacatgtctgagttcctgggggaggccagcatccctggccaggagccccccacccccagcagctgcagcctgcccagcggcagcagcggcagcaccaacacaggagacagctggaagaacagagctgccagccgcttcagcggcttcttcagcagcggccccagcaccagcgccttcggccgggaggtggacaagatggagcagctggagggcaagctgcacacctacagcctgtttggcctgccccggctgccccggggcctgcgctttgaccatgacagctgggaggaggagtatgatgaagatgaagatgaagataatgcctgcctgcggctggaggacagctggagggagctgattgatggccacgagaagctgacccggcggcagtgccaccagcaggaggccgtgtgggagctgctgcacacagaggccagctacatcaggaagctgcgggtcatcatcaacctcttcctgtgctgcctgctgaacctgcaggagagcggcctgctgtgtgaggtggaggccgagcggctcttcagcaacatccctgagatcgcccagctgcaccggcggctgtgggcctctgtgatggcccctgtgctggagaaggcccggaggacccgggccctgctgcagcccggggacttcctgaagggcttcaagatgtttggcagcctcttcaagccctacatccgctactgcatggaggaggagggctgcatggagtacatgaggggcctgctgcgggacaatgacctcttccgggcctacatcacctgggccgagaagcacccccagtgccagaggctgaagctgagtgacatgctggccaagccccaccagaggctgaccaagtaccccctgctgctgaagtctgtgctgaggaagacagaggagccccgggccaaggaggccgtggtggccatgattggctctgtggagcgcttcatccaccacgtgaatgcctgcatgaggcagaggcaggagcggcagaggctggccgctgtggtgtccagaattgatgcctatgaggtggtggagagcagcagtgatgaggtggacaagctgctgaaggagttcctgcacctggacctgacagcccccatccctggggccagccctgaggagacccggcagctgctgctggagggcagcctgaggatgaaggagggcaaggacagcaagatggatgtgtactgcttcctgttcacagacctgctgctggtgaccaaggctgtgaagaaggccgagaggaccagggtcatccggccccccctgctggtggacaagatcgtgtgccgggagctgcgggaccccggcagcttcctgctgatctacctgaatgagttccacagcgctgtgggcgcctacaccttccaggccagcggccaggccctgtgccggggctgggtggacaccatctacaatgcccagaaccagctgcagcagctgcgggcccaggagcccccaggcagccagcagcccctgcagagcctggaggaggaggaggatgagcaggaggaggaggaggaggaggaggaggaggaggaggagggagaagattctggcaccagcgctgccagcagccccaccatcatgaggaagagcagcggcagcccagacagccagcactgtgccagtgatggcagcacagagaccctggccatggtggtggtggagcccggggacaccctgagcagccctgagtttgattctggccccttcagcagccagagtgatgagaccagcctgagcaccacagccagcagcgccacccccaccagcgagctgctgcccctgggccctgtggatggccgcagctgcagcatggattctgcctacggcaccctgagccccaccagcctgcaggactttgtggcccctggccccatggccgagctggtgccccgggcccctgagagcccccgggtgcccagccccccacccagcccccggctgcggcggaggacccctgtgcagctgctgagctgccccccccacctgctgaagagcaagtctgaggccagcctgctgcagctgctggccggggccggcacccacggcacccccagcgcccccagccgcagcctgtctgagctgtgcctggccgtgcctgcccctggcatccgcacccagggcagcccccaggaggccggccccagctgggactgccgcggggcccccagccctggcagcggccctggcctggtgggctgcctggccggggagcccgccggcagccacaggaagagatgtggggacctgcccagcggggccagcccccgggtgcagcctgagcccccacctggggtgtctgcccagcacaggaagctgaccctggcccagctgtaccgcatccgcaccaccctgctgctgaacagcaccctgacagccagcgaggtgtag

SEQ ID NO: 164378 - DNA, 2793 bp, synthetic construct
  misc_feature 1..2793: note = Description of Artificial Sequence: Synthetic coding sequence
  source 1..2793: mol_type = other DNA
atgcactatgatggccacgtgcgctttgacctgcccccccagggctctgtgctggccagaaatgtgtccaccaggagctgcccccccaggaccagccctgctgtggacctggaggaggaggaggaggagagctctgtggatggaaaaggagacaggaagagcacaggcctgaagctgagcaagaagaaggcccggcggcggcacacagatgaccccagcaaagaatgcttcaccctgaagtttgacctgaatgtggacattgaaacagaaattgtgcctgccatgaagaagaagagcctgggggaggtgctgctgcctgtgtttgagaggaaaggaattgccctgggcaaggtggacatctacctggaccagagcaacacccccctgagcctgacctttgaggcctacagatttggaggccactacctgcgggtgaaggccccagccaagccaggagatgagggcaaggtggagcagggcatgaaggacagcaagagcctgagcctgcccatcctgcggcctgctggcactggacctccagccctggagcgggtggatgcccagagccggcgggagagcctggacatcctggcccctggaagaagaaggaagaacatgtctgagttcctgggggaggccagcatccctggccaggagccccccacccccagcagctgcagcctgcccagcggcagcagcggcagcaccaacacaggagacagctggaagaacagagctgccagccgcttcagcggcttcttcagcagcggccccagcaccagcgccttcggccgggaggtggacaagatggagcagctggagggcaagctgcacacctacagcctgtttggcctgccccggctgccccggggcctgcgctttgaccatgacagctgggaggaggagtatgatgaagatgaagatgaagataatgcctgcctgcggctggaggacagctggagggagctgattgatggccacgagaagctgacccggcggcagtgccaccagcaggaggccgtgtgggagctgctgcacacagaggccagctacatcaggaagctgcgggtcatcatcaacctcttcctgtgctgcctgctgaacctgcaggagagcggcctgctgtgtgaggtggaggccgagcggctcttcagcaacatccctgagatcgcccagctgcaccggcggctgtgggcctctgtgatggcccctgtgctggagaaggcccggaggacccgggccctgctgcagcccggggacttcctgaagggcttcaagatgtttggcagcctcttcaagccctacatccgctactgcatggaggaggagggctgcatggagtacatgaggggcctgctgcgggacaatgacctcttccgggcctacatcacctgggccgagaagcacccccagtgccagaggctgaagctgagtgacatgctggccaagccccaccagaggctgaccaagtaccccctgctgctgaagtctgtgctgaggaagacagaggagccccgggccaaggaggccgtggtggccatgattggctctgtggagcgcttcatccaccacgtgaatgcctgcatgaggcagaggcaggagcggcagaggctggccgctgtggtgtccagaattgatgcctatgaggtggtggagagcagcagtgatgaggtggacaagctgctgaaggagttcctgcacctggacctgacagcccccatccctggggccagccctgaggagacccggcagctgctgctggagggcagcctgaggatgaaggagggcaaggacagcaagatggatgtgtactgcttcctgttcacagacctgctgctggtgaccaaggctgtgaagaaggccgagaggaccagggtcatccggccccccctgctggtggacaagatcgtgtgccgggagctgcgggaccccggcagcttcctgctgatctacctgaatgagttccacagcgctgtgggcgcctacaccttccaggccagcggccaggccctgtgccggggctgggtggacaccatctacaatgcccagaaccagctgcagcagctgcgggcccaggagcccccaggcagccagcagcccctgcagagcctggaggaggaggaggatgagcaggaggaggaggaggaggaggaggaggaggaggaggagggagaagattctggcaccagcgctgccagcagccccaccatcatgaggaagagcagcggcagcccagacagccagcactgtgccagtgatggcagcacagagaccctggccatggtggtggtggagcccggggacaccctgagcagccctgagtttgattctggccccttcagcagccagagtgatgagaccagcctgagcaccacagccagcagcgccacccccaccagcgagctgctgcccctgggccctgtggatggccgcagctgcagcatggattctgcctacggcaccctgagccccaccagcctgcaggactttgtggcccctggccccatggccgagctggtgccccgggcccctgagagcccccgggtgcccagccccccacccagcccccggctgcggcggaggacccctgtgcagctgctgagctgccccccccacctgctgaagagcaagtctgaggccagcctgctgcagctgctggccggggccggcacccacggcacccccagcgcccccagccgcagcctgtctgagctgtgcctggccgtgcctgccccagcccaggaggccgaccccggccctgccctgcccaaccaggaccaccctgctgcctag

SEQ ID NO: 164379 - DNA, 3021 bp, synthetic construct; identical to SEQ ID NO: 164377
  misc_feature 1..3021: note = Description of Artificial Sequence: Synthetic coding sequence
  source 1..3021: mol_type = other DNA

SEQ ID NO: 164380 - DNA, 3132 bp, synthetic construct
  misc_feature 1..3132: note = Description of Artificial Sequence: Synthetic coding sequence
  source 1..3132: mol_type = other DNA
atggacaagggccgggccgccaaggtgtgccaccacgccgactgccagcagctgcaccggcggggccccctgaacctgtgtgaggcctgtgacagcaagttccacagcaccatgcactatgatggccacgtgcgctttgacctgcccccccagggctctgtgctggccagaaatgtgtccaccaggagctgcccccccaggaccagccctgctgtggacctggaggaggaggaggaggagagctctgtggatggcaagggggacaggaagagcacaggcctgaagctgagcaagaagaaggccaggagaagacacacagatgaccccagcaaggagtgcttcaccctgaagtttgacctgaatgtggacatcgagacagagatcgtgcctgccatgaagaagaagagcctgggggaggtgctgctgcctgtgtttgagaggaagggcatcgccctgggcaaggtggacatctacctggaccagagcaacacccccctgagcctgacctttgaggcctacagatttggaggccactacctgcgggtgaaggccccagccaagccaggagatgagggcaaggtggagcagggcatgaaggacagcaagagcctgagcctgcccatcctgcggcctgctggcaccggccccccagccctggagcgggtggatgcccagagcagaagagagagcctggacatcctggcccctggaagaagaaggaagaacatgtctgagttcctgggggaggccagcatccctggccaggagccccccacccccagcagctgcagcctgcccagcggcagcagcggcagcaccaacacaggagacagctggaagaacagagctgccagccgcttcagcggcttcttcagcagcggccccagcaccagcgccttcggccgggaggtggacaagatggagcagctggagggcaagctgcacacctacagcctgtttggcctgccccggctgccccggggcctgcgctttgaccatgacagctgggaggaggagtatgatgaagatgaagatgaggacaatgcctgcctgcggctggaggacagctggagggagctgattgatggccacgagaagctgacccggcggcagtgccaccagcaggaggccgtgtgggagctgctgcacacagaggccagctacatcaggaagctgcgggtcatcatcaacctcttcctgtgctgcctgctgaacctgcaggagagcggcctgctgtgtgaggtggaggccgagcggctcttcagcaacatccctgagatcgcccagctgcaccggcggctgtgggcctctgtgatggcccctgtgctggagaaggcccggaggacccgggccctgctgcagcccggggacttcctgaagggcttcaagatgtttggcagcctcttcaagccctacatccgctactgcatggaggaggagggctgcatggagtacatgaggggcctgctgcgggacaatgacctcttccgggcctacatcacctgggccgagaagcacccccagtgccagaggctgaagctgagtgacatgctggccaagccccaccagaggctgaccaagtaccccctgctgctgaagtctgtgctgaggaagacagaggagccccgggccaaggaggccgtggtggccatgattggctctgtggagcgcttcatccaccacgtgaatgcctgcatgaggcagaggcaggagcggcagaggctggccgctgtggtgtccagaattgatgcctatgaggtggtggagagcagcagtgatgaggtggacaagctgctgaaggagttcctgcacctggacctgacagcccccatccctggggccagccctgaggagacccggcagctgctgctggagggcagcctgaggatgaaggagggcaaggacagcaagatggatgtgtactgcttcctgttcacagacctgctgctggtgaccaaggctgtgaagaaggccgagaggaccagggtcatccggccccccctgctggtggacaagatcgtgtgccgggagctgcgggaccccggcagcttcctgctgatctacctgaatgagttccacagcgctgtgggcgcctacaccttccaggccagcggccaggccctgtgccggggctgggtggacaccatctacaatgcccagaaccagctgcagcagctgcgggcccaggagcccccaggcagccagcagcccctgcagagcctggaggaggaggaggatgagcaggaggaggaggaggaggaggaggaggaggaggaggagggggaggacagcggcaccagcgctgccagcagccccaccatcatgaggaagagcagcggcagcccagacagccagcactgtgccagtgatggcagcacagagaccctggccatggtggtggtggagcccggggacaccctgagcagccctgagtttgacagcggccccttcagcagccagagtgatgagaccagcctgagcaccacagccagcagcgccacccccaccagcgagctgctgcccctgggccctgtggatggccgcagctgcagcatggacagcgcctacggcaccctgagccccaccagcctgcaggactttgtggcccctggccccatggccgagctggtgccccgggcccctgagagcccccgggtgcccagccccccacccagcccccggctgcggcggaggacccctgtgcagctgctgagctgccccccccacctgctgaagagcaagtctgaggccagcctgctgcagctgctggccggggccggcacccacggcaccccatctgcccccagccgcagcctgtctgagctgtgcctggccgtgcctgcccctggcatccgcacccagggcagcccccaggaggccggccccagctgggactgccgcggggcccccagccctggcagcggccctggcctggtgggctgcctggccggggagcctgctggcagccacaggaagagatgtggggacctgcccagcggggccagcccccgggtgcagcctgagcccccacctggggtgtctgcccagcacaggaagctgaccctggcccagctgtaccgcatccgcaccaccctgctgctgaacagcaccctgacagccagcgaggtgtag

SEQ ID NO: 164381 - DNA, 3021 bp, synthetic construct; identical to SEQ ID NO: 164377
  misc_feature 1..3021: note = Description of Artificial Sequence: Synthetic coding sequence
  source 1..3021: mol_type = other DNA

SEQ ID NO: 164382 - DNA, 2559 bp, synthetic construct
  misc_feature 1..2559: note = Description of Artificial Sequence: Synthetic coding sequence
  source 1..2559: mol_type = other DNA
atgaacagcgtgctgaccaagcacggcagccccccaagatcctggctgagcctgtgcagcggcacagatgaccagagccctgctgagaagaagggcctgcgctgccagaacccagcctgcatggacaagggccgggccgccaaggtgtgccaccacgccgactgccagcagctgcaccggcggggccccctgaacctgtgtgaggcctgtgacagcaagttccacagcaccatgcactatgatggccacgtgcgctttgacctgcccccccagggctctgtgctggccagaaatgtgtccaccaggagctgcccccccaggaccagccctgctgtggacctggaggaggaggaggaggagagctctgtggatggcaagggggacaggaagagcacaggcctgaagctgagcaagaagaaggccaggagaagacacacagatgaccccagcaaggagtgcttcaccctgaagtttgacctgaatgtggacatcgagacagagatcgtgcctgccatgaagaagaagagcctgggggaggtgctgctgcctgtgtttgagaggaagggcatcgccctgggcaaggtggacatctacctggaccagagcaacacccccctgagcctgacctttgaggcctacagatttggaggccactacctgcgggtgaaggccccagccaagccaggagatgagggcaaggtggagcagggcatgaaggacagcaagagcctgagcctgcccatcctgcggcctgctggcaccggccccccagccctggagcgggtggatgcccagagcagaagagagagcctggacatcctggcccctggaagaagaaggaagaacatgtctgagttcctgggggaggccagcatccctggccaggagccccccacccccagcagctgcagcctgcccagcggcagcagcggcagcaccaacacaggagacagctggaagaacagagctgccagccgcttcagcggcttcttcagcagcggccccagcaccagcgccttcggccgggaggtggacaagatggagcagctggagggcaagctgcacacctacagcctgtttggcctgccccggctgccccggggcctgcgctttgaccatgacagctgggaggaggagtatgatgaagatgaagatgaggacaatgcctgcctgcggctggaggacagctggagggagctgattgatggccacgagaagctgacccggcggcagtgccaccagcaggaggccgtgtgggagctgctgcacacagaggccagctacatcaggaagctgcgggtcatcatcaacctcttcctgtgctgcctgctgaacctgcaggagagcggcctgctgtgtgaggtggaggccgagcggctcttcagcaacatccctgagatcgcccagctgcaccggcggctgtgggcctctgtgatggcccctgtgctggagaaggcccggaggacccgggccctgctgcagcccggggacttcctgaagggcttcaagatgtttggcagcctcttcaagccctacatccgctactgcatggaggaggagggctgcatggagtacatgaggggcctgctgcgggacaatgacctcttccgggcctacatcacctgggccgagaagcacccccagtgccagaggctgaagctgagtgacatgctggccaagccccaccagaggctgaccaagtaccccctgctgctgaagtctgtgctgaggaagacagaggagccccgggccaaggaggccgtggtggccatgattggctctgtggagcgcttcatccaccacgtgaatgcctgcatgaggcagaggcaggagcggcagaggctggccgctgtggtgtccagaattgatgcctatgaggtggtggagagcagcagtgatgaggtggacaagctgctgaaggagttcctgcacctggacctgacagcccccatccctggggccagccctgaggagacccggcagctgctgctggagggcagcctgaggatgaaggagggcaaggacagcaagatggatgtgtactgcttcctgttcacagacctgctgctggtgaccaaggctgtgaagaaggccgagaggaccagggtcatccggccccccctgctggtggacaagatcgtgtgccgggagctgcgggaccccggcagcttcctgctgatctacctgaatgagttccacagcgctgtgggcgcctacaccttccaggccagcggccaggccctgtgccggggctgggtggacaccatctacaatgcccagaaccagctgcagcagctgcgggcccaggagcccccaggcagccagcagcccctgcagagcctggaggaggaggaggatgagcaggaggaggaggaggaggaggaggaggaggaggaggagggggaggacagcggcaccagcgctgccagcagccccaccatcatgaggaagagcagcggcagcccagacagccagcactggaagctgaccctggcccagctgtaccgcatccgcaccaccctgctgctgaacagcaccctgacagccagcgaggtgtag

SEQ ID NO: 164383 - DNA, 3252 bp, synthetic construct
  misc_feature 1..3252: note = Description of Artificial Sequence: Synthetic coding sequence
  source 1..3252: mol_type = other DNA
atgaacagcgtgctgaccaagcacggcagccccccaagatcctggctgagcctgtgcagcggcacagatgaccagagccctgctgagaagaagggcctgcgctgccagaacccagcctgcatggacaagggccgggccgccaaggtgtgccaccacgccgactgccagcagctgcaccggcggggccccctgaacctgtgtgaggcctgtgacagcaagttccacagcaccatgcactatgatggccacgtgcgctttgacctgcccccccagggctctgtgctggccagaaatgtgtccaccaggagctgcccccccaggaccagccctgctgtggacctggaggaggaggaggaggagagctctgtggatggcaagggggacaggaagagcacaggcctgaagctgagcaagaagaaggccaggagaagacacacagatgaccccagcaaggagtgcttcaccctgaagtttgacctgaatgtggacatcgagacagagatcgtgcctgccatgaagaagaagagcctgggggaggtgctgctgcctgtgtttgagaggaagggcatcgccctgggcaaggtggacatctacctggaccagagcaacacccccctgagcctgacctttgaggcctacagatttggaggccactacctgcgggtgaaggccccagccaagccaggagatgagggcaaggtggagcagggcatgaaggacagcaagagcctgagcctgcccatcctgcggcctgctggcaccggccccccagccctggagcgggtggatgcccagagcagaagagagagcctggacatcctggcccctggaagaagaaggaagaacatgtctgagttcctgggggaggccagcatccctggccaggagccccccacccccagcagctgcagcctgcccagcggcagcagcggcagcaccaacacaggagacagctggaagaacagagctgccagccgcttcagcggcttcttcagcagcggccccagcaccagcgccttcggccgggaggtggacaagatggagcagctggagggcaagctgcacacctacagcctgtttggcctgccccggctgccccggggcctgcgctttgaccatgacagctgggaggaggagtatgatgaagatgaagatgaggacaatgcctgcctgcggctggaggacagctggagggagctgattgatggccacgagaagctgacccggcggcagtgccaccagcaggaggccgtgtgggagctgctgcacacagaggccagctacatcaggaagctgcgggtcatcatcaacctcttcctgtgctgcctgctgaacctgcaggagagcggcctgctgtgtgaggtggaggccgagcggctcttcagcaacatccctgagatcgcccagctgcaccggcggctgtgggcctctgtgatggcccctgtgctggagaaggcccggaggacccgggccctgctgcagcccggggacttcctgaagggcttcaagatgtttggcagcctcttcaagccctacatccgctactgcatggaggaggagggctgcatggagtacatgaggggcctgctgcgggacaatgacctcttccgggcctacatcacctgggccgagaagcacccccagtgccagaggctgaagctgagtgacatgctggccaagccccaccagaggctgaccaagtaccccctgctgctgaagtctgtgctgaggaagacagaggagccccgggccaaggaggccgtggtggccatgattggctctgtggagcgcttcatccaccacgtgaatgcctgcatgaggcagaggcaggagcggcagaggctggccgctgtggtgtccagaattgatgcctatgaggtggtggagagcagcagtgatgaggtggacaagctgctgaaggagttcctgcacctggacctgacagcccccatccctggggccagccctgaggagacccggcagctgctgctggagggcagcctgaggatgaaggagggcaaggacagcaagatggatgtgtactgcttcctgttcacagacctgctgctggtgaccaaggctgtgaagaaggccgagaggaccagggtcatccggccccccctgctggtggacaagatcgtgtgccgggagctgcgggaccccggcagcttcctgctgatctacctgaatgagttccacagcgctgtgggcgcctacaccttccaggccagcggccaggccctgtgccggggctgggtggacaccatctacaatgcccagaaccagctgcagcagctgcgggcccaggagcccccaggcagccagcagcccctgcagagcctggaggaggaggaggatgagcaggaggaggaggaggaggaggaggaggaggaggaggagggggaggacagcggcaccagcgctgccagcagccccaccatcatgaggaagagcagcggcagcccagacagccagcactgtgccagtgatggcagcacagagaccctggccatggtggtggtggagcccggggacaccctgagcagccctgagtttgacagcggccccttcagcagccagagtgatgagaccagcctgagcaccacagccagcagcgccacccccaccagcgagctgctgcccctgggccctgtggatggccgcagctgcagcatggacagcgcctacggcaccctgagccccaccagcctgcaggactttgtggcccctggccccatggccgagctggtgccccgggcccctgagagcccccgggtgcccagccccccacccagcccccggctgcggcggaggacccctgtgcagctgctgagctgccccccccacctgctgaagagcaagtctgaggccagcctgctgcagctgctggccggggccggcacccacggcaccccatctgcccccagccgcagcctgtctgagctgtgcctggccgtgcctgcccctggcatccgcacccagggcagcccccaggaggccggccccagctgggactgccgcggggcccccagccctggcagcggccctggcctggtgggctgcctggccggggagcctgctggcagccacaggaagagatgtggggacctgcccagcggggccagcccccgggtgcagcctgagcccccacctggggtgtctgcccagcacaggaagctgaccctggcccagctgtaccgcatccgcaccaccctgctgctgaacagcaccctgacagccagcgaggtgtag

SEQ ID NO: 164384 - DNA, 3021 bp, synthetic construct; identical to SEQ ID NO: 164377
  misc_feature 1..3021: note = Description of Artificial Sequence: Synthetic coding sequence
  source 1..3021: mol_type = other DNA

SEQ ID NO: 164385 - DNA, 3189 bp, synthetic construct
  misc_feature 1..3189: note = Description of Artificial Sequence: Synthetic coding sequence
  source 1..3189: mol_type = other DNA
atggatgaccagagccctgctgagaagaagggcctgcgctgccagaacccagcctgcatggacaagggccgggccgccaaggtgtgccaccacgccgactgccagcagctgcacagaagaggccccctgaacctgtgtgaggcctgtgacagcaagttccacagcaccatgcactatgatggccacgtgcgctttgacctgcccccccagggctctgtgctggccagaaatgtgtccaccaggagctgcccccccaggaccagccctgctgtggacctggaggaggaggaggaggagagctctgtggatggaaaaggagacaggaagagcacaggcctgaagctgagcaagaagaaggcccggcggcggcacacagatgaccccagcaaagaatgcttcaccctgaagtttgacctgaatgtggacattgaaacagaaattgtgcctgccatgaagaagaagagcctgggggaggtgctgctgcctgtgtttgagaggaaaggaattgccctgggcaaggtggacatctacctggaccagagcaacacccccctgagcctgacctttgaggcctacagatttggaggccactacctgcgggtgaaggccccagccaagccaggagatgagggcaaggtggagcagggcatgaaggacagcaagagcctgagcctgcccatcctgcggcctgctggcactggacctccagccctggagcgggtggatgcccagagccggcgggagagcctggacatcctggcccctggaagaagaaggaagaacatgtctgagttcctgggggaggccagcatccctggccaggagccccccacccccagcagctgcagcctgcccagcggcagcagcggcagcaccaacacaggagacagctggaagaacagagctgccagccgcttcagcggcttcttcagcagcggccccagcaccagcgccttcggccgggaggtggacaagatggagcagctggagggcaagctgcacacctacagcctgtttggcctgccccggctgccccggggcctgcgctttgaccatgacagctgggaggaggagtatgatgaagatgaagatgaagataatgcctgcctgcggctggaggacagctggagggagctgattgatggccacgagaagctgacccggcggcagtgccaccagcaggaggccgtgtgggagctgctgcacacagaggccagctacatcaggaagctgcgggtcatcatcaacctcttcctgtgctgcctgctgaacctgcaggagagcggcctgctgtgtgaggtggaggccgagcggctcttcagcaacatccctgagatcgcccagctgcaccggcggctgtgggcctctgtgatggcccctgtgctggagaaggcccggaggacccgggccctgctgcagcccggggacttcctgaagggcttcaagatgtttggcagcctcttcaagccctacatccgctactgcatggaggaggagggctgcatggagtacatgaggggcctgctgcgggacaatgacctcttccgggcctacatcacctgggccgagaagcacccccagtgccagaggctgaagctgagtgacatgctggccaagccccaccagaggctgaccaagtaccccctgctgctgaagtctgtgctgaggaagacagaggagccccgggccaaggaggccgtggtggccatgattggctctgtggagcgcttcatccaccacgtgaatgcctgcatgaggcagaggcaggagcggcagaggctggccgctgtggtgtccagaattgatgcctatgaggtggtggagagcagcagtgatgaggtggacaagctgctgaaggagttcctgcacctggacctgacagcccccatccctggggccagccctgaggagacccggcagctgctgctggagggcagcctgaggatgaaggagggcaaggacagcaagatggatgtgtactgcttcctgttcacagacctgctgctggtgaccaaggctgtgaagaaggccgagaggaccagggtcatccggccccccctgctggtggacaagatcgtgtgccgggagctgcgggaccccggcagcttcctgctgatctacctgaatgagttccacagcgctgtgggcgcctacaccttccaggccagcggccaggccctgtgccggggctgggtggacaccatctacaatgcccagaaccagctgcagcagctgcgggcccaggagcccccaggcagccagcagcccctgcagagcctggaggaggaggaggatgagcaggaggaggaggaggaggaggaggaggaggaggaggagggagaagattctggcaccagcgctgccagcagccccaccatcatgaggaagagcagcggcagcccagacagccagcactgtgccagtgatggcagcacagagaccctggccatggtggtggtggagcccggggacaccctgagcagccctgagtttgattctggccccttcagcagccagagtgatgagaccagcctgagcaccacagccagcagcgccacccccaccagcgagctgctgcccctgggccctgtggatggccgcagctgcagcatggattctgcctacggcaccctgagccccaccagcctgcaggactttgtggcccctggccccatggccgagctggtgccccgggcccctgagagcccccgggtgcccagccccccacccagcccccggctgcggcggaggacccctgtgcagctgctgagctgccccccccacctgctgaagagcaagtctgaggccagcctgctgcagctgctggccggggccggcacccacggcacccccagcgcccccagccgcagcctgtctgagctgtgcctggccgtgcctgcccctggcatccgcacccagggcagcccccaggaggccggccccagctgggactgccgcggggcccccagccctggcagcggccctggcctggtgggctgcctggccggggagcccgccggcagccacaggaagagatgtggggacctgcccagcggggccagcccccgggtgcagcctgagcccccacctggggtgtctgcccagcacaggaagctgaccctggcccagctgtaccgcatccgcaccaccctgctgctgaacagcaccctgacagccagcgaggtgtag

SEQ ID NO: 164386 - DNA, 3228 bp, synthetic construct
  misc_feature 1..3228: note = Description of Artificial Sequence: Synthetic coding sequence
  source 1..3228: mol_type = other DNA
atgggcactggacctggggtgtctggccgcctggccgccagccggcccggccctggcctgcccctgcgggacagcgagcccagctgggccggcggccgggccagagatggagacagccaggtgtgccaccacgccgactgccagcagctgcaccggcggggccccctgaacctgtgtgaggcctgtgacagcaagttccacagcaccatgcactatgatggccacgtgcgctttgacctgcccccccagggctctgtgctggccagaaatgtgtccaccaggagctgcccccccaggaccagccctgctgtggacctggaggaggaggaggaggagagctctgtggatggcaagggggacaggaagagcacaggcctgaagctgagcaagaagaaggccaggagaagacacacagatgaccccagcaaggagtgcttcaccctgaagtttgacctgaatgtggacatcgagacagagatcgtgcctgccatgaagaagaagagcctgggggaggtgctgctgcctgtgtttgagaggaagggcatcgccctgggcaaggtggacatctacctggaccagagcaacacccccctgagcctgacctttgaggcctacagatttggaggccactacctgcgggtgaaggccccagccaagccaggagatgagggcaaggtggagcagggcatgaaggacagcaagagcctgagcctgcccatcctgcggcctgctggcaccggccccccagccctggagcgggtggatgcccagagcagaagagagagcctggacatcctggcccctggaagaagaaggaagaacatgtctgagttcctgggggaggccagcatccctggccaggagccccccacccccagcagctgcagcctgcccagcggcagcagcggcagcaccaacacaggagacagctggaagaacagagctgccagccgcttcagcggcttcttcagcagcggccccagcaccagcgccttcggccgggaggtggacaagatggagcagctggagggcaagctgcacacctacagcctgtttggcctgccccggctgccccggggcctgcgctttgaccatgacagctgggaggaggagtatgatgaagatgaagatgaggacaatgcctgcctgcggctggaggacagctggagggagctgattgatggccacgagaagctgacccggcggcagtgccaccagcaggaggccgtgtgggagctgctgcacacagaggccagctacatcaggaagctgcgggtcatcatcaacctcttcctgtgctgcctgctgaacctgcaggagagcggcctgctgtgtgaggtggaggccgagcggctcttcagcaacatccctgagatcgcccagctgcaccggcggctgtgggcctctgtgatggcccctgtgctggagaaggcccggaggacccgggccctgctgcagcccggggacttcctgaagggcttcaagatgtttggcagcctcttcaagccctacatccgctactgcatggaggaggagggctgcatggagtacatgaggggcctgctgcgggacaatgacctcttccgggcctacatcacctgggccgagaagcacccccagtgccagaggctgaagctgagtgacatgctggccaagccccaccagaggctgaccaagtaccccctgctgctgaagtctgtgctgaggaagacagaggagccccgggccaaggaggccgtggtggccatgattggctctgtggagcgcttcatccaccacgtgaatgcctgcatgaggcagaggcaggagcggcagaggctggccgctgtggtgtccagaattgatgcctatgaggtggtggagagcagcagtgatgaggtggacaagctgctgaaggagttcctgcacctggacctgacagcccccatccctggggccagccctgaggagacccggcagctgctgctggagggcagcctgaggatgaaggagggcaaggacagcaagatggatgtgtactgcttcctgttcacagacctgctgctggtgaccaaggctgtgaagaaggccgagaggaccagggtcatccggccccccctgctggtggacaagatcgtgtgccgggagctgcgggaccccggcagcttcctgctgatctacctgaatgagttccacagcgctgtgggcgcctacaccttccaggccagcggccaggccctgtgccggggctgggtggacaccatctacaatgcccagaaccagctgcagcagctgcgggcccaggagcccccaggcagccagcagcccctgcagagcctggaggaggaggaggatgagcaggaggaggaggaggaggaggaggaggaggaggaggagggggaggacagcggcaccagcgctgccagcagccccaccatcatgaggaagagcagcggcagcccagacagccagcactgtgccagtgatggcagcacagagaccctggccatggtggtggtggagcccggggacaccctgagcagccctgagtttgacagcggccccttcagcagccagagtgatgagaccagcctgagcaccacagccagcagcgccacccccaccagcgagctgctgcccctgggccctgtggatggccgcagctgcagcatggacagcgcctacggcaccctgagccccaccagcctgcaggactttgtggcccctggccccatggccgagctggtgccccgggcccctgagagcccccgggtgcccagccccccacccagcccccggctgcggcggaggacccctgtgcagctgctgagctgccccccccacctgctgaagagcaagtctgaggccagcctgctgcagctgctggccggggccggcacccacggcaccccatctgcccccagccgcagcctgtctgagctgtgcctggccgtgcctgcccctggcatccgcacccagggcagcccccaggaggccggccccagctgggactgccgcggggcccccagccctggcagcggccctggcctggtgggctgcctggccggggagcctgctggcagccacaggaagagatgtggggacctgcccagcggggccagcccccgggtgcagcctgagcccccacctggggtgtctgcccagcacaggaagctgaccctggcccagctgtaccgcatccgcaccaccctgctgctgaacagcaccctgacagccagcgaggtgtag

SEQ ID NO: 164387 - DNA, 2739 bp, synthetic construct
  misc_feature 1..2739: note = Description of Artificial Sequence: Synthetic coding sequence
  source 1..2739: mol_type = other DNA
atgaagaagaagagcctgggggaggtgctgctgcctgtgtttgagaggaaaggaattgccctgggcaaggtggacatctacctggaccagagcaacacccccctgagcctgacctttgaggcctacagatttggaggccactacctgcgggtgaaggccccagccaagccaggagatgagggcaaggtggagcagggcatgaaggacagcaagagcctgagcctgcccatcctgcggcctgctggcactggacctccagccctggagcgggtggatgcccagagccggcgggagagcctggacatcctggcccctggaagaagaaggaagaacatgtctgagttcctgggggaggccagcatccctggccaggagccccccacccccagcagctgcagcctgcccagcggcagcagcggcagcaccaacacaggagacagctggaagaacagagctgccagccgcttcagcggcttcttcagcagcggccccagcaccagcgccttcggccgggaggtggacaagatggagcagctggagggcaagctgcacacctacagcctgtttggcctgccccggctgccccggggcctgcgctttgaccatgacagctgggaggaggagtatgatgaagatgaagatgaagataatgcctgcctgcggctggaggacagctggagggagctgattgatggccacgagaagctgacccggcggcagtgccaccagcaggaggccgtgtgggagctgctgcacacagaggccagctacatcaggaagctgcgggtcatcatcaacctcttcctgtgctgcctgctgaacctgcaggagagcggcctgctgtgtgaggtggaggccgagcggctcttcagcaacatccctgagatcgcccagctgcaccggcggctgtgggcctctgtgatggcccctgtgctggagaaggcccggaggacccgggccctgctgcagcccggggacttcctgaagggcttcaagatgtttggcagcctcttcaagccctacatccgctactgcatggaggaggagggctgcatggagtacatgaggggcctgctgcgggacaatgacctcttccgggcctacatcacctgggccgagaagcacccccagtgccagaggctgaagctgagtgacatgctggccaagccccaccagaggctgaccaagtaccccctgctgctgaagtctgtgctgaggaagacagaggagccccgggccaaggaggccgtggtggccatgattggctctgtggagcgcttcatccaccacgtgaatgcctgcatgaggcagaggcaggagcggcagaggctggccgctgtggtgtccagaattgatgcctatgaggtggtggagagcagcagtgatgaggtggacaagctgctgaaggagttcctgcacctggacctgacagcccccatccctggggccagccctgaggagacccggcagctgctgctggagggcagcctgaggatgaaggagggcaaggacagcaagatggatgtgtactgcttcctgttcacagacctgctgctggtgaccaaggctgtgaagaaggccgagaggaccagggtcatccggccccccctgctggtggacaagatcgtgtgccgggagctgcgggaccccggcagcttcctgctgatctacctgaatgagttccacagcgctgtgggcgcctacaccttccaggccagcggccaggccctgtgccggggctgggtggacaccatctacaatgcccagaaccagctgcagcagctgcgggcccaggagcccccaggcagccagcagcccctgcagagcctggaggaggaggaggatgagcaggaggaggaggaggaggaggaggaggaggaggaggagggagaagattctggcaccagcgctgccagcagccccaccatcatgaggaagagcagcggcagcccagacagccagcactgtgccagtgatggcagcacagagaccctggccatggtggtggtggagcccggggacaccctgagcagccctgagtttgattctggccccttcagcagccagagtgatgagaccagcctgagcaccacagccagcagcgccacccccaccagcgagctgctgcccctgggccctgtggatggccgcagctgcagcatggattctgcctacggcaccctgagccccaccagcctgcaggactttgtggcccctggccccatggccgagctggtgccccgggcccctgagagcccccgggtgcccagccccccacccagcccccggctgcggcggaggacccctgtgcagctgctgagctgccccccccacctgctgaagagcaagtctgaggccagcctgctgcagctgctggccggggccggcacccacggcacccccagcgcccccagccgcagcctgtctgagctgtgcctggccgtgcctgcccctggcatccgcacccagggcagcccccaggaggccggccccagctgggactgccgcggggcccccagccctggcagcggccctggcctggtgggctgcctggccggggagcccgccggcagccacaggaagagatgtggggacctgcccagcggggccagcccccgggtgcagcctgagcccccacctggggtgtctgcccagcacaggaagctgaccctggcccagctgtaccgcatccgcaccaccctgctgctgaacagcaccctgacagccagcgaggtgtag

SEQ ID NO: 164388 - DNA, 3258 bp, synthetic construct
  misc_feature 1..3258: note = Description of Artificial Sequence: Synthetic coding sequence
  source 1..3258: mol_type = other DNA
atgagcctgggggagcggggcagcccccagaccttcggcggcagctctgtgtccaaaggaagtgatgctggccatgaccagagccctgctgagaagaagggcctgcgctgccagaacccagcctgcatggacaagggccgggccgccaaggtgtgccaccacgccgactgccagcagctgcaccggcggggccccctgaacctgtgtgaggcctgtgacagcaagttccacagcaccatgcactatgatggccacgtgcgctttgacctgcccccccagggctctgtgctggccagaaatgtgtccaccaggagctgcccccccaggaccagccctgctgtggacctggaggaggaggaggaggagagctctgtggatggcaagggggacaggaagagcacaggcctgaagctgagcaagaagaaggccaggagaagacacacagatgaccccagcaaggagtgcttcaccctgaagtttgacctgaatgtggacatcgagacagagatcgtgcctgccatgaagaagaagagcctgggggaggtgctgctgcctgtgtttgagaggaagggcatcgccctgggcaaggtggacatctacctggaccagagcaacacccccctgagcctgacctttgaggcctacagatttggaggccactacctgcgggtgaaggccccagccaagccaggagatgagggcaaggtggagcagggcatgaaggacagcaagagcctgagcctgcccatcctgcggcctgctggcaccggccccccagccctggagcgggtggatgcccagagcagaagagagagcctggacatcctggcccctggaagaagaaggaagaacatgtctgagttcctgggggaggccagcatccctggccaggagccccccacccccagcagctgcagcctgcccagcggcagcagcggcagcaccaacacaggagacagctggaagaacagagctgccagccgcttcagcggcttcttcagcagcggccccagcaccagcgccttcggccgggaggtggacaagatggagcagctggagggcaagctgcacacctacagcctgtttggcctgccccggctgccccggggcctgcgctttgaccatgacagctgggaggaggagtatgatgaagatgaagatgaggacaatgcctgcctgcggctggaggacagctggagggagctgattgatggccacgagaagctgacccggcggcagtgccaccagcaggaggccgtgtgggagctgctgcacacagaggccagctacatcaggaagctgcgggtcatcatcaacctcttcctgtgctgcctgctgaacctgcaggagagcggcctgctgtgtgaggtggaggccgagcggctcttcagcaacatccctgagatcgcccagctgcaccggcggctgtgggcctctgtgatggcccctgtgctggagaaggcccggaggacccgggccctgctgcagcccggggacttcctgaagggcttcaagatgtttggcagcctcttcaagccctacatccgctactgcatggaggaggagggctgcatggagtacatgaggggcctgctgcgggacaatgacctcttccgggcctacatcacctgggccgagaagcacccccagtgccagaggctgaagctgagtgacatgctggccaagccccaccagaggctgaccaagtaccccctgctgctgaagtctgtgctgaggaagacagaggagccccgggccaaggaggccgtggtggccatgattggctctgtggagcgcttcatccaccacgtgaatgcctgcatgaggcagaggcaggagcggcagaggctggccgctgtggtgtccagaattgatgcctatgaggtggtggagagcagcagtgatgaggtggacaagctgctgaaggagttcctgcacctggacctgacagcccccatccctggggccagccctgaggagacccggcagctgctgctggagggcagcctgaggatgaaggagggcaaggacagcaagatggatgtgtactgcttcctgttcacagacctgctgctggtgaccaaggctgtgaagaaggccgagaggaccagggtcatccggccccccctgctggtggacaagatcgtgtgccgggagctgcgggaccccggcagcttcctgctgatctacctgaatgagttccacagcgctgtgggcgcctacaccttccaggccagcggccaggccctgtgccggggctgggtggacaccatctacaatgcccagaaccagctgcagcagctgcgggcccaggagcccccaggcagccagcagcccctgcagagcctggaggaggaggaggatgagcaggaggaggaggaggaggaggaggaggaggaggaggagggggaggacagcggcaccagcgctgccagcagccccaccatcatgaggaagagcagcggcagcccagacagccagcactgtgccagtgatggcagcacagagaccctggccatggtggtggtggagcccggggacaccctgagcagccctgagtttgacagcggccccttcagcagccagagtgatgagaccagcctgagcaccacagccagcagcgccacccccaccagcgagctgctgcccctgggccctgtggatggccgcagctgcagcatggacagcgcctacggcaccctgagccccaccagcctgcaggactttgtggcccctggccccatggccgagctggtgccccgggcccctgagagcccccgggtgcccagccccccacccagcccccggctgcggcggaggacccctgtgcagctgctgagctgccccccccacctgctgaagagcaagtctgaggccagcctgctgcagctgctggccggggccggcacccacggcaccccatctgcccccagccgcagcctgtctgagctgtgcctggccgtgcctgcccctggcatccgcacccagggcagcccccaggaggccggccccagctgggactgccgcggggcccccagccctggcagcggccctggcctggtgggctgcctggccggggagcctgctggcagccacaggaagagatgtggggacctgcccagcggggccagcccccgggtgcagcctgagcccccacctggggtgtctgcccagcacaggaagctgaccctggcccagctgtaccgcatccgcaccaccctgctgctgaacagcaccctgacagccagcgaggtgtag

SEQ ID NO: 164389 - DNA, 2793 bp, synthetic construct; identical to SEQ ID NO: 164378
  misc_feature 1..2793: note = Description of Artificial Sequence: Synthetic coding sequence
  source 1..2793: mol_type = other DNA

SEQ ID NO: 164390 - DNA, 2373 bp, synthetic construct
  misc_feature 1..2373: note = Description of Artificial Sequence: Synthetic coding sequence
  source 1..2373: mol_type = other DNA
atgaaggccttcggcccccctcatgagggccccctgcagggcctggtggccagccgcatcgagacctatggaggccgccaccgggccagcgcccagagcacagctggccgcctgtacccccggggctaccctgtgctggaccccagcagaagaaggctgcagcagtatgtgccctttgcccggggcagcggccaggcccggggcctgagccccatgaggctgcgggaccctgagcctgagaagagacatggaggccacgtgggcgccggcctgctgcacagccccaagctgaaggagctgaccaaggcccacgagctggaggtgcggctgcacaccttctccatgtttggcatgccccggctgcccccagaggaccggcggcactgggagattggagagggcggggacagcggcctgaccatcgagaagtcctggagggagctggtgcccggccacaaggagatgagccaggagctgtgccaccagcaggaggccctgtgggagctgctgaccacagagctgatctacgtgaggaagctgaagatcatgacagacctgctggccgccggcctgctgaacctgcagagggtgggcctgctgatggaggtgtctgctgagaccctgtttggaaatgtgcccagcctcatccgcacccaccgctccttctgggatgaggtgctgggccccaccctggaggagacccgggccagcggccagcccctggaccccatcggcctgcagagcggcttcctgaccttcggccagcgcttccacccctacgtgcagtactgcctgcgggtgaagcagaccatggcctatgcccgggagcagcaggagaccaaccccctcttccacgcctttgtgcagtggtgtgagaagcacaagaggagcggccggcagatgctgtgtgacctgctgatcaagccccaccagaggatcaccaagtaccccctgctgctgcatgctgtgctgaagaggagccctgaggcccgggcccaggaggccctgaatgccatgattgaggccgtggagagcttcctgcggcacatcaatggccaggtgcggcagggcgaggagcaggagagcctggccgccgccgcccagagaattggcccctatgaggtgctggagcccccatctgatgaggtggagaagaacctgcggcccttcagcaccctggacctgaccagccccatgctgggcgtggccagcgagcacacccggcagctgctgctggagggccctgtgcgggtgaaggagggccgggagggcaagctggatgtgtacctgttcctgttcagtgatgtgctgctggtgaccaagccccagaggaaggctgacaaggccaaggtgatccggccccccctgatgctggagaagctggtgtgccagcccctgcgggaccccaacagcttcctgctgatccacctgacagagttccagtgtgtgtcctctgccctgctggtgcactgccccagccccacagaccgggcccagtggctggagaagacccagcaggcccaggccgccctgcagaagctgaaggccgaggagtatgtgcagcagaagcgggagctgctgaccctgtacagagaccaggaccgggagagccccagcacccggcccagcacccccagcctggagggcagccagagcagcgctgagggccgcaccccagagttcagcaccatcatcccccacctggtggtgacagaggacacagatgaagatgcccccctggtgcctgatgacaccagtgacagcggctacggcaccctcatccctggcacccccaccggcagccgcagccccctgagccggctgcggcagagggccctgcggcgggacccccggctgaccttcagcaccctggagctgcgggacatccccctgcggccccaccccccagacccccaggccccccagaggagaagtgcccctgagctgcctgagggcatcctgaagggcggcagcctgccccaggaggacccccccacctggagcgaggaggaggatggagccagcgagagaggaaatgtggtggtggagaccctgcaccgggcccggctgcggggccagctgcccagcagccccacccatgctgacagcgctggggagagcccctgggagagcagcggggaggaggaggaggagggccccctcttcctgaaggccggccacaccagcctgcggcccatgagagctgaggacatgctgcgggagatccgggaggagctggccagccagagaattgaaggagctgaggagccccgggacagccggcccaggaagctgacccgggcccagctgcagaggatgaggggcccccacatcatccagctggacacccccctgagcgccagcgaggtgtag

SEQ ID NO: 164391 - DNA, 963 bp, synthetic construct
  misc_feature 1..963: note = Description of Artificial Sequence: Synthetic coding sequence
  source 1..963: mol_type = other DNA
atgtgcccccgggagggcggccgggccagcaccatccaccagaagacagagaaggccttcggccagctgctgtgccagcccctgggggagcccaagatccagcaccccctgaaggccgccctgcagaagctgaaggccgaggagtatgtgcagcagaagcgggagctgctgaccctgtacagagaccaggaccgggagagccccagcacccggcccagcacccccagcctggagggcagccagagcagcgctgagggccgcaccccagagttcagcaccatcatcccccacctggtggtgacagaggacacagatgaagatgcccccctggtgcctgatgacaccagtgacagcggctacggcaccctcatccctggcacccccaccggcagccgcagccccctgagccggctgcggcagagggccctgcggcgggacccccggctgaccttcagcaccctggagctgcgggacatccccctgcggccccaccccccagacccccaggccccccagaggagaagtgcccctgagctgcctgagggcatcctgaagggcggcagcctgccccaggaggacccccccacctggagcgaggaggaggatggagccagcgagagaggaaatgtggtggtggagaccctgcaccgggcccggctgcggggccagctgcccagcagccccacccatgctgacagcgctggggagagcccctgggagagcagcggggaggaggaggaggagggccccctcttcctgaaggccggccacaccagcctgcggcccatgagagctgaggacatgctgcgggagatccgggaggagctggccagccagagaattgaaggagctgaggagccccgggacagccggcccaggaagctgacccgggcccagctgcagaggatgaggggcccccacatcatccagctggacacccccctgagcgccagcgaggtgtag

SEQ ID NO: 164392 - DNA, 2373 bp, synthetic construct; identical to SEQ ID NO: 164390
  misc_feature 1..2373: note = Description of Artificial Sequence: Synthetic coding sequence
  source 1..2373: mol_type = other DNA

SEQ ID NO: 164393 - DNA, 2277 bp, synthetic construct
  misc_feature 1..2277: note = Description of Artificial Sequence: Synthetic coding sequence
  source 1..2277: mol_type = other DNA
atgggctgccgcctgcacgcccctggagagaaggccgcccatgaccccagcagaagaaggctgcagcagtatgtgccctttgcccggggcagcggccaggcccggggcctgagccccatgaggctgcgggaccctgagcctgagaagagacatggaggccacgtgggcgccggcctgctgcacagccccaagctgaaggagctgaccaaggcccacgagctggaggtgcggctgcacaccttctccatgtttggcatgccccggctgcccccagaggaccggcggcactgggagattggagagggcggggacagcggcctgaccatcgagaagtcctggagggagctggtgcccggccacaaggagatgagccaggagctgtgccaccagcaggaggccctgtgggagctgctgaccacagagctgatctacgtgaggaagctgaagatcatgacagacctgctggccgccggcctgctgaacctgcagagggtgggcctgctgatggaggtgtctgctgagaccctgtttggaaatgtgcccagcctcatccgcacccaccgctccttctgggatgaggtgctgggccccaccctggaggagacccgggccagcggccagcccctggaccccatcggcctgcagagcggcttcctgaccttcggccagcgcttccacccctacgtgcagtactgcctgcgggtgaagcagaccatggcctatgcccgggagcagcaggagaccaaccccctcttccacgcctttgtgcagtggtgtgagaagcacaagaggagcggccggcagatgctgtgtgacctgctgatcaagccccaccagaggatcaccaagtaccccctgctgctgcatgctgtgctgaagaggagccctgaggcccgggcccaggaggccctgaatgccatgattgaggccgtggagagcttcctgcggcacatcaatggccaggtgcggcagggcgaggagcaggagagcctggccgccgccgcccagagaattggcccctatgaggtgctggagcccccatctgatgaggtggagaagaacctgcggcccttcagcaccctggacctgaccagccccatgctgggcgtggccagcgagcacacccggcagctgctgctggagggccctgtgcgggtgaaggagggccgggagggcaagctggatgtgtacctgttcctgttcagtgatgtgctgctggtgaccaagccccagaggaaggctgacaaggccaaggtgatccggccccccctgatgctggagaagctggtgtgccagcccctgcgggaccccaacagcttcctgctgatccacctgacagagttccagtgtgtgtcctctgccctgctggtgcactgccccagccccacagaccgggcccagtggctggagaagacccagcaggcccaggccgccctgcagaagctgaaggccgaggagtatgtgcagcagaagcgggagctgctgaccctgtacagagaccaggaccgggagagccccagcacccggcccagcacccccagcctggagggcagccagagcagcgctgagggccgcaccccagagttcagcaccatcatcccccacctggtggtgacagaggacacagatgaagatgcccccctggtgcctgatgacaccagtgacagcggctacggcaccctcatccctggcacccccaccggcagccgcagccccctgagccggctgcggcagagggccctgcggcgggacccccggctgaccttcagcaccctggagctgcgggacatccccctgcggccccaccccccagacccccaggccccccagaggagaagtgcccctgagctgcctgagggcatcctgaagggcggcagcctgccccaggaggacccccccacctggagcgaggaggaggatggagccagcgagagaggaaatgtggtggtggagaccctgcaccgggcccggctgcggggccagctgcccagcagccccacccatgctgacagcgctggggagagcccctgggagagcagcggggaggaggaggaggagggccccctcttcctgaaggccggccacaccagcctgcggcccatgagagctgaggacatgctgcgggagatccgggaggagctggccagccagagaattgaaggagctgaggagccccgggacagccggcccaggaagctgacccgggcccagctgcagaggatgaggggcccccacatcatccagctggacacccccctgagcgccagcgaggtgtag

SEQ ID NO: 164394 - DNA, 4482 bp, synthetic construct
  misc_feature 1..4482: note = Description of Artificial Sequence: Synthetic coding sequence
  source 1..4482: mol_type = other DNA
atggccgagctgtctgagcctgagggccctgtggactggaaggagcgctgtgtggccctggagagccagctgatgaagttccgggtgcaggccagcaagatccgggagctgctggccgagaagatgcagcagctggagcggcaggtgattgatgctgagcggcaggccgagaaggccttccagcaggtgcaggtgatggaggacaagctgaaggccgccaacatccagaccagcgagagcgagacccggctgtacaacaagtgccaggacctggagagcctcatccaggagaaggatgatgtgatccagaacctggagctgcagctggaggagcagaagcagatccgcatccaggaggccaagatcatcgaggagaaggccgccaagatcaaggagtgggtgacagtgaagctgaatgagctggagctggagaaccagaacctgcggctcatcaaccagaaccagacagaggagatccgcaccatgcagagcaagctgcaggaggtgcagggcaagaagagcagcacagtgtccaccctgaagctgtctgagggccagaggctgagcagcctgaccttcggctgcttcctgagccgggcccggagccccccccaggtggtgaagtctgaggagatgagcaagatcagcagcaaggagcctgagttcacagagggcaaggacatggaggagatggagatccctgagaagtctgtggacaaccaggtgctggagaacaacagaggccagaggaccctgcaccagaccccctgtggcagcgagcagaacaggaagaccaggaccagctttgccacagatggcggcatcagccagaacagcggggcccctgtgtctgactggagcagtgatgaagaagatggcagcaagggccgcagcaagagccgctgcaccagcaccctgagcagccacaccagcgaggagggcgtgcagtgcagcaggatgggcagcgagatgtacctgacagccagtgatgacagcagcagcatctttgaggaggagaccttcggcatcaagaggcctgagcacaagaagctgtacagctggcagcaggaggcccagtggaaggccctgaacagccccctgggcaaaggaaacagcgagctgagcaagaaggagcaggacagcagcagtgatgagctgaacaagaagttccagagccagaggctggactacagcagcagcagcagcgaggccaacacccccagccccatcctgaccccagccctgatgcccaagcaccccaacagcctgagcggcaagggcacccagctggtgcccagcagccacctgcccccacccaagctgcgcatccccaacgtgttcagcatctctgtggccctggccaagaggcacctgagccagccccagctgagcagtgacaggatgtttggcaccaacagaaatgccatctccatgatccggcccctgcggccccaggagacagacctggacctggtggatggagacagcacagaggtgctggagaacatggacaccagctgtgatgatggcctcttctcctatgacagcctggacagccccaacagtgatgaccaggagcactgtgacagcgccaagaaggtggcctacagcaagccacccaccccacccctgcaccgcttccccagctgggagagccgcatctatgctgtggccaagagcggcatccgcatgtctgaggccttcaacatggagagcgtgaacaagaacagcgctgccaccctgagctacaccaccagcggcctgtacaccagcctcatctacaagaacatgaccacccctgtgtacaccaccctgaagggcaaggccacccagatcagcagcagccccttcctggatgacagcagcggcagcgaggaggaggacagcagccgcagcagcagcaggaccagcgagagtgacagccgcagccgcagcggccctggcagcccccgggccatgaagaggggcgtgtccctgagctctgtggccagcgagagtgactatgccatccccccagatgcctacagcacagacacagagtacagccagcctgagcagaagctgcccaagacctgcagcagcagcagtgacaacgggaagaatgagcccctggagaagagcggctacctgctgaagatgtctgggaaggtgaagtcctggaagaggcgctggtttgtgctgaagggcggggagctgctgtactacaagagccccagtgatgtgatcaggaagccccagggccacatcgagctgagcgccagctgcagcatcctgcggggggacaacaagcagacagtgcagctgaccacagagaagcacacctactacctgacagctgacagccccaacatcctggaggagtggatcaaggtgctgcagaatgtgctgcgggtgcaggccgccaaccccctgagcctgcagcctgagggcaagcccaccatgaagggcctgctgaccaaggtgaagcacggctacagcaagagggtgtggtgcaccctcatcggcaagaccctgtactacttccgcagccaggaggacaagttccccctgggccagatcaagctgtgggaggccaaggtggaggaggtggacaggagctgtgacagtgatgaagattatgaggccagcggccgcagcctgctgagcacccactacaccatcgtcatccaccccaaggaccagggccccacctacctgctgattggcagcaagcatgagaaggacacctggctgtaccacctgactgtggccgccggcagcaacaacgtgaatgtgggcagcgagtttgagcagctggtgtgcaagctgctgaacattgatggagagcccagcagccagatctggaggcaccccaccctgtgccacagcaaggagggcatcatcagccccctgaccaccctgcccagcgaggccctgcagacagaggccatcaagctgttcaagacctgccagctgttcatcaatgctgctgtggacagccctgccatcgactaccacatcagcctggcccagagcgccctgcagatctgcctgacccaccctgagctgcagaatgagatctgctgccagctgatcaagcagacccggcggcggcagccccagaaccagcccggccccctgcagggctggcagctgctggccctgtgtgtgggcctcttcctgccccaccaccccttcctgtggctgctgcggctgcacctgaagagaaatgctgacagcaggacagaatttgggaagtatgccatctactgccagagatgtgtggagaggacccagcagaatggagaccgggaggcccggcccagcaggatggagatcctgagcaccctgctgaggaacccctaccaccacagcctgcccttcagcatccctgtgcacttcatgaatggcatctaccaggtggtgggctttgatgccagcaccaccgtggaggagttcctgaacaccctgaaccaggacaccggcatgaggaagccagcccagagcggctttgccctcttcacagatgaccccagcggccgggacctggagcactgcctgcagggcaacatcaagatctgtgacatcatcagcaagtgggagcaggccagcaaggagcagcagcccgggaaatgtgagggcaccaggacagtgcggctgacctacaagaacagactctacttctctgtgcaggcccggggggagacagaccgggagaagctgctgctgatgtaccagaccaatgaccagatcatcaatggcctcttccccctgaacaaggacctggccctggagatggccgccctgctgagccaggtggagatcggggactttgagcggcccttcagcaccccagctggccacgtgaccaaccagtgcaaggtgaaccagaccctgaagcaggtgattgagaagttctaccccaagcgctacagagatggctgcagcgaggagcagctgcggcagctgtgccagaggctgagcacccgctggatggccctgcggggccacagcgctgctgactgtgtgcgcatctacctgactgtggccaggaagtggcccttctttggagccaagctgttcctggccaagcccatcacccccagcagcctgggcagcaccttcctgtggctggccgtgcatgaagatggcctgagcctgctggagtacaacagcatgaggctgattgtgtcctatgtgtacaagagcctgatgaccttcggcggctaccaggatgacttcatggtggtgatcaacaacacccacagcaaggacaagcccacagagaagctgctgtttgccatggccaagcccaagatcctggagatcaccctgctgattgccagctacatcaacaacttccaccagcagaaggccgccttccaccacctgagcgccccagccctgctgagcgcccagacccggggcccccaggccaggatgatgggcagccagcccctgctgagcagcagccggcccaccaagggccccaccctgctgtag

SEQ ID NO: 164395 - DNA, 2904 bp, synthetic construct
  misc_feature 1..2904: note = Description of Artificial Sequence: Synthetic coding sequence
  source 1..2904: mol_type = other DNA
atggactggaccccccggctgcccagccgccacatcatcagcgagctggagcacctgacctttgtgaacacagatgtgggccgctgccgggcctggctgcggctggccctgaatgatggcctgatggagtgctacctgaagctgctgctgcaggagcaggcccggctgcacgagtactaccagcccacagccctgctgagagatgctgaggagggggagttcctgctgtccttcctgcagggcctgaccagcctgagctttgagctgagctacaagagcgccatcctgaatgagtggaccctgacccccctggccctgagcggcctgtgccccctgtctgagctggaccccctgagcaccagcggggctgagctgcagaggaaggagagcctggacagcatcagccacagcagcggctctgaagatattgaggtgcaccacagcggccacaagatcagaagaaaccagaagctgacagccagcagcctgagcctggacacagccagcagcagccagctgagctgcagcctgaacagcgacagctgcctgctgcaggagaatggcagcaagagcccagaccactgtgaggagcccatgagctgtgacagcgacctgggcacagccaatgcagaagattctgacaggagcctgcaggaggtgctgctggagttcagcaaggcccaggtgaacagcgtgcccaccaacggcctgagccaggagacagagatccccaccccccaggccagcctgagcctgcacggcctgaacaccagcacctacctgcactgtgaggccccagctgagcccctgcctgcccaggccgccagcggcacccaggatggagtgcacgtgcaggagccccggccccaggcccccagccccctggacctgcagcagcctgtggagagcaccagcggccagcagcccagcagcacagtgtctgaaacagcccgggaggtgggccagggcaatggcctgcagaaggcccaggcccatgatggagctggcctgaagctggtggtgagcagccccaccagccccaagaacaagtcctggatcagtgaagatgacttctaccggcccagccgggagcagcccctggagagcgccagtgaccaccccatcgccagctaccggggcaccccaggcagccggcccggcctgcaccgccacttcagccaggagcccaggaagaactgcagcctgggcgccctggaccaggcctgtgtgcccagccctggaagacggcaggcccaggccgcccccagccagggccacaagagcttccgggtggtgcaccggcggcagatgggcctgagcaaccccttccggggcctgatgaagctgggcaccgtggagcggcggggggccatgggcatctggaaggagctgttctgtgagctgagccccctggagttccggctgtacctgagcaatgaggagcacacctgtgtggagaactgcagcctgctgcgctgtgagagcgtgggccctgcccacagtgatggccgctttgagctggtgttcagcggcaagaagctggccctgcgggccagcagccaggatgaagctgaggactggctggacagagtgcgggaggccctgcagaaggtgcggccccagcaggaggatgagtgggtgaatgtgcagtacccagaccagcctgaggagcccccagaggccccccagggctgcctgagccccagcgacctgctgtctgagcctgctgccctgcagggcacccagtttgactggagcagcgcccaggtgcctgagccagatgccatcaaggagagcctgctgtacctgtacatggacaggacctggatgccctacatcttcagcctgagcctggaggccctgaagtgcttccgcatcagaaataatgagaagatgctgagtgacagccatggagtggagaccatccgggacatcctgcctgacaccagcctgggcggccccagcttcttcaagatcatcacagccaaggctgtgctgaagctgcaggccggaaatgctgaggaggccgccctgtggagggacctggtgaggaaggtgctggccagctacctggagacagctgaggaggccgtgaccctgggcggcagcctggatgagaactgccaggaggtgctgaagtttgccacccgggagaatggcttcctgctgcagtacctggtggccatccccatggagaagggcctggacagccagggctgcttctgtgccggctgcagccggcagatcggcttctcctttgtgcggcccaagctgtgtgccttcagcggcctgtactactgtgacatctgccaccaggatgatgccagcgtcatcccagcccgcatcatccacaactgggacctgaccaagaggcccatctgccggcaggccctgaagttcctgacccagatccgggcccagcccctcatcaacctgcagatggtgaatgccagcctgtatgagcacgtggagaggatgcacctgattggaagaagaagagagcagctgaagctgctgggggactacctgggcctgtgccgcagcggggccctgaaggagctgagcaagaggctgaaccacaggaactacctgctggagagcccccaccgcttctctgtggccgacctgcagcagattgctgatggagtgtatgagggcttcctgaaggccctgattgaatttgccagccagcacgtgtaccactgtgacctgtgcacccagaggggcttcatctgccagatctgccagcaccacgacatcatcttcccctttgaatttgacaccaccgtgcgctgtgccgagtgcaagacagtgttccaccagagctgccaggccgtggtgaagaagggctgcccccgctgtgcccggcggaggaagtaccaggagcagaacatctttgcctag

SEQ ID NO: 164396 - DNA, 3171 bp, synthetic construct
  misc_feature 1..3171: note = Description of Artificial Sequence: Synthetic coding sequence
  source 1..3171: mol_type = other DNA
atgctgtctgtggtggagaatggcctggacccccaggccgccatccctgtgatcaagaagaagctggtgggctctgtgaaggccctgcagaagcagtatgtgtccctggacacagtggtgaccagtgaagatggagatgccaacaccatgtgcagcgccctggaggccgtgttcatccacggcctgcacgccaagcacatccgggcagaggccggcggcaagaggaagaagagcgcccaccagaagcccctgccccagcctgtgttctggcccctgctgaaggctgtgacccacaagcacatcatcagcgagctggagcacctgacctttgtgaacacagatgtgggccgctgccgggcctggctgcggctggccctgaatgatggcctgatggagtgctacctgaagctgctgctgcaggagcaggcccggctgcacgagtactaccagcccacagccctgctgagagatgctgaggagggggagttcctgctgtccttcctgcagggcctgaccagcctgagctttgagctgagctacaagagcgccatcctgaatgagtggaccctgacccccctggccctgagcggcctgtgccccctgtctgagctggaccccctgagcaccagcggggctgagctgcagaggaaggagagcctggacagcatcagccacagcagcggcagcgaggacatcgaggtgcaccacagcggccacaagatcagaagaaaccagaagctgacagccagcagcctgagcctggacacagccagcagcagccagctgagctgcagcctgaacagcgacagctgcctgctgcaggagaatggcagcaagagcccagaccactgtgaggagcccatgagctgtgacagcgacctgggcacagccaatgctgaggacagcgacaggagcctgcaggaggtgctgctggagttcagcaaggcccaggtgaacagcgtgcccaccaacggcctgagccaggagacagagatccccaccccccaggccagcctgagcctgcacggcctgaacaccagcacctacctgcactgtgaggccccagctgagcccctgcctgcccaggccgccagcggcacccaggatggagtgcacgtgcaggagccccggccccaggcccccagccccctggacctgcagcagcctgtggagagcaccagcggccagcagcccagcagcacagtgtctgaaacagcccgggaggtgggccagggcaatggcctgcagaaggcccaggcccatgatggagctggcctgaagctggtggtgagcagccccaccagccccaagaacaagtcctggatcagtgaagatgacttctaccggcccagccgggagcagcccctggagagcgccagtgaccaccccatcgccagctaccggggcaccccaggcagcaggcctggcctgcaccgccacttcagccaggagcccaggaagaactgcagcctgggcgccctggaccaggcctgtgtgcccagccctggccggcggcaggcccaggccgcccccagccagggccacaagagcttccgggtggtgcaccggcggcagatgggcctgagcaaccccttccggggcctgatgaagctgggcaccgtggagaggagaggagccatgggcatctggaaggagctgttctgtgagctgagccccctggagttccggctgtacctgagcaatgaggagcacacctgtgtggagaactgcagcctgctgcgctgtgagagcgtgggccctgcccacagtgatggccgctttgagctggtgttttctgggaagaagctggccctgcgggccagcagccaggatgaagctgaggactggctggacagagtgcgggaggccctgcagaaggtgcggccccagcaggaggatgagtgggtgaatgtgcagtacccagaccagcctgaggagcccccagaggccccccagggctgcctgagccccagcgacctgctgtctgagcctgctgccctgcagggcacccagtttgactggagcagcgcccaggtgcctgagccagatgccatcaaggagagcctgctgtacctgtacatggacaggacctggatgccctacatcttcagcctgagcctggaggccctgaagtgcttccgcatccggaacaatgagaagatgctgagtgacagccacggcgtggagaccatccgggacatcctgcctgacaccagcctgggcggccccagcttcttcaagatcatcacagccaaggctgtgctgaagctgcaggccggaaatgctgaggaggccgccctgtggagggacctggtgaggaaggtgctggccagctacctggagacagctgaggaggccgtgaccctgggcggcagcctggatgagaactgccaggaggtgctgaagtttgccaccagagaaaatggcttcctgctgcagtacctggtggccatccccatggagaagggcctggacagccagggctgcttctgtgccggctgcagccggcagatcggcttctcctttgtgcggcccaagctgtgtgccttcagcggcctgtactactgtgacatctgccaccaggatgatgccagcgtcatcccagcccgcatcatccacaactgggacctgaccaagaggcccatctgccggcaggccctgaagttcctgacccagatccgggcccagcccctcatcaacctgcagatggtgaatgccagcctgtatgaacatgtggagaggatgcacctgattggaagaagaagagagcagctgaagctgctgggggactacctgggcctgtgccgcagcggggccctgaaggagctgagcaagaggctgaaccacaggaactacctgctggagagcccccaccgcttctctgtggccgacctgcagcagattgctgatggagtgtatgagggcttcctgaaggccctgattgaatttgccagccagcacgtgtaccactgtgacctgtgcacccagaggggcttcatctgccagatctgccagcaccacgacatcatcttcccctttgaatttgacaccaccgtgcgctgtgccgagtgcaagacagtgttccaccagagctgccaggccgtggtgaagaagggctgcccccgctgtgcccggcggaggaagtaccaggagcagaacatctttgcctag

SEQ ID NO: 164397 - DNA, 3003 bp, synthetic construct
  misc_feature 1..3003: note = Description of Artificial Sequence: Synthetic coding sequence
  source 1..3003: mol_type = other DNA
atggtggagtgctttgaaagtggcggcacccggctgagcctgagcagcttcaacgtgtcctgtgacagcctgcgggagcagctgcgggagtggcgctgcttccagtggtggaggatggactggaccccccggctgcccagccgccacatcatcagcgagctggagcacctgacctttgtgaacacagatgtgggccgctgccgggcctggctgcggctggccctgaatgatggcctgatggagtgctacctgaagctgctgctgcaggagcaggcccggctgcacgagtactaccagcccacagccctgctgagagatgctgaggagggggagttcctgctgtccttcctgcagggcctgaccagcctgagctttgagctgagctacaagagcgccatcctgaatgagtggaccctgacccccctggccctgagcggcctgtgccccctgtctgagctggaccccctgagcaccagcggggctgagctgcagaggaaggagagcctggacagcatcagccacagcagcggctctgaagatattgaggtgcaccacagcggccacaagatcagaagaaaccagaagctgacagccagcagcctgagcctggacacagccagcagcagccagctgagctgcagcctgaacagcgacagctgcctgctgcaggagaatggcagcaagagcccagaccactgtgaggagcccatgagctgtgacagcgacctgggcacagccaatgcagaagattctgacaggagcctgcaggaggtgctgctggagttcagcaaggcccaggtgaacagcgtgcccaccaacggcctgagccaggagacagagatccccaccccccaggccagcctgagcctgcacggcctgaacaccagcacctacctgcactgtgaggccccagctgagcccctgcctgcccaggccgccagcggcacccaggatggagtgcacgtgcaggagccccggccccaggcccccagccccctggacctgcagcagcctgtggagagcaccagcggccagcagcccagcagcacagtgtctgaaacagcccgggaggtgggccagggcaatggcctgcagaaggcccaggcccatgatggagctggcctgaagctggtggtgagcagccccaccagccccaagaacaagtcctggatcagtgaagatgacttctaccggcccagccgggagcagcccctggagagcgccagtgaccaccccatcgccagctaccggggcaccccaggcagccggcccggcctgcaccgccacttcagccaggagcccaggaagaactgcagcctgggcgccctggaccaggcctgtgtgcccagccctggaagacggcaggcccaggccgcccccagccagggccacaagagcttccgggtggtgcaccggcggcagatgggcctgagcaaccccttccggggcctgatgaagctgggcaccgtggagcggcggggggccatgggcatctggaaggagctgttctgtgagctgagccccctggagttccggctgtacctgagcaatgaggagcacacctgtgtggagaactgcagcctgctgcgctgtgagagcgtgggccctgcccacagtgatggccgctttgagctggtgttcagcggcaagaagctggccctgcgggccagcagccaggatgaagctgaggactggctggacagagtgcgggaggccctgcagaaggtgcggccccagcaggaggatgagtgggtgaatgtgcagtacccagaccagcctgaggagcccccagaggccccccagggctgcctgagccccagcgacctgctgtctgagcctgctgccctgcagggcacccagtttgactggagcagcgcccaggtgcctgagccagatgccatcaaggagagcctgctgtacctgtacatggacaggacctggatgccctacatcttcagcctgagcctggaggccctgaagtgcttccgcatcagaaataatgagaagatgctgagtgacagccatggagtggagaccatccgggacatcctgcctgacaccagcctgggcggccccagcttcttcaagatcatcacagccaaggctgtgctgaagctgcaggccggaaatgctgaggaggccgccctgtggagggacctggtgaggaaggtgctggccagctacctggagacagctgaggaggccgtgaccctgggcggcagcctggatgagaactgccaggaggtgctgaagtttgccacccgggagaatggcttcctgctgcagtacctggtggccatccccatggagaagggcctggacagccagggctgcttctgtgccggctgcagccggcagatcggcttctcctttgtgcggcccaagctgtgtgccttcagcggcctgtactactgtgacatctgccaccaggatgatgccagcgtcatcccagcccgcatcatccacaactgggacctgaccaagaggcccatctgccggcaggccctgaagttcctgacccagatccgggcccagcccctcatcaacctgcagatggtgaatgccagcctgtatgagcacgtggagaggatgcacctgattggaagaagaagagagcagctgaagctgctgggggactacctgggcctgtgccgcagcggggccctgaaggagctgagcaagaggctgaaccacaggaactacctgctggagagcccccaccgcttctctgtggccgacctgcagcagattgctgatggagtgtatgagggcttcagccccaaggtgcccagcgaggccgccggcctgcggccctggggcgcccggagccctgaggccgccagcgccttccgctgcatcgacagcagccggctgcccagcctgaggaaggtggtgcccaccctcttcctgaagtgctacttcatgcagtacacagtgcccagcgagcagggcagcggccctgaggagagcctgcagtgcatcgagggcattgctgctgtgtag

SEQ ID NO: 164398 - DNA, 5466 bp, synthetic construct
  misc_feature 1..5466: note = Description of Artificial Sequence: Synthetic coding sequence
  source 1..5466: mol_type = other DNA
atgagctgtgagaggaagggcctgtctgagctgcggtctgagctgtacttcctgattgcccgcttcctggaggatggcccctgccagcaggccgcccaggtgctgatccgggaggtggccgagaaggagctgctgcccaggagaacagactggacaggcaaggagcaccccaggacctaccagaacctggtgaagtactaccgccacctggccccagaccacctgctgcagatctgccaccggctgggccccctgctggagcaggagatcccccagagcgtgcctggggtgcagaccctgctgggcgccggccggcagagcctgctgcggaccaacaagagctgcaagcacgtggtgtggaagggcagcgccctggccgccctgcactgcggccggcccccagagagccctgtgaactacggcagccccccatccattgctgacaccctcttcagcaggaagctgaatggcaagtaccgcctggagcggctggtgcccacagctgtgtaccagcacatgaagatgcacaagaggatcctgggccacctgagctctgtgtactgtgtgacctttgacagaacaggccgccgcatcttcaccggcagtgatgactgcctggtgaagatctgggccacagatgatggccgcctgctggccaccctgcggggccatgctgctgagatcagtgacatggctgtgaactatgagaacaccatgattgctgctggcagctgtgacaagatgatccgggtgtggtgcctgcggacctgtgcccccctggccgtgctgcagggccacagcgccagcatcaccagcctgcagttcagccccctgtgcagcggcagcaagcgctacctgagcagcactggagcagatggcaccatctgcttctggctgtgggatgctggcaccctgaagatcaaccccaggcctgccaagttcacagagcggcccaggcctggggtgcagatgatctgcagcagcttctctgctgggggcatgttcctggccaccggcagcacagaccacatcatccgggtgtacttcttcggcagcggccagcctgagaagatcagcgagctggagttccacacagacaaggtggacagcatccagttcagcaacaccagcaacagatttgtgtctggcagcagagatggaacagcccgcatctggcagttcaagaggcgggagtggaagagcatcctgctggacatggccaccaggcctgctggccagaacctgcagggcatcgaggacaagatcaccaagatgaaggtgaccatggtggcctgggacagacatgacaacacagtcatcacagctgtgaacaacatgaccctgaaggtgtggaacagctacacaggccagctgatccacgtgctgatgggccatgaagatgaggtgtttgtgctggagccccacccctttgacccccgggtgctcttctctgctggccatgatggaaatgtcatcgtgtgggacctggcccggggcgtgaagatccgcagctacttcaacatgattgagggccagggccacggggctgtgtttgactgcaagtgcagcccagatggccagcactttgcctgcacagacagccacggccacctgctgatctttggatttggcagcagcagcaaatatgacaagattgctgaccagatgttcttccacagcgactaccggcccctcatcagagatgccaacaactttgtgctggatgagcagacccagcaggccccccacctgatgcccccacccttcctggtggatgtggatggcaacccccaccccagccgctaccagaggctggtgcccggccgggagaactgccgggaggagcagctgatcccccagatgggcgtgaccagcagcggcctgaaccaggtgctgagccagcaggccaaccaggagatcagccccctggacagcatgatccagaggctgcagcaggagcaggacctgcggcgctctggagaggccgtcatcagcaacaccagccggctgagccggggcagcatcagcagcaccagcgaggtgcacagcccccccaacgtgggcctgcggcgcagcggccagattgaaggagtgcggcagatgcacagcaatgcccccaggtctgagatcgccacagagcgggacctggtggcctggagcagaagagtggtggtgcctgagctgtctgctggggtggccagccggcaggaggagtggaggacagccaagggggaggaggagatcaagacctacagaagtgaggagaagaggaagcacctgactgtgcccaaggagaacaagatccccaccgtgtccaagaaccacgcccacgagcacttcctggacctgggggagagcaagaagcagcagaccaaccagcacaactaccgcaccaggtctgccctggaggagaccccccggcccagcgaggagattgaaaatggcagcagcagcagtgatgaaggagaggtggtggccgtgtctgggggcaccagcgaggaggaggagcgggcctggcacagtgatggcagcagcagtgactacagcagtgactacagcgactggacagcagatgctggcatcaacctgcagccccccaagaaggtgcccaagaacaagaccaagaaggccgagagcagcagtgatgaggaggaggagagcgagaagcagaagcagaagcagatcaagaaggagaagaagaaggtgaatgaggagaaggatggccccatcagccccaagaagaagaagcccaaggagaggaagcagaagaggctggccgtgggggagctgacagaaaatggcctgaccctggaggagtggctgcccagcacctggatcacagacaccatcccccggcgctgcccctttgtgccccagatgggagatgaggtgtactacttccggcagggccacgaggcctacgtggagatggccaggaagaacaagatctacagcatcaaccccaagaagcagccctggcacaagatggagctgcgggagcaggagctgatgaagatcgtgggcatcaagtatgaggtgggcctgcccaccctgtgctgcctgaagctggccttcctggaccctgacaccgggaagctgaccggcggcagcttcaccatgaagtaccatgacatgccagatgtgattgacttcctggtgctgcggcagcagtttgatgatgccaagtaccgccgctggaacatcggggaccgcttccgctctgtgattgatgatgcctggtggtttggcaccatcgagagccaggagcccctgcagctggagtacccagacagcctcttccagtgctacaacgtgtgctgggacaatggagacacagagaagatgagcccctgggacatggagctgatccccaacaatgctgtgtttcctgaggagctgggcacctctgtgcccctgacagatggagaatgtcgcagcctcatctacaagcccctggatggagagtggggcaccaaccccagagatgaggagtgtgagcgcatcgtggccggcatcaaccagctgatgaccctggacatcgccagcgcctttgtggcccctgtggacctgcaggcctaccccatgtactgcaccgtggtggcctaccccacagacctgagcaccatcaagcagaggctggagaaccgcttctacagaagagtgagcagcctgatgtgggaggtgcgctacatcgagcacaacaccaggaccttcaatgaacctggcagccccatcgtgaagagcgccaagtttgtgacagacctgctgctgcacttcatcaaggaccagacctgctacaacatcatccccctgtacaacagcatgaagaagaaggtgctgagtgacagtgaagatgaggagaaggatgctgatgtgcccggcaccagcaccaggaagaggaaggaccaccagccccggcggcggctgaggaacagagcccagagctatgacatccaggcctggaagaagcagtgtgaggagctgctgaacctgatcttccagtgtgaggacagcgagcccttccggcagcctgtggacctgctggagtacccagactacagagacatcatcgacacccccatggactttgccaccgtgcgggagaccctggaggccggcaactatgagagccccatggagctgtgcaaggatgtgcggctcatcttcagcaacagcaaggcctacacccccagcaagaggagccgcatctacagcatgagcctgcggctgagcgccttctttgaggagcacatcagctctgtgctgagtgactacaagagcgccctgcgcttccacaagaggaacaccatcaccaagaggaggaagaagaggaacagaagcagctctgtgagcagcagcgctgccagcagccctgagaggaagaagaggatcctgaagccccagctgaagtctgagagcagcaccagcgccttcagcacccccaccaggagcatcccccccaggcacaatgctgcccagatcaatggcaagacagagagcagctctgtggtgaggaccaggagcaacagagtggtggtggaccctgtggtgacagagcagcccagcaccagcagcgctgccaagaccttcatcaccaaggccaatgccagcgccatccctgggaagaccatcctggagaacagcgtgaagcacagcaaggccctgaacaccctgagcagccctggccagagcagcttcagccacggcaccaggaacaacagcgccaaggagaacatggagaaggagaagcctgtgaagaggaagatgaagagctctgtgctgcccaaggccagcaccctgagcaagagcagcgctgtgattgagcagggcgactgcaagaacaatgccctggtgcccggcaccatccaggtgaatggacatggaggccagcccagcaagctggtgaagaggggccctggcaggaagcccaaggtggaggtgaacaccaacagcggggagatcatccacaagaagaggggcaggaagcccaagaagctgcagtatgccaagccagaggacctggagcagaacaacgtgcaccccatcagagatgaggtgctgcccagcagcacctgcaacttcctgtctgagaccaacaacgtgaaggaggacctgctgcagaagaagaacagaggaggcaggaagcccaagaggaagatgaagacccagaagctggatgctgacctgctggtgcctgcctctgtgaaggtgctgcggcgcagcaacaggaagaagattgatgaccccattgatgaggaggaggagtttgaggagctgaagggcagcgagccccacatgaggaccaggaaccagggcagaagaacagccttctacaatgaagatgattctgaggaggagcagaggcagctgctgtttgaggacaccagcctgaccttcggcaccagcagccggggccgggtgaggaagctgacagagaaggccaaggccaacctgattggctggtag

SEQ ID NO: 164399 - DNA, 1197 bp, synthetic construct
  misc_feature 1..1197: note = Description of Artificial Sequence: Synthetic coding sequence
  source 1..1197: mol_type = other DNA
atgaagaagaaggtgctgagtgacagtgaagatgaggagaaggatgctgatgtgcccggcaccagcaccaggaagaggaaggaccaccagccccggcggcggctgaggaacagagcccagagctatgacatccaggcctggaagaagcagtgtgaggagctgctgaacctgatcttccagtgtgaggacagcgagcccttccggcagcctgtggacctgctggagtacccagactacagagacatcatcgacacccccatggactttgccaccgtgcgggagaccctggaggccggcaactatgagagccccatggagctgtgcaaggatgtgcggctcatcttcagcaacagcaaggcctacacccccagcaagaggagccgcatctacagcatgagcctgcggctgagcgccttctttgaggagcacatcagctctgtgctgagtgactacaagagcgccctgcgcttccacaagaggaacaccatcaccaagaggaggaagaagaggaacagaagcagctctgtgagcagcagcgctgccagcagccctgagaggaagaagaggatcctgaagccccagctgaagtctgagagcagcaccagcgccttcagcacccccaccaggagcatcccccccaggcacaatgctgcccagatcaatggcaagacagagagcagctctgtggtgaggaccaggagcaacagagtggtggtggaccctgtggtgacagagcagcccagcaccagcagcgctgccaagaccttcatcaccaaggccaatgccagcgccatccctgggaagaccatcctggagaacagcgtgaagcacagcaaggccctgaacaccctgagcagccctggccagagcagcttcagccacggcaccaggaacaacagcgccaaggagaacatggagaaggagaagcctgtgaagaggaagatgaagagctctgtgctgcccaaggccagcaccctgagcaagagcagcgctgtgattgagcagggcgactgcaagaacaatgccctggtgcccggcaccatccaggtgaatggacatggaggccagcccagcaagctggtgaagaggggccctggcaggaagcccaaggtggaggtgaacatcgtggtgaagctgtacaccaggaaaggagtggagagccccaagagctacagcatgcagagccagaagatctag

SEQ ID NO: 164400 - DNA, 1206 bp, synthetic construct
  misc_feature 1..1206: note = Description of Artificial Sequence: Synthetic coding sequence
  source 1..1206: mol_type = other DNA
atgaggcgggccccagctgctgagcggctgctggagctgggcttccccccaagatgtggccggcaggagccccccttccccctgggcgtgacccggggctggggccgctggcccatccagaagaggcgggagggcgcccggcctgtgcccttcagcgagaggagccaggaggatggccggggccctgctgcccggagcagcggcaccctgtggaggatccgcacccggctgagcctgtgccgggaccctgagcccccaccacccctgtgcctgctgcgggtgtccctgctgtgtgccctgcgggccggcggccggggcagccgctggggagaagatggagcccggctgctgctgctgcccccagcccgggctgctggaaatggagaggccgagcccagcggcggccccagctatgccggccgcatgctggagagcagcggctgcaaggccctgaaggagggcgtgctggagaagagaagtgatggcctgctgcagctgtggaagaagaagtgctgcatcctgacagaggagggcctgctgctgatcccccccaagcagctgcagcaccagcagcagcagcagcagcagcagcagcagcagcagcagcagcagcccggccagggccctgctgagcccagccagcccagcggccctgctgtggccagcctggagccccctgtgaagctgaaggagctgcacttcagcaacatgaagacagtggactgtgtggagaggaagggcaagtacatgtacttcaccgtggtgatggccgagggcaaggagattgacttccgctgcccccaggaccagggctggaatgctgagatcaccctgcagatggtgcagtacaagaaccggcaggccatcctggccgtgaagagcacccggcagaagcagcagcacctggtgcagcagcagccccccagccagccccagccccagccccagctgcagccccagccccagccccagccccagccccagccccagccccagagccagccccagccccagccccagcccaagccccagccccagcagctgcacccctacccccacccccacccccacccccacagccacccccacagccacccccacccccacccccacccccacccccaccagatcccccacccccacccccagccccacagccagccccacggccaccggctgctgcggagcaccagcaacagcgcctag

SEQ ID NO: 164401 - DNA, 660 bp, synthetic construct
  misc_feature 1..660: note = Description of Artificial Sequence: Synthetic coding sequence
  source 1..660: mol_type = other DNA
atgctggagagcagcggctgcaaggccctgaaggagggcgtgctggagaagagaagtgatggcctgctgcagctgtggaagaagaagtgctgcatcctgacagaggagggcctgctgctgatcccccccaagcagctgcagcaccagcagcagcagcagcagcagcagcagcagcagcagcagcagcagcccggccagggccctgctgagcccagccagcccagcggccctgctgtggccagcctggagccccctgtgaagctgaaggagctgcacttcagcaacatgaagacagtggactgtgtggagaggaagggcaagtacatgtacttcaccgtggtgatggccgagggcaaggagattgacttccgctgcccccaggaccagggctggaatgctgagatcaccctgcagatggtgcagtacaagaaccggcaggccatcctggccgtgaagagcacccggcagaagcagcagcacctggtgcagcagcagctgcacccctacccccacccccacccccacccccacagccacccccacagccacccccacccccacccccacccccacccccaccagatcccccacccccacccccagccccacagccagccccacggccaccggctgctgcggagcaccagcaacagcgcctag

SEQ ID NO: 164402 - DNA, 459 bp, synthetic construct
  misc_feature 1..459: note = Description of Artificial Sequence: Synthetic coding sequence
  source 1..459: mol_type = other DNA
atgaagagcccagatgaggtgctgcgggagggggagctggagaagagaagtgacagcctcttccagctgtggaagaagaagaggggcgtgctgaccagtgaccggctgagcctcttccctgccagcccccgggcccggcccaaggagctgcgcttccacagcatcctgaaggtggactgtgtggagaggacaggcaagtatgtgtacttcaccatcgtgaccacagaccacaaggagattgacttccgctgtgccggggagagctgctggaatgctgccatcgccctggccctgattgacttccagaacagaagagccctgcaggacttccgcagccggcaggagaggacagccccagctgccccagcagaagatgctgtggccgctgctgctgctgcccccagcgagcccagcgagcccagccggcccagcccccagcccaagcccaggaccccctag

SEQ ID NO: 164403 - DNA, 3960 bp, synthetic construct
  misc_feature 1..3960: note = Description of Artificial Sequence: Synthetic coding sequence
  source 1..3960: mol_type = other DNA
atggatgccctgaacagaaaccagatcggccctggctgccagacccagaccatggtgcagaagggccccctggacctgattgaaacaggcaagggcctgaaggtgcagacagacaagccccacctggtgtccctgggcagcggccgcctgagcacagccatcaccctgctgcccctggaggagggccgcaccgtcatcggcagcgctgcccgggacatcagcctgcagggccctggcctggcccctgagcactgctacatcgagaacctgcggggcaccctgaccctgtacccctgtggaaatgcctgcaccattgatggcctgcctgtgcggcagcccacccggctgacccagggctgcatgctgtgcctgggccagagcaccttcctgcgcttcaaccaccctgctgaggccaagtggatgaagtccatgatcccagctgggggccgggcccctggccccccctacagccctgtgcctgctgagagcgagagcctggtgaatggaaaccacaccccccagacagccacccggggccccagcgcctgtgccagccacagcagcctggtgagcagcattgagaaggacctgcaggagatcatggacagcctggtgctggaggagcctggagctgctgggaagaagccagctgccaccagccccctgagccccatggccaatggaggccgctacctgctgagcccccccaccagccctggggccatgtctgtgggcagcagctatgagaacaccagccctgccttcagccccctgagcagccctgccagcagcggcagctgtgccagccacagccccagcggccaggagcccggccccagcgtgccccccctggtgcctgcccggagcagcagctaccacctggccctgcagcccccccagagccggcccagcggggcccggtctgagagcccccggctgagcaggaagggcggccacgagcggccccccagccctggcctgcggggcctgctgacagacagccctgctgccaccgtgctggccgaggcccggcgggccacagagagcccccggctgggcggccagctgcctgtggtggccatcagcctgtctgagtacccagccagcggggccctgagccagcccaccagcatccctggcagccccaagttccagccccctgtgcctgcccccaggaacaagattggcaccctgcaggaccggccccccagccccttccgggagcccccaggcagcgagcgggtgctgaccaccagccccagccggcagctggtgggccgcaccttcagtgatggcctggccaccaggaccctgcagcccccagagagcccccggctgggccggcggggcctggacagcatgagggagctgccccccctgagccccagcctgagccggcgggccctgagccccctgcccaccaggaccaccccagaccccaagctgaaccgggaggtggccgagagcccccggccccggcgctgggccgcccacggggccagccctgaggacttcagcctgaccctgggcgcccggggccgccgcaccaggagccccagccccaccctgggggagagcctggccccccacaagggcagcttcagcggccgcctgagccctgcctacagcctgggcagcctgaccggggccagcccctgccagagcccctgtgtgcagaggaagctgagcagcggggacctgcgggtgcctgtgacccgggagaggaagaacagcatcacagagatcagtgacaatgaagatgacctgctggagtaccaccggcggcagaggcaggagcggctgcgggagcaggagatggagcggctggagcggcagaggctggagaccatcctgaacctgtgtgccgagtacagcagagcagatggcggccctgaggccggggagctgcccagcattggagaggccacagctgccctggccctggccggcagaagacccagccggggcctggccggggccagcggccgcagcagcgaggagcccggggtggccacccagaggctgtgggagagcatggagaggagtgatgaggagaacctgaaggaggagtgcagcagcacagagagcacccagcaggagcatgaagatgcccccagcaccaagctgcagggcgaggtgctggccctggaggaggagcgggcccaggtgctgggccacgtggagcagctgaaggtgcgggtgaaggagctggagcagcagctgcaggagagcgcccgggaggccgagatggagcgggccctgctgcagggcgagcgggaggccgagcgggccctgctgcagaaggagcagaaggctgtggaccagctgcaggagaagctggtggccctggagaccggcatccagaaggagcgggacaaggaggccgaggccctggagacagagaccaagctgtttgaggacctggagttccagcagctggagcgggagagccgggtggaggaggagcgggagctggccggccagggcctgctgcggagcaaggccgagctgctgcggagcatcgccaagaggaaggagcggctggccatcctggacagccaggccggccagatccgggcccaggccgtgcaggagagcgagcggctggcccgggacaagaatgccagcctgcagctgctgcagaaggagaaggagaagctgactgtgctggagcggcgctaccacagcctgaccggcggccggcccttccccaagaccaccagcaccctgaaggaggtgtaccgcagcaagatggatggagaggccaccagccccctgcccaggaccaggagcggccccctgcccagcagcagcggcagcagcagcagcagcagccagctgtctgtggccaccctgggccgcagccccagccccaagagcgccctgctgacccagaatggcaccggcagcctgcccaggaacctggccgccaccctgcaggacatcgagaccaagaggcagctggccctgcagcagaagggccagcaggtgattgaggagcagaggcggcggctggccgagctgaagcagaaggctgctgctgaggcccagtgccagtgggatgccctgcacggggccgcccccttccctgctggccccagcggcttcccccccctgatgcaccacagcatcctgcaccacctgcctgctggccgggagcggggggaggagggggagcacgcctatgacaccctgagcctggagagcagtgacagcatggagaccagcatcagcactggaggcaacagcgcctgcagcccagacaacatgagcagcgccagcggcctggacatgggcaagattgaggagatggagaagatgctgaaggaggcccatgctgagaagaaccggctgatggagagccgggagcgggagatggagctgcggcggcaggccctggaggaggagaggagaagaagagagcaggtggagcggcggctgcagagcgagagcgcccggcggcagcagctggtggagaaggaggtgaagatgagggagaagcagttcagccaggcccggcccctgacccgctacctgcccatcaggaaggaggactttgacctgaagacccacatcgagagcagcggccatggagtggacacctgcctgcacgtggtgctgagcagcaaggtgtgccggggctacctggtgaagatgggcggcaagatcaagtcctggaagaagcgctggtttgtgtttgaccggctgaagaggaccctgagctactacgtggacaagcatgagaccaagctgaagggcgtcatctacttccaggccatcgaggaggtgtactatgaccacctgcggtctgctgccaagagccccaacccagccctgaccttctgtgtgaagacccatgaccggctgtactacatggtggcccccagcgctgaggccatgaggatctggatggatgtgattgtgactggagctgagggctacacccagttcatgaactag

SEQ ID NO: 164404 - DNA, 2193 bp, synthetic construct
  misc_feature 1..2193: note = Description of Artificial Sequence: Synthetic coding sequence
  source 1..2193: mol_type = other DNA
atggagaggagtgatgaggagaacctgaaggaggagtgcagcagcacagagagcacccagcaggagcatgaagatgcccccagcaccaagctgcagggcgaggtgctggccctggaggaggagcgggcccaggtgctgggccacgtggagcagctgaaggtgcgggtgaaggagctggagcagcagctgcaggagagcgcccgggaggccgagatggagcgggccctgctgcagggcgagcgggaggccgagcgggccctgctgcagaaggagcagaaggctgtggaccagctgcaggagaagctggtggccctggagaccggcatccagaaggagcgggacaaggagcgggcagagctggccgccggccgccgccacctggcccggcaggccctgtatgcagagctgcagacccagctggacaactgcccagagagcgtgcgggagcagctgcaggagcagctgcggcgggaggccgaggccctggagacagagaccaagctgtttgaggacctggagttccagcagctggagcgggagagccgggtggaggaggagcgggagctggccggccagggcctgctgcggagcaaggccgagctgctgcggagcatcgccaagaggaaggagcggctggccatcctggacagccaggccggccagatccgggcccaggccgtgcaggagagcgagcggctggcccgggacaagaatgccagcctgcagctgctgcagaaggagaaggagaagctgactgtgctggagcggcgctaccacagcctgaccggcggccggcccttccccaagaccaccagcaccctgaaggagatggagaagctgctgctgcctgctgtggacctggagcagtggtaccaggagctgatggccggcctgggcaccggccctgctgctgccagcccccacagcagccccccacccctgcctgccaaggccagccggcagctgcaggtgtaccgcagcaagatggatggagaggccaccagccccctgcccaggaccaggagcggccccctgcccagcagcagcggcagcagcagcagcagcagccagctgtctgtggccaccctgggccgcagccccagccccaagagcgccctgctgacccagaatggaacaggcagcctgcccaggaacctggccgccaccctgcaggacatcgagaccaagaggcagctggccctgcagcagaagggccagcaggtgattgaggagcagaggcggcggctggccgagctgaagcagaaggctgctgctgaggcccagtgccagtgggatgccctgcatggagctgcccccttccctgctggccccagcggcttcccccccctgatgcaccacagcatcctgcaccacctgcctgctggccgggagcggggggaggagggggagcacgcctatgacaccctgagcctggagagcagtgacagcatggagaccagcatcagcactggaggcaacagcgcctgcagcccagacaacatgagcagcgccagcggcctggacatgggcaagattgaggagatggagaagatgctgaaggaggcccacgccgagaagaaccggctgatggagagccgggagcgggagatggagctgcggcggcaggccctggaggaggagaggagaagaagagagcaggtggagcggcggctgcagagcgagagcgcccggcggcagcagctggtggagaaggaggtgaagatgagggagaagcagttcagccaggcccggcccctgacccgctacctgcccatcagaaaagaagattttgacctgaagacccacatcgagagcagcggccacggcgtggacacctgcctgcacgtggtgctgagcagcaaggtgtgccggggctacctggtgaagatgggcggcaagatcaagtcctggaagaagcgctggtttgtgtttgaccggctgaagaggaccctgagctactacgtggacaagcatgagaccaagctgaagggcgtcatctacttccaggccatcgaggaggtgtactatgaccacctgcggtctgctgccaagagccccaacccagccctgaccttctgtgtgaagacccatgaccggctgtactacatggtggcccccagcgctgaggccatgaggatctggatggatgtgattgtgactggagctgagggctacacccagttcatgaactag

SEQ ID NO: 164405 - DNA, 4134 bp, synthetic construct
  misc_feature 1..4134: note = Description of Artificial Sequence: Synthetic coding sequence
  source 1..4134: mol_type = other DNA
atggatgccctgaacagaaaccagatcggccctggctgccagacccagaccatggtgcagaagggccccctggacctgattgaaacaggcaagggcctgaaggtgcagacagacaagccccacctggtgtccctgggcagcggccgcctgagcacagccatcaccctgctgcccctggaggagggccgcaccgtcatcggcagcgctgcccgggacatcagcctgcagggccctggcctggcccctgagcactgctacatcgagaacctgcggggcaccctgaccctgtacccctgtggaaatgcctgcaccattgatggcctgcctgtgcggcagcccacccggctgacccagggctgcatgctgtgcctgggccagagcaccttcctgcgcttcaaccaccctgctgaggccaagtggatgaagtccatgatcccagctgggggccgggcccctggccccccctacagccctgtgcctgctgagagcgagagcctggtgaatggaaaccacaccccccagacagccacccggggccccagcgcctgtgccagccacagcagcctggtgagcagcattgagaaggacctgcaggagatcatggacagcctggtgctggaggagcctggagctgctgggaagaagccagctgccaccagccccctgagccccatggccaatggaggccgctacctgctgagcccccccaccagccctggggccatgtctgtgggcagcagctatgagaacaccagccctgccttcagccccctgagcagccctgccagcagcggcagctgtgccagccacagccccagcggccaggagcccggccccagcgtgccccccctggtgcctgcccggagcagcagctaccacctggccctgcagcccccccagagccggcccagcggggcccggtctgagagcccccggctgagcaggaagggcggccacgagcggccccccagccctggcctgcggggcctgctgacagacagccctgctgccaccgtgctggccgaggcccggcgggccacagagagcccccggctgggcggccagctgcctgtggtggccatcagcctgtctgagtacccagccagcggggccctgagccagcccaccagcatccctggcagccccaagttccagccccctgtgcctgcccccaggaacaagattggcaccctgcaggaccggccccccagccccttccgggagcccccaggcagcgagcgggtgctgaccaccagccccagccggcagctggtgggccgcaccttcagtgatggcctggccaccaggaccctgcagcccccagagagcccccggctgggccggcggggcctggacagcatgagggagctgccccccctgagccccagcctgagccggcgggccctgagccccctgcccaccaggaccaccccagaccccaagctgaaccgggaggtggccgagagcccccggccccggcgctgggccgcccacggggccagccctgaggacttcagcctgaccctgggcgcccggggccgccgcaccaggagccccagccccaccctgggggagagcctggccccccacaagggcagcttcagcggccgcctgagccctgcctacagcctgggcagcctgaccggggccagcccctgccagagcccctgtgtgcagaggaagctgagcagcggggacctgcgggtgcctgtgacccgggagaggaagaacagcatcacagagatcagtgacaatgaagatgacctgctggagtaccaccggcggcagaggcaggagcggctgcgggagcaggagatggagcggctggagcggcagaggctggagaccatcctgaacctgtgtgccgagtacagcagagcagatggcggccctgaggccggggagctgcccagcattggagaggccacagctgccctggccctggccggcagaagacccagccggggcctggccggggccagcggccgcagcagcgaggagcccggggtggccacccagaggctgtgggagagcatggagaggagtgatgaggagaacctgaaggaggagtgcagcagcacagagagcacccagcaggagcatgaagatgcccccagcaccaagctgcagggcgaggtgctggccctggaggaggagcgggcccaggtgctgggccacgtggagcagctgaaggtgcgggtgaaggagctggagcagcagctgcaggagagcgcccgggaggccgagatggagcgggccctgctgcagggcgagcgggaggccgagcgggccctgctgcagaaggagcagaaggctgtggaccagctgcaggagaagctggtggccctggagaccggcatccagaaggagcgggacaaggaggccgaggccctggagacagagaccaagctgtttgaggacctggagttccagcagctggagcgggagagccgggtggaggaggagcgggagctggccggccagggcctgctgcggagcaaggccgagctgctgcggagcatcgccaagaggaaggagcggctggccatcctggacagccaggccggccagatccgggcccaggccgtgcaggagagcgagcggctggcccgggacaagaatgccagcctgcagctgctgcagaaggagaaggagaagctgactgtgctggagcggcgctaccacagcctgaccggcggccggcccttccccaagaccaccagcaccctgaaggagatggagaagctgctgctgcctgctgtggacctggagcagtggtaccaggagctgatggccggcctgggcaccggccctgctgctgccagcccccacagcagccccccacccctgcctgccaaggccagccggcagctgcaggtgtaccgcagcaagatggatggagaggccaccagccccctgcccaggaccaggagcggccccctgcccagcagcagcggcagcagcagcagcagcagccagctgtctgtggccaccctgggccgcagccccagccccaagagcgccctgctgacccagaatggaacaggcagcctgcccaggaacctggccgccaccctgcaggacatcgagaccaagaggcagctggccctgcagcagaagggccagcaggtgattgaggagcagaggcggcggctggccgagctgaagcagaaggctgctgctgaggcccagtgccagtgggatgccctgcatggagctgcccccttccctgctggccccagcggcttcccccccctgatgcaccacagcatcctgcaccacctgcctgctggccgggagcggggggaggagggggagcacgcctatgacaccctgagcctggagagcagtgacagcatggagaccagcatcagcactggaggcaacagcgcctgcagcccagacaacatgagcagcgccagcggcctggacatgggcaagattgaggagatggagaagatgctgaaggaggcccacgccgagaagaaccggctgatggagagccgggagcgggagatggagctgcggcggcaggccctggaggaggagaggagaagaagagagcaggtggagcggcggctgcagagcgagagcgcccggcggcagcagctggtggagaaggaggtgaagatgagggagaagcagttcagccaggcccggcccctgacccgctacctgcccatcagaaaagaagattttgacctgaagacccacatcgagagcagcggccacggcgtggacacctgcctgcacgtggtgctgagcagcaaggtgtgccggggctacctggtgaagatgggcggcaagatcaagtcctggaagaagcgctggtttgtgtttgaccggctgaagaggaccctgagctactacgtggacaagcatgagaccaagctgaagggcgtcatctacttccaggccatcgaggaggtgtactatgaccacctgcggtctgctgccaagaagcgcttcttccgcttcaccatggtgacagagagccccaacccagccctgaccttctgtgtgaagacccatgaccggctgtactacatggtggcccccagcgctgaggccatgaggatctggatggatgtgattgtgactggagctgagggctacacccagttcatgaactag

SEQ ID NO: 164406 - DNA, 3423 bp, synthetic construct
  misc_feature 1..3423: note = Description of Artificial Sequence: Synthetic coding sequence
  source 1..3423: mol_type = other DNA
atgtctgtgggcagcagctatgagaacaccagccctgccttcagccccctgagcagccctgccagcagcggcagctgtgccagccacagccccagcggccaggagcccggccccagcgtgccccccctggtgcctgcccggagcagcagctaccacctggccctgcagcccccccagagccggcccagcggggcccggtctgagagcccccggctgagcaggaaaggaggccacgagaggcctcccagccctggcctgcggggcctgctgacagacagccctgctgccaccgtgctggccgaggcccggcgggccacagagagcccccggctgggcggccagctgcctgtggtggccatcagcctgtctgagtacccagccagcggggccctgagccagcccaccagcatccctggcagccccaagttccagccccctgtgcctgcccccaggaacaagattggcaccctgcaggacaggcctcccagccccttccgggagcccccaggcagcgagcgggtgctgaccaccagccccagccggcagctggtgggccgcaccttcagtgatggcctggccaccaggaccctgcagcccccagagagcccccggctgggcagaagaggcctggacagcatgagggagctgccccccctgagccccagcctgagcagaagagccctgagccccctgcccaccaggaccaccccagaccccaagctgaaccgggaggtggccgagagcccccggccccggcgctgggccgcccatggagccagccctgaggacttcagcctgaccctgggcgcccggggccgccgcaccaggagccccagccccaccctgggggagagcctggccccccacaagggcagcttcagcggccgcctgagccctgcctacagcctgggcagcctgactggagccagcccctgccagagcccctgtgtgcagaggaagctgagcagcggggacctgcgggtgcctgtgacccgggagaggaagaacagcatcacagagatcagtgacaatgaagatgacctgctggagtaccaccggcggcagaggcaggagcggctgcgggagcaggagatggagcggctggagcggcagaggctggagaccatcctgaacctgtgtgccgagtacagcagagcagatggcggccctgaggccggggagctgcccagcatcggggaggccacagctgccctggccctggccggccggcggcccagccggggcctggccggggccagcggccgcagcagcgaggagcccggggtggccacccagaggctgtgggagagcatggagaggagtgatgaggagaacctgaaggaggagtgcagcagcacagagagcacccagcaggagcatgaagatgcccccagcaccaagctgcagggcgaggtgctggccctggaggaggagcgggcccaggtgctgggccacgtggagcagctgaaggtgcgggtgaaggagctggagcagcagctgcaggagagcgcccgggaggccgagatggagcgggccctgctgcagggcgagcgggaggccgagcgggccctgctgcagaaggagcagaaggctgtggaccagctgcaggagaagctggtggccctggagaccggcatccagaaggagcgggacaaggaggccgaggccctggagacagagaccaagctgtttgaggacctggagttccagcagctggagcgggagagccgggtggaggaggagcgggagctggccggccagggcctgctgcggagcaaggccgagctgctgcggagcatcgccaagaggaaggagcggctggccatcctggacagccaggccggccagatccgggcccaggccgtgcaggagagcgagcggctggcccgggacaagaatgccagcctgcagctgctgcagaaggagaaggagaagctgactgtgctggagcggcgctaccacagcctgactggaggccggcccttccccaagaccaccagcaccctgaaggagatggagaagctgctgctgcctgctgtggacctggagcagtggtaccaggagctgatggccggcctgggcactggacctgctgctgccagcccccacagcagccccccacccctgcctgccaaggccagccggcagctgcaggtgtaccgcagcaagatggatggagaggccaccagccccctgcccaggaccaggagcggccccctgcccagcagcagcggcagcagcagcagcagcagccagctgtctgtggccaccctgggccgcagccccagccccaagagcgccctgctgacccagaatggcaccggcagcctgcccaggaacctggccgccaccctgcaggacatcgagaccaagaggcagctggccctgcagcagaaggtggagagcctgcctgctgagcccctgcccacagatgatcctgctggccagcaggtgattgaggagcagaggcggcggctggccgagctgaagcagaaggctgctgctgaggcccagtgccagtgggatgccctgcatggagctgcccccttccctgctggccccagcggcttcccccccctgatgcaccacagcatcctgcaccacctgcctgctggccgggagcggggggaggagggggagcacgcctatgacaccctgagcctggagagcagtgacagcatggagaccagcatcagcactggaggcaacagcgcctgcagcccagacaacatgagcagcgccagcggcctggacatgggcaagattgaggagatggagaagatgctgaaggaggcccacgccgagaagaaccggctgatggagagccgggagcgggagatggagctgcggcggcaggccctggaggaggagaggagaagaagagagcaggtggagcggcggctgcagagcgagagcgcccggcggcagcagctggtggagaaggaggtgaagatgagggagaagcagttcagccaggcccggcccctgacccgctacctgcccatcagaaaagaagattttgacctgaagacccacatcgagagcagcggccacggcgtggacacctgcctgcacgtggtgctgagcagcaaggtgtgccggggctacctggtgaagatgggcggcaagatcaagtcctggaagaagcgctggtttgtgtttgaccggctgaagaggaccctgagctactacgtggacaagcatgagaccaagctgaagggcgtcatctacttccaggccatcgaggaggtgtactatgaccacctgcggtctgctgccaagagccccaacccagccctgaccttctgtgtgaagacccatgaccggctgtactacatggtggcccccagcgctgaggccatgaggatctggatggatgtgattgtgactggagctgagggctacacccagttcatgaactag

SEQ ID NO: 164407 - DNA, 306 bp, synthetic construct
  misc_feature 1..306: note = Description of Artificial Sequence: Synthetic coding sequence
  source 1..306: mol_type = other DNA
atgggcggcaagatcaagtcctggaagaagcgctggtttgtgtttgaccggctgaagaggaccctgagctactacgtggacaagcatgagaccaagctgaagggcgtcatctacttccaggccatcgaggaggtgtactatgaccacctgcggtctgctgccaagagccccaacccagccctgaccttctgtgtgaagacccatgaccggctgtactacatggtggcccccagcgctgaggccatgaggatctggatggatgtgattgtgactggagctgagggctacacccagttcatgaactag

SEQ ID NO: 164408 - DNA, 1119 bp, synthetic construct
  misc_feature 1..1119: note = Description of Artificial Sequence: Synthetic coding sequence
  source 1..1119: mol_type = other DNA
atggatgccctgaacagaaaccagatcggccctggctgccagacccagaccatggtgcagaagggccccctggacctgattgaaacaggcaagggcctgaaggtgcagacagacaagccccacctggtgtccctgggcagcggccgcctgagcacagccatcaccctgctgcccctggaggagggccgcaccgtcatcggcagcgctgcccgggacatcagcctgcagggccctggcctggcccctgagcactgctacatcgagaacctgcggggcaccctgaccctgtacccctgtggaaatgcctgcaccattgatggcctgcctgtgcggcagcccacccggctgacccagggctgcatgctgtgcctgggccagagcaccttcctgcgcttcaaccaccctgctgaggccaagtggatgaagtccatgatcccagctgggggccgggcccctggccccccctacagccctgtgcctgagagcgagagcctggtgaatggaaaccacaccccccagacagccacccggggccccagcgcctgtgccagccacagcagcctggtgagcagcattgagaaggacctgcaggagatcatggacagcctggtgctggaggagcccggggctgctgggaagaagccagctgccaccagccccctgagccccatggccaacggcggccgctacctgctgagcccccccaccagccctggggccatgtctgtgggcagcagctatgagaacaccagccctgccttcagccccctgagcagccctgccagcagcggcagctgtgccagccacagccccagcggccaggagcccggccccagcgtgccccccctggtgcctgcccggagcagcagctaccacctggccctgcagcccccccagagccggcccagcggggcccggtctgagagcccccggctgagcaggaaaggaggccacgagaggcctcccagccctggcctgcggggcctgctgacagacagccctgctgccaccgtgctggccgaggcccggcgggccacagagagcccccggctgggcggccagctgcctgtggtggccatcagcctgtctgagtacccagctgcccggcgctgcacctag

SEQ ID NO: 164409 - DNA, 744 bp, synthetic construct
  misc_feature 1..744: note = Description of Artificial Sequence: Synthetic coding sequence
  source 1..744: mol_type = other DNA
atggatgccctgaacagaaaccagatcggccctggctgccagacccagaccatggtgcagaagggccccctggacctgattgaaacaggcaagggcctgaaggtgcagacagacaagccccacctggtgtccctgggcagcggccgcctgagcacagccatcaccctgctgcccctggaggagggccgcaccgtcatcggcagcgctgcccgggacatcagcctgcagggccctggcctggcccctgagcactgctacatcgagaacctgcggggcaccctgaccctgtacccctgtggaaatgcctgcaccattgatggcctgcctgtgcggcagcccacccggctgacccagggctgcatgctgtgcctgggccagagcaccttcctgcgcttcaaccaccctgctgaggccaagtggatgaagtccatgatcccagctgggggccgggcccctggccccccctacagccctgtgcctgctgagagcgagagcctggtgaatggaaaccacaccccccagacagccacccggggccccagcgcctgtgccagccacagcagcctggtgagcagcattgagaaggacctgcaggagatcatggacagcctggtgctggaggagcctggagctgctgggaagaagccagctgccaccagccccctgagccccatggccaatggaggccgctacctgctgagcccccccaccagccctggccacgtgtgtggcctgcagctgtag

SEQ ID NO: 164410 - DNA, 14055 bp, synthetic construct
  misc_feature 1..14055: note = Description of Artificial Sequence: Synthetic coding sequence
  source 1..14055: mol_type = other DNA
atggtggccggcatgctgatgccccgggaccagctgcgggccatctatgaggtgctcttccgggagggcgtgatggtggccaagaaggacagaagacccaggagcctgcacccccacgtgcctggggtgaccaacctgcaggtgatgagggccatggccagcctgcgggcccggggcctggtgcgggagacctttgcctggtgccacttctactggtacctgaccaatgaaggaattgcccacctgcggcagtacctgcacctgcccccagagatcgtgcctgccagcctgcagagggtgagaagacctgtggccatggtgatgcctgcccggaggacccctcatgtgcaggccgtgcagggccccctgggcagcccccccaagaggggccccctgcccacagaggagcagagggtgtacagaaggaaggagctggaggaggtgtccccagagacccctgtggtgcctgccaccacccagaggaccctggcccggcccggccctgagcccgccccagccacagatgagcgggacagagtgcagaagaagaccttcaccaagtgggtgaacaagcacctgatcaaggcccagaggcacatcagtgacctgtatgaggacctgagagatggccacaacctgatcagcctgctggaggtgctgagcggggacagcctgccccgggagaagggccgcatgaggttccacaagctgcagaatgtgcagatcgccctggactacctgcggcaccggcaggtgaagctggtgaacatcagaaatgatgacattgctgatggcaaccccaagctgaccctgggcctcatctggaccatcatcctgcacttccagatcagtgacatccaggtgtctggccagagcgaggacatgacagccaaggagaagctgctgctgtggagccagaggatggtggagggctaccagggcctgcgctgtgacaacttcaccagctcctggagagatggccgcctcttcaatgccatcatccaccgccacaagcccctgctgattgacatgaacaaggtgtaccggcagaccaacctggagaacctggaccaggccttctctgtggccgagcgggacctgggcgtgacccggctgctggaccctgaagatgtggatgtgccccagccagatgagaagagcatcatcacctacgtgagcagcctgtatgatgccatgccccgggtgcctgatgtgcaggatggagtgcgggccaatgagctgcagctgcgctggcaggagtaccgggagctggtgctgctgctgctgcagtggatgaggcaccacacagctgcctttgaggagcggcgcttccccagcagctttgaggagattgagatcctgtggagccagttcctgaagttcaaggagatggagctgcctgccaaggaggccgacaagaacagaagcaagggcatctaccagagcctggagggcgctgtgcaggccggccagctgaaggtgcccccaggctaccaccccctggatgtggagaaggagtggggcaagctgcacgtggccatcctggagcgggagaagcagctgcggagtgaatttgagcggctggagtgcctgcagagaattgtgaccaagctgcagatggaggccggcctgtgtgaggagcagctgaaccaggctgatgccctgctgcagagtgatgtgcggctgctggccgccggcaaggtgccccagagagctggggaggtggagcgggacctggacaaggctgacagcatgatccggctgctcttcaatgatgtgcagaccctgaaggatggccgccacccccagggcgagcagatgtacagaagagtgtaccgcctgcacgagcggctggtggccatcagaacagagtacaacctgcggctgaaggccggcgtggccgccccagccacccaggtggcccaggtgaccctgcagagcgtgcagaggaggcctgagctggaggacagcaccctgcgctacctgcaggacctgctggcctgggtggaggagaaccagcaccgggtggatggagctgagtggggcgtggacctgcccagcgtggaggcccagctgggcagccaccggggcctgcaccagagcattgaggagttccgggccaagattgagcgggcccggagtgatgagggccagctgagccctgccaccaggggggcctacagagactgcctgggccgcctggacctgcagtatgccaagctgctgaacagcagcaaggcccggctgcggagcctggagagcctgcacagctttgtggccgccgccaccaaggagctgatgtggctgaatgagaaggaggaggaggaggtgggctttgactggagcgacaggaacaccaacatgacagccaagaaggagagctacagcgccctgatgagggagctggagctgaaggagaagaagatcaaggagctgcagaatgctggggaccggctgctgcgggaggaccacccagcccggcccaccgtggagagcttccaggccgccctgcagacccagtggagctggatgctgcagctgtgctgctgcatcgaggcccacctgaaggaaaatgctgcctacttccagttcttcagtgatgtgcgggaggccgagggccagctgcagaagctgcaggaggccctgcggaggaagtacagctgtgacagaagtgccaccgtgacccggctggaggacctgctgcaggatgcccaggatgagaaggagcagctgaatgagtacaagggccacctgagcggcctggccaagagggccaaggctgtggtgcagctgaagcccaggcacccagcccaccccatgaggggccgcctgcccctgctggccgtgtgtgactacaagcaggtggaggtgacagtgcacaagggagatgagtgccagctggtgggccctgcccagcccagccactggaaggtgctgagcagcagcggcagcgaggccgctgtgcccagcgtgtgcttcctggtgcccccacccaaccaggaggcccaggaggccgtgacccggctggaggcccagcaccaggccctggtgaccctgtggcaccagctgcacgtggacatgaagagcctgctggcctggcagagcctgcggagagatgtgcagctgatccgctcctggagcctggccaccttccgcaccctgaagccagaggagcagaggcaggccctgcacagcctggagctgcactaccaggccttcctgcgggacagccaggatgctgggggctttggacctgaggaccggctgatggccgagcgggagtatggcagctgcagccaccactaccagcagctgctgcagagcctggagcagggcgcccaggaggagagccgctgccagcgctgcatcagcgagctgaaggacatccggctgcagctggaggcctgtgagaccaggacagtgcaccggctgcggctgcccctggacaaggagcccgccagagaatgtgcccagagaattgctgagcagcagaaggcccaggccgaggtggagggcctgggcaaaggagtggcccggctgtctgctgaggccgagaaggtgctggccctgcctgagcccagccctgctgcccccaccctgcggtctgagctggagctgaccctgggcaagctggagcaggtgcgcagcctgagcgccatctacctggagaagctgaagaccatcagcctggtgatccggggcacccagggcgctgaggaggtgctgcgggcccacgaggagcagctgaaggaggcccaggccgtgcctgccaccctgcctgagctggaggccaccaaggccagcctgaagaagctgcgggcccaggccgaggcccagcagcccacctttgatgccctgagagatgagctgcggggggcccaggaggtgggggagcggctgcagcagagacatggagagagagatgtggaggtggagcgctggagggagcgggtggcccagctgctggagcgctggcaggccgtgctggcccagacagatgtgcggcagcgggagctggagcagctgggccggcagctgcgctactaccgggagagcgctgaccccctgggcgcctggctgcaggatgcccggcggcggcaggagcagatccaggccatgcccctggccgacagccaggccgtgcgggagcagctgcggcaggagcaggccctgctggaggagattgagcggcacggggagaaggtggaggagtgccagagatttgccaagcagtacatcaatgccatcaaggactatgagctgcagctggtgacctacaaggcccagctggagcctgtggccagccctgccaagaagcccaaggtgcagagcggcagcgagagcgtcatccaggagtatgtggacctgcggacccactacagcgagctgaccaccctgaccagccagtacatcaagttcatcagcgagaccctgcggaggatggaggaggaggagcggctggccgagcagcagagagctgaggagcgggagcggctggccgaggtggaggccgccctggagaagcagaggcagctggccgaggcccacgcccaggccaaggcccaggccgagcgggaggccaaggagctgcagcagaggatgcaggaggaggtggtgcggcgggaggaggccgctgtggatgcccagcagcagaagaggagcatccaggaggagctgcagcagctgcggcagagcagcgaggccgagatccaggccaaggcccggcaggccgaggccgctgagaggagccggctgagaattgaggaggagatccgggtggtgcggctgcagctggaggccacagagcggcagaggggcggcgctgagggggagctgcaggccctgcgggcccgggcagaggaggccgaggcccagaagaggcaggcccaggaggaggccgagcggctgcggcggcaggtgcaggatgagagccagaggaagaggcaggccgaggtggagctggccagccgggtgaaggccgaggccgaggccgcccgggagaagcagagggccctgcaggccctggaggagctgcggctgcaggccgaggaggccgagcggcggctgcggcaggccgaggtggagcgggcccggcaggtgcaggtggccctggagacagcccagaggtctgctgaggccgagctgcagagcaagagggccagctttgctgagaagacagcccagctggagaggagcctgcaggaggagcacgtggccgtggcccagctgcgggaggaggccgagcggcgggcccagcagcaggccgaggccgagcgggcccgggaggaggccgagcgggagctggagcgctggcagctgaaggccaatgaggccctgcggctgcggctgcaggccgaggaggtggcccagcagaagagcctggcccaggccgaggccgagaagcagaaggaggaggccgagcgggaggcccggcggcggggcaaggccgaggagcaggccgtgcggcagcgggagctggccgagcaggagctggagaagcagaggcagctggccgagggcacagcccagcagaggctggccgctgagcaggagctgatccggctgcgggcagagacagagcagggcgagcagcagaggcagctgctggaggaggagctggcccggctgcagcgggaggccgccgccgccacccagaagaggcaggagctggaggccgagctggccaaggtgcgggcagagatggaggtgctgctggccagcaaggcccgggcagaggaggagagccgcagcaccagcgagaagagcaagcagaggctggaggccgaggccggccgcttccgggagctggccgaggaggccgcccggctgcgggccctggccgaggaggccaagaggcagaggcagctggccgaggaggatgctgcccggcagagagctgaggccgagcgggtgctggccgagaagctggccgccatcggggaggccacccggctgaagacagaagctgagatcgccctgaaggagaaggaggctgaaaatgaaaggctgcggcggctggccgaggatgaggccttccagaggcggcggctggaggagcaggccgcccagcacaaggctgacatcgaggagcggctggcccagctgaggaaggccagtgacagcgagctggagcggcagaagggcctggtggaggacaccctgcggcagaggcggcaggtggaggaggagatcctggccctgaaggccagctttgagaaggctgctgctgggaaggccgagctggagctggagctgggccgcatccgcagcaatgctgaggacaccctgcggagcaaggagcaggccgagctggaggccgcccggcagaggcagctggccgctgaggaggagaggagaagaagagaagctgaggagcgggtgcagaagagcctggccgctgaggaggaggccgcccggcagaggaaggccgccctggaggaggtggagcggctgaaggccaaggtggaggaggcccggcggctgcgggagagagctgagcaggagagcgcccggcagctgcagctggcccaggaggccgcccagaagaggctgcaggccgaggagaaggcccacgcctttgctgtgcagcagaaggagcaggagctgcagcagaccctgcagcaggagcagagcgtgctggaccagctgcggggggaggccgaggccgcccggcgggctgctgaggaggccgaggaggcccgggtgcaggccgagcgggaggccgcccagagccggcggcaggtggaggaggccgagcggctgaagcagagcgctgaggagcaggcccaggcccgggcccaggcccaggccgctgctgagaagctgaggaaggaggccgagcaggaggccgcccggcgggcccaggccgagcaggccgccctgcggcagaagcaggccgcagatgctgagatggagaagcacaagaagtttgctgagcagaccctgcggcagaaggcccaggtggagcaggagctgaccaccctgcggctgcagctggaggagacagaccaccagaagaacctgctggatgaggagctgcagaggctgaaggccgaggccacagaggccgcccggcagaggagccaggtggaggaggagctgttctctgtgcgggtgcagatggaggagctgagcaagctgaaggcccgcatcgaggctgaaaatagagccctgatcctgcgggacaaggacaacacccagcgcttcctgcaggaggaggccgagaagatgaagcaggtggccgaggaggccgcccggctgtctgtggccgcccaggaggccgcccggctgcggcagctggccgaggaggacctggcccagcagagggccctggccgagaagatgctgaaggagaagatgcaggccgtgcaggaggccacccggctgaaggccgaggccgagctgctgcagcagcagaaggagctggcccaggagcaggcccggcggctgcaggaggacaaggagcagatggcccagcagctggccgaggagacccagggcttccagaggaccctggaggccgagcggcagaggcagctggagatgtctgctgaggccgagcggctgaagctgcgggtggccgagatgagccgggcccaggcccgggcagaggaggatgcccagcgcttcaggaagcaggccgaggagatcggggagaagctgcacaggacagagctggccacccaggagaaggtgaccctggtgcagaccctggagatccagaggcagcagagcgaccatgatgctgagcggctgcgggaggccatcgccgagctggagcgggagaaggagaagctgcagcaggaggccaagctgctgcagctgaagtctgaggagatgcagacagtgcagcaggagcagctgctgcaggagacccaggccctgcagcagagcttcctgtctgagaaggacagcctgctgcagcgggagcgcttcatcgagcaggagaaggccaagctggagcagctgttccaggatgaggtggccaaggcccagcagctgcgggaggagcagcagaggcagcagcagcagatggagcaggagcggcagaggctggtggcctccatggaggaggcccggcggcggcagcatgaagctgaggagggcgtgcggaggaagcaggaggagctgcagcagctggagcagcagaggcggcagcaggaggagctgctggccgaggagaaccagaggctgcgggagcagctgcagctgctggaggagcagcaccgggccgccctggcccacagcgaggaggtgacagccagccaggtggccgccaccaagaccctgcccaacggcagagatgccctggatggccctgctgctgaggccgagcctgagcacagctttgatggcctgcggaggaaggtgtctgcccagaggctgcaggaggccggcatcctgtctgctgaggagctgcagaggctggcccagggccacaccaccgtggatgagctggccaggagagaagatgtgcgccactacctgcagggccgcagcagcattgctggcctgctgctgaaggccaccaatgagaagctgtctgtgtatgctgccctgcagaggcagctgctgagccctggaacagccctgatcctgctggaggcccaggccgccagcggcttcctgctggaccctgtgaggaacagaaggctgactgtgaatgaggccgtgaaggagggcgtggtgggccctgagctgcaccacaagctgctgtctgctgagagagctgtgacaggctacaaggacccctacacaggccagcagatcagcctcttccaggccatgcagaagggcctcatcgtgcgggagcacggcatccggctgctggaggcccagatcgccactggaggagtgattgatcctgtgcacagccaccgggtgcctgtggatgtggcctaccgccggggctactttgatgaggagatgaacagagtgctggccgaccccagtgatgacaccaagggcttctttgaccccaacacccatgagaacctgacctacctgcagctgctggagcgctgtgtggaggaccctgagaccggcctgtgcctgctgcccctgacagacaaggccgccaagggcggggagctggtgtacacagacagcgaggccagagatgtgtttgagaaggccaccgtgtctgccccctttgggaagttccagggcaagacagtgaccatctgggagatcatcaacagcgagtacttcaccgctgagcagaggcgggacctgctgcggcagttcagaacaggccgcatcaccgtggagaagatcatcaagatcatcatcaccgtggtggaggagcaggagcagaagggccgcctgtgctttgagggcctgcggagcctggtgcctgctgctgagctgctggagagccgggtgattgaccgggagctgtaccagcagctgcagagaggagagaggtctgtgagagatgtggccgaggtggacacagtgcggcgggccctgcggggggccaacgtgattgctggggtgtggctggaggaggccggccagaagctgagcatctacaatgccctgaagaaggacctgctgcccagcgacatggctgtggccctgctggaggcccaggccggcaccggccacatcattgatcctgccaccagcgcccggctgactgtggatgaggccgtgcgggccggcctggtgggccctgagttccacgagaagctgctgtctgctgagaaggctgtgacaggctacagagacccctacacaggccagagcgtgtccctcttccaggccctgaagaagggcctcatcccccgggagcagggcctgcggctgctggatgcccagctgagcactggaggcatcgtggaccccagcaagagccaccgggtgcccctggatgtggcctgtgcccggggctgcctggatgaggagaccagccgggccctgagcgcccccagggcagatgccaaggcctacagcgaccccagcactggagagcccgccacctatggagagctgcagcagcgctgcaggccagaccagctgaccggcctgagcctgctgcccctgtctgagaaggccgcccgggcccggcaggaggagctgtacagcgagctgcaggcccgggagacctttgagaagacccctgtggaggtgcctgtgggcggcttcaagggccgcacagtgacagtgtgggagctgatcagcagcgagtacttcaccgctgagcagaggcaggagctgctgcggcagttcagaacaggcaaggtgacagtggagaaggtgatcaagatcctgatcaccatcgtggaggaggtggagaccctgcggcaggagcggctgtccttcagcggcctgcgggcccctgtgcctgccagcgagctgctggccagcggcgtgctgagccgggcccagtttgagcagctgaaggatggcaagaccaccgtgaaggacctgtctgagctgggctctgtgaggaccctgctgcagggcagcggctgcctggccggcatctacctggaggacaccaaggagaaggtgtccatctatgaggccatgagaagaggcctgctgcgggccaccacagctgccctgctgctggaggcccaggccgccaccggcttcctggtggaccctgtgaggaaccagaggctgtatgtgcatgaagctgtgaaggccggcgtggtgggccctgagctgcacgagcagctgctgtctgctgagaaggctgtgacaggctacagagacccctacagcggcagcaccatcagcctcttccaggccatgcagaagggcctggtgctgcggcagcacggcatccggctgctggaggcccagatcgccaccggcggcatcatcgaccctgtgcacagccaccgggtgcctgtggatgtggcctaccagaggggctacttcagcgaggagatgaacagagtgctggccgaccccagtgatgacaccaagggcttctttgaccccaacacccatgagaacctgacctaccggcagctgctggagcgctgtgtggaggaccctgagaccggcctgcggctgctgcccctgaagggagctgagaaggccgaggtggtggagaccacccaggtgtacacagaggaggagacccggcgggcctttgaggagacccagattgacatccctgggggcggcagccatggaggcagcaccatgagcctgtgggaggtgatgcagagcgacctgatccctgaggagcagagggcccagctgatggctgacttccaggccggccgggtgaccaaggagaggatgatcatcatcatcatcgagatcatcgagaagacagagatcatccggcagcagggcctggccagctatgactatgtgagaagaaggctgacagctgaggacctgtttgaggcccgcatcatcagcctggagacctacaacctgctgcgggagggcaccaggagcctgcgggaggccctggaggccgagagcgcctggtgctacctgtatggcaccggctctgtggccggcgtgtacctgcccggcagccggcagaccctgagcatctaccaggccctgaagaagggcctgctgtctgctgaggtggcccggctgctgctggaggcccaggccgccaccggcttcctgctggaccctgtgaagggggagcggctgactgtggatgaggccgtgaggaagggcctggtgggccctgagctgcatgaccggctgctgtctgctgagagagctgtgacaggctacagagacccctacacagagcagaccatcagcctcttccaggccatgaagaaggagctgatccccacagaggaggccctgcggctgctggatgcccagctggccactggaggcatcgtggacccccggctgggcttccacctgcccctggaggtggcctaccagaggggctacctgaacaaggacacccatgaccagctgtctgagcccagcgaggtgcgctcctatgtggaccccagcacagatgagcggctgagctacacccagctgctgcggcgctgcagaagagatgatggcaccggccagctgctgctgcccctgagtgatgccaggaagctgaccttccggggcctgaggaagcagatcaccatggaggagctggtgcgcagccaggtgatggatgaggccacagccctgcagctgcgggagggcctgaccagcattgaggaggtgaccaagaacctgcagaagttcctggagggcaccagctgcatcgccggcgtgtttgtggatgccaccaaggagcggctgtctgtgtaccaggccatgaagaagggcatcatccggcctggaacagcctttgagctgctggaggcccaggccgccaccggctacgtgattgaccccatcaagggcctgaagctgactgtggaggaggccgtgaggatgggcatcgtgggccctgagttcaaggacaagctgctgtctgctgagagagctgtgacaggctacaaggacccctacagcggcaagctgatcagcctcttccaggccatgaagaagggcctcatcctgaaggaccacggcatccggctgctggaggcccagatcgccaccggcggcatcatcgaccctgaggagagccaccggctgcctgtggaggtggcctacaagaggggcctgtttgatgaggagatgaatgagatcctgacagaccccagtgatgacaccaagggcttctttgaccccaacacagaggagaacctgacctacctgcagctgatggagcgctgcatcacagacccccagacaggcctgtgcctgctgcccctgaaggagaagaagcgggagaggaagaccagcagcaagagctctgtgaggaagagaagagtggtgattgtggaccctgagaccgggaaggagatgtctgtgtatgaggcctacaggaagggcctgattgaccaccagacctacctggagctgtctgagcaggagtgtgagtgggaggagatcaccatcagcagcagtgatggagtggtgaagtccatgatcatcgaccggcgcagcggccggcagtatgacattgatgatgccatcgccaagaacctgattgacagaagtgccctggaccagtacagagctggcaccctgagcatcacagaatttgctgacatgctgtctggaaatgccggcggcttccgcagccgcagcagctctgtgggcagcagcagcagctaccccatcagccctgctgtgtccaggacccagctggcctcctggagcgaccccacagaggagaccggccctgtggccggcatcctggacacagagaccctggagaaggtgtccatcacagaggccatgcacaggaacctggtggacaacatcaccggccagaggctgctggaggcccaggcctgcacaggaggcatcatcgaccccagcactggagagcgcttccctgtgacagatgctgtgaacaagggcctggtggacaagatcatggtggaccgcatcaacctggcccagaaggccttctgtggctttgaggaccccaggaccaagaccaagatgtctgctgcccaggccctgaagaagggctggctgtactatgaggccggccagcgcttcctggaggtgcagtacctgactggaggcctgattgaaccagacaccccaggccgggtgcccctggatgaggccctgcagaggggcaccgtggatgccaggacagcccagaagctgagagatgtgggcgcctacagcaagtacctgacctgccccaagaccaagctgaagatctcctacaaggatgccctggaccgctccatggtggaggagggcaccggcctgcggctgctggaggccgccgcccagagcaccaagggctactacagcccctacagcgtgtctggcagcggcagcacagctggcagcaggacaggcagcaggacaggcagccgggccggcagcagaagaggcagctttgatgccaccggcagcggcttctccatgaccttcagcagcagcagctacagcagcagcggctacggccgccgctatgccagcggcagcagcgccagcctgggcggccctgagagcgctgtggcctag

SEQ ID NO: 164411 - DNA, 13644 bp, synthetic construct
  misc_feature 1..13644: note = Description of Artificial Sequence: Synthetic coding sequence
  source 1..13644: mol_type = other DNA
atgagccagcaccagctgcgggtgccccagcctgagggcctgggcaggaagaggaccagcagcgaggacaacctgtacctggccgtgctgcgggccagcgagggcaagaaggatgagcgggacagagtgcagaagaagaccttcaccaagtgggtgaacaagcacctgatcaaggcccagaggcacatcagtgacctgtatgaggacctgagagatggccacaacctgatcagcctgctggaggtgctgagcggggacagcctgccccgggagaagggccgcatgaggttccacaagctgcagaatgtgcagatcgccctggactacctgcggcaccggcaggtgaagctggtgaacatcagaaatgatgacattgctgatggcaaccccaagctgaccctgggcctcatctggaccatcatcctgcacttccagatcagtgacatccaggtgtctggccagagcgaggacatgacagccaaggagaagctgctgctgtggagccagaggatggtggagggctaccagggcctgcgctgtgacaacttcaccagctcctggagagatggccgcctcttcaatgccatcatccaccgccacaagcccctgctgattgacatgaacaaggtgtaccggcagaccaacctggagaacctggaccaggccttctctgtggccgagcgggacctgggcgtgacccggctgctggaccctgaagatgtggatgtgccccagccagatgagaagagcatcatcacctacgtgagcagcctgtatgatgccatgccccgggtgcctgatgtgcaggatggagtgcgggccaatgagctgcagctgcgctggcaggagtaccgggagctggtgctgctgctgctgcagtggatgaggcaccacacagctgcctttgaggagcggcgcttccccagcagctttgaggagattgagatcctgtggagccagttcctgaagttcaaggagatggagctgcctgccaaggaggccgacaagaacagaagcaagggcatctaccagagcctggagggcgctgtgcaggccggccagctgaaggtgcccccaggctaccaccccctggatgtggagaaggagtggggcaagctgcacgtggccatcctggagcgggagaagcagctgcggagtgaatttgagcggctggagtgcctgcagagaattgtgaccaagctgcagatggaggccggcctgtgtgaggagcagctgaaccaggctgatgccctgctgcagagtgatgtgcggctgctggccgccggcaaggtgccccagagagctggggaggtggagcgggacctggacaaggctgacagcatgatccggctgctcttcaatgatgtgcagaccctgaaggatggccgccacccccagggcgagcagatgtaccgccgggtgtaccgcctgcacgagcggctggtggccatcagaacagagtacaacctgcggctgaaggccggcgtggccgccccagccacccaggtggcccaggtgaccctgcagagcgtgcagaggaggcctgagctggaggacagcaccctgcgctacctgcaggacctgctggcctgggtggaggagaaccagcaccgggtggatggagctgagtggggcgtggacctgcccagcgtggaggcccagctgggcagccaccggggcctgcaccagagcattgaggagttccgggccaagattgaaagagcccggagtgatgagggccagctgagccctgccaccaggggggcctacagagactgcctgggccgcctggacctgcagtatgccaagctgctgaacagcagcaaggcccggctgcggagcctggagagcctgcacagctttgtggccgccgccaccaaggagctgatgtggctgaatgagaaggaggaggaggaggtgggctttgactggagcgacaggaacaccaacatgacagccaagaaggagagctacagcgccctgatgagggagctggagctgaaggagaagaagatcaaggagctgcagaatgctggggaccggctgctgcgggaggaccacccagcccggcccaccgtggagagcttccaggccgccctgcagacccagtggagctggatgctgcagctgtgctgctgcatcgaggcccacctgaaggaaaatgctgcctacttccagttcttcagtgatgtgcgggaggccgagggccagctgcagaagctgcaggaggccctgcggaggaagtacagctgtgacagaagtgccaccgtgacccggctggaggacctgctgcaggatgcccaggatgagaaggagcagctgaatgagtacaagggccacctgagcggcctggccaagagggccaaggctgtggtgcagctgaagcccaggcacccagcccaccccatgaggggccgcctgcccctgctggccgtgtgtgactacaagcaggtggaggtgacagtgcacaagggagatgagtgccagctggtgggccctgcccagcccagccactggaaggtgctgagcagcagcggcagcgaggccgctgtgcccagcgtgtgcttcctggtgcccccacccaaccaggaggcccaggaggccgtgacccggctggaggcccagcaccaggccctggtgaccctgtggcaccagctgcacgtggacatgaagagcctgctggcctggcagagcctgcggagagatgtgcagctgatccgctcctggagcctggccaccttccgcaccctgaagccagaggagcagaggcaggccctgcacagcctggagctgcactaccaggccttcctgcgggacagccaggatgctgggggcttcggcccagaagatcggctgatggccgagcgggagtatggcagctgcagccaccactaccagcagctgctgcagagcctggagcagggcgcccaggaggagagccgctgccagcgctgcatcagcgagctgaaggacatccggctgcagctggaggcctgtgagaccaggacagtgcaccggctgcggctgcccctggacaaggagcccgcccgggagtgtgcccagagaattgctgagcagcagaaggcccaggccgaggtggagggcctgggcaagggcgtggcccggctgtctgctgaggccgagaaggtgctggccctgcctgagcccagccctgctgcccccaccctgcggtctgagctggagctgaccctgggcaagctggagcaggtgcgcagcctgagcgccatctacctggagaagctgaagaccatcagcctggtgatccggggcacccagggcgctgaggaggtgctgcgggcccacgaggagcagctgaaggaggcccaggccgtgcctgccaccctgcctgagctggaggccaccaaggccagcctgaagaagctgcgggcccaggccgaggcccagcagcccacctttgatgccctgagagatgagctgcggggggcccaggaggtgggggagcggctgcagcagagacatggagagagagatgtggaggtggagcgctggagggagcgggtggcccagctgctggagcgctggcaggccgtgctggcccagacagatgtgcggcagcgggagctggagcagctgggccggcagctgcgctactaccgggagagcgctgaccccctgggcgcctggctgcaggatgcccggcggcggcaggagcagatccaggccatgcccctggccgacagccaggccgtgcgggagcagctgcggcaggagcaggccctgctggaggagattgaaagacatggagagaaggtggaggagtgccagagatttgccaagcagtacatcaatgccatcaaggactatgagctgcagctggtgacctacaaggcccagctggagcctgtggccagccctgccaagaagcccaaggtgcagagcggcagcgagagcgtcatccaggagtatgtggacctgcggacccactacagcgagctgaccaccctgaccagccagtacatcaagttcatcagcgagaccctgcggaggatggaggaggaggagcggctggccgagcagcagagagctgaggagcgggagcggctggccgaggtggaggccgccctggagaagcagaggcagctggccgaggcccacgcccaggccaaggcccaggccgagcgggaggccaaggagctgcagcagaggatgcaggaggaggtggtgagaagagaggaggccgctgtggatgcccagcagcagaagaggagcatccaggaggagctgcagcagctgcggcagagcagcgaggccgagatccaggccaaggcccggcaggccgaggccgctgagaggagccggctgcgcatcgaggaggagatccgggtggtgcggctgcagctggaggccacagagcggcagagaggaggagctgagggggagctgcaggccctgcgggcccgggcagaggaggccgaggcccagaagaggcaggcccaggaggaggccgagcggctgcggcggcaggtgcaggatgagagccagaggaagaggcaggccgaggtggagctggccagccgggtgaaggccgaggccgaggccgcccgggagaagcagagggccctgcaggccctggaggagctgcggctgcaggccgaggaggccgagcggcggctgcggcaggccgaggtggagcgggcccggcaggtgcaggtggccctggagacagcccagaggtctgctgaggccgagctgcagagcaagagggccagctttgctgagaagacagcccagctggagaggagcctgcaggaggagcacgtggccgtggcccagctgcgggaggaggccgagcggcgggcccagcagcaggccgaggccgagcgggcccgggaggaggccgagcgggagctggagcgctggcagctgaaggccaatgaggccctgcggctgcggctgcaggccgaggaggtggcccagcagaagagcctggcccaggccgaggccgagaagcagaaggaggaggccgagcgggaggccaggagaagaggcaaggccgaggagcaggccgtgcggcagcgggagctggccgagcaggagctggagaagcagaggcagctggccgagggcacagcccagcagaggctggccgctgagcaggagctgatccggctgcgggcagagacagagcagggcgagcagcagaggcagctgctggaggaggagctggcccggctgcagcgggaggccgctgctgccacccagaagaggcaggagctggaggccgagctggccaaggtgcgggcagagatggaggtgctgctggccagcaaggcccgggcagaggaggagagccgcagcaccagcgagaagagcaagcagaggctggaggccgaggccggccgcttccgggagctggccgaggaggccgcccggctgcgggccctggccgaggaggccaagaggcagaggcagctggccgaggaggatgctgcccggcagagagctgaggccgagcgggtgctggccgagaagctggccgccatcggggaggccacccggctgaagacagaggccgagatcgccctgaaggagaaggaggccgagaatgaaaggctgcggcggctggctgaagatgaggccttccagaggcggcggctggaggagcaggccgcccagcacaaggctgacatcgaggagcggctggcccagctgaggaaggccagtgacagcgagctggagcggcagaagggcctggtggaggacaccctgcggcagaggcggcaggtggaggaggagatcctggccctgaaggccagctttgagaaggctgctgctgggaaggccgagctggagctggagctgggccgcatccgcagcaatgctgaggacaccctgcggagcaaggagcaggccgagctggaggccgcccggcagaggcagctggccgctgaggaggagaggagaagaagagaggccgaggagcgggtgcagaagagcctggccgctgaggaggaggccgcccggcagaggaaggccgccctggaggaggtggagcggctgaaggccaaggtggaggaggcccggcggctgcgggagcgggcagagcaggagagcgcccggcagctgcagctggcccaggaggccgcccagaagaggctgcaggccgaggagaaggcccacgcctttgctgtgcagcagaaggagcaggagctgcagcagaccctgcagcaggagcagagcgtgctggaccagctgcggggggaggccgaggccgccaggagagctgctgaggaggccgaggaggcccgggtgcaggccgagcgggaggccgcccagagccggcggcaggtggaggaggccgagcggctgaagcagagcgctgaggagcaggcccaggcccgggcccaggcccaggccgctgctgagaagctgaggaaggaggccgagcaggaggccgcccggcgggcccaggccgagcaggccgccctgcggcagaagcaggccgcagatgctgagatggagaagcacaagaagtttgctgagcagaccctgcggcagaaggcccaggtggagcaggagctgaccaccctgcggctgcagctggaggagacagaccaccagaagaacctgctggatgaggagctgcagaggctgaaggccgaggccacagaagctgcccggcagaggagccaggtggaggaggagctgttctctgtgcgggtgcagatggaggagctgagcaagctgaaggccagaattgaagctgagaacagagccctgatcctgcgggacaaggacaacacccagcgcttcctgcaggaggaggccgagaagatgaagcaggtggccgaggaggccgcccggctgtctgtggccgcccaggaggccgcccggctgcggcagctggccgaggaggacctggcccagcagagggccctggccgagaagatgctgaaggagaagatgcaggccgtgcaggaggccacccggctgaaggccgaggccgagctgctgcagcagcagaaggagctggcccaggagcaggcccggcggctgcaggaggacaaggagcagatggcccagcagctggccgaggagacccagggcttccagaggaccctggaggccgagcggcagaggcagctggagatgtctgctgaggccgagcggctgaagctgcgggtggccgagatgagccgggcccaggcccgggcagaagaagatgcccagcgcttcaggaagcaggccgaggagattggagagaagctgcacaggacagagctggccacccaggagaaggtgaccctggtgcagaccctggagatccagaggcagcagagcgaccatgatgctgagcggctgcgggaggccatcgccgagctggagcgggagaaggagaagctgcagcaggaggccaagctgctgcagctgaagtctgaggagatgcagacagtgcagcaggagcagctgctgcaggagacccaggccctgcagcagagcttcctgtctgagaaggacagcctgctgcagcgggagcgcttcatcgagcaggagaaggccaagctggagcagctgttccaggatgaggtggccaaggcccagcagctgcgggaggagcagcagaggcagcagcagcagatggagcaggagcggcagaggctggtggcctccatggaggaggcccggcggcggcagcacgaggccgaggagggcgtgcggaggaagcaggaggagctgcagcagctggagcagcagaggcggcagcaggaggagctgctggccgaggagaaccagaggctgcgggagcagctgcagctgctggaggagcagcacagagctgccctggcccacagcgaggaggtgacagccagccaggtggccgccaccaagaccctgcccaacggcagagatgccctggatggccctgctgctgaggccgagcctgagcacagctttgatggcctgcggaggaaggtgtctgcccagaggctgcaggaggccggcatcctgtctgctgaggagctgcagaggctggcccagggccacaccaccgtggatgagctggcccggcgggaggatgtgcgccactacctgcagggccgcagcagcattgctggcctgctgctgaaggccaccaatgagaagctgtctgtgtatgctgccctgcagaggcagctgctgagccctggaacagccctgatcctgctggaggcccaggccgccagcggcttcctgctggaccctgtgaggaacagaaggctgactgtgaatgaagctgtgaaggagggcgtggtgggccctgagctgcaccacaagctgctgtctgctgagagagctgtgacaggctacaaggacccctacacaggccagcagatcagcctcttccaggccatgcagaagggcctgattgtgcgggagcacggcatccggctgctggaggcccagatcgccaccggcggcgtcatcgaccctgtgcacagccaccgggtgcctgtggatgtggcctacagaagaggctactttgatgaggagatgaacagagtgctggccgaccccagtgatgacaccaagggcttctttgaccccaacacccatgagaacctgacctacctgcagctgctggagcgctgtgtggaggaccctgagaccggcctgtgcctgctgcccctgacagacaaggccgccaagggcggggagctggtgtacacagattctgaggccagagatgtgtttgagaaggccaccgtgtctgccccctttgggaagttccagggcaagacagtgaccatctgggagatcatcaacagcgagtacttcaccgctgagcagaggcgggacctgctgcggcagttcagaacaggccgcatcaccgtggagaagatcatcaagatcatcatcaccgtggtggaggagcaggagcagaagggccgcctgtgctttgagggcctgcggagcctggtgcctgctgctgagctgctggagagcagggtcatcgaccgggagctgtaccagcagctgcagagaggagagaggtctgtgagagatgtggccgaggtggacacagtgagaagagccctgcggggggccaacgtgattgctggggtgtggctggaggaggccggccagaagctgagcatctacaatgccctgaagaaggacctgctgcccagcgacatggctgtggccctgctggaggcccaggccggcaccggccacatcatcgaccctgccaccagcgcccggctgactgtggatgaagctgtgcgggccggcctggtgggccctgagttccacgagaagctgctgtctgctgagaaggctgtgacaggctacagagacccctacacaggccagagcgtgtccctcttccaggccctgaagaagggcctcatcccccgggagcagggcctgcggctgctggatgcccagctgagcactggaggcatcgtggaccccagcaagagccaccgggtgcccctggatgtggcctgtgcccggggctgcctggatgaggagaccagccgggccctgagcgcccccagggcagatgccaaggcctacagcgaccccagcactggagagcccgccacctacggggagctgcagcagcgctgcaggccagaccagctgaccggcctgagcctgctgcccctgtctgagaaggccgcccgggcccggcaggaggagctgtacagcgagctgcaggcccgggagacctttgagaagacccctgtggaggtgcctgtgggcggcttcaagggccgcacagtgacagtgtgggagctgatcagcagcgagtacttcaccgctgagcagaggcaggagctgctgcggcagttcagaacaggcaaggtgacagtggagaaggtgatcaagatcctgatcaccatcgtggaggaggtggagaccctgcggcaggagcggctgtccttcagcggcctgcgggcccctgtgcctgccagcgagctgctggccagcggcgtgctgagccgggcccagtttgagcagctgaaggatggcaagaccaccgtgaaggacctgtctgagctgggctctgtgaggaccctgctgcagggcagcggctgcctggccggcatctacctggaggacaccaaggagaaggtgtccatctatgaggccatgaggcggggcctgctgcgggccaccacagctgccctgctgctggaggcccaggccgccaccggcttcctggtggaccctgtgaggaaccagaggctgtatgtgcatgaggccgtgaaggccggcgtggtgggccctgagctgcacgagcagctgctgtctgctgagaaggctgtgacaggctacagagacccctacagcggcagcaccatcagcctcttccaggccatgcagaagggcctggtgctgcggcagcacggcatccggctgctggaggcccagatcgccactggaggcatcattgatcctgtgcacagccaccgggtgcctgtggatgtggcctaccagaggggctacttcagcgaggagatgaacagagtgctggccgaccccagtgatgacaccaagggcttctttgaccccaacacccatgagaacctgacctaccggcagctgctggagcgctgtgtggaggaccctgagaccggcctgcggctgctgcccctgaagggagctgagaaggccgaggtggtggagaccacccaggtgtacacagaggaggagacccggcgggcctttgaggagacccagattgacatccctgggggcggcagccacggcggcagcaccatgagcctgtgggaggtgatgcagagcgacctgatccctgaggagcagagggcccagctgatggctgacttccaggccggccgggtgaccaaggagaggatgatcatcatcatcatcgagatcatcgagaagacagagatcatccggcagcagggcctggccagctatgactatgtgagaagaaggctgacagctgaggacctgtttgaggcccgcatcatcagcctggagacctacaacctgctgcgggagggcaccaggagcctgcgggaggccctggaggccgagagcgcctggtgctacctgtatggaactggatctgtggccggcgtgtacctgcccggcagccggcagaccctgagcatctaccaggccctgaagaagggcctgctgtctgctgaggtggcccggctgctgctggaggcccaggccgccaccggcttcctgctggaccctgtgaagggggagcggctgactgtggatgaagctgtgaggaagggcctggtgggccctgagctgcatgaccggctgctgtctgctgagagagctgtgacaggctacagagacccctacacagagcagaccatcagcctcttccaggccatgaagaaggagctgatccccacagaggaggccctgcggctgctggatgcccagctggccaccggcggcatcgtggacccccggctgggcttccacctgcccctggaggtggcctaccagaggggctacctgaacaaggacacccatgaccagctgtctgagcccagcgaggtgcgctcctatgtggaccccagcacagatgagcggctgagctacacccagctgctgcggcgctgcagaagagatgatggcaccggccagctgctgctgcccctgagtgatgccaggaagctgaccttccggggcctgaggaagcagatcaccatggaggagctggtgcgcagccaggtgatggatgaggccacagccctgcagctgcgggagggcctgaccagcattgaggaggtgaccaagaacctgcagaagttcctggagggcaccagctgcatcgccggcgtgtttgtggatgccaccaaggagcggctgtctgtgtaccaggccatgaagaagggcatcatccggcccggcacagcctttgagctgctggaggcccaggccgccaccggctacgtgattgaccccatcaagggcctgaagctgactgtggaggaggccgtgaggatgggcatcgtgggccctgagttcaaggacaagctgctgtctgctgagagagctgtgacaggctacaaggacccctacagcggcaagctgatcagcctcttccaggccatgaagaagggcctcatcctgaaggaccacggcatccggctgctggaggcccagatcgccactggaggcatcattgatcctgaggagagccaccggctgcctgtggaggtggcctacaagaggggcctgtttgatgaggagatgaatgagatcctgacagaccccagtgatgacaccaagggcttctttgaccccaacacagaggagaacctgacctacctgcagctgatggagcgctgcatcacagacccccagacaggcctgtgcctgctgcccctgaaggagaagaagcgggagaggaagaccagcagcaagagctctgtgaggaagagaagagtggtgattgtggaccctgagaccgggaaggagatgtctgtgtatgaggcctacaggaagggcctgattgaccaccagacctacctggagctgtctgagcaggagtgtgagtgggaggagatcaccatcagcagcagtgatggagtggtgaagtccatgatcatcgacagaagaagtggccggcagtatgacattgatgatgccatcgccaagaacctgattgacagaagtgccctggaccagtaccgggccggcaccctgagcatcacagaatttgctgacatgctgtctggaaatgctgggggcttccgcagccgcagcagctctgtgggcagcagcagcagctaccccatcagccctgctgtgtccaggacccagctggcctcctggagcgaccccacagaggagactggacctgtggccggcatcctggacacagagaccctggagaaggtgtccatcacagaggccatgcacaggaacctggtggacaacatcaccggccagaggctgctggaggcccaggcctgcaccggcggcatcatcgaccccagcactggagagcgcttccctgtgacagatgctgtgaacaagggcctggtggacaagatcatggtggaccgcatcaacctggcccagaaggccttctgtggctttgaggaccccaggaccaagaccaagatgtctgctgcccaggccctgaagaagggctggctgtactatgaagctggccagcgcttcctggaggtgcagtacctgaccggcggcctcatcgagccagacaccccaggccgggtgcccctggatgaggccctgcagaggggcaccgtggatgccaggacagcccagaagctgagagatgtgggcgcctacagcaagtacctgacctgccccaagaccaagctgaagatctcctacaaggatgccctggaccgctccatggtggaggagggcaccggcctgcggctgctggaggccgccgcccagagcaccaagggctactacagcccctacagcgtgtctggcagcggcagcacagctggcagcaggacaggcagcaggacaggcagcagagctggcagccggcggggcagctttgatgccactggaagtggcttctccatgaccttcagcagcagcagctacagcagcagcggctatggaagaagatatgccagcggcagcagcgccagcctgggcggccctgagagcgctgtggcctag

SEQ ID NO: 164412 - DNA, 13644 bp, synthetic construct
  misc_feature 1..13644: note = Description of Artificial Sequence: Synthetic coding sequence
  source 1..13644: mol_type = other DNA
atggagcccagcggcagcctcttccccagcctggtggtggtgggccacgtggtgaccctggccgctgtgtggcactggaggcggggccgccgctgggcccaggatgagcaggatgagcgggacagagtgcagaagaagaccttcaccaagtgggtgaacaagcacctgatcaaggcccagaggcacatcagtgacctgtatgaggacctgagagatggccacaacctgatcagcctgctggaggtgctgagcggggacagcctgccccgggagaagggccgcatgaggttccacaagctgcagaatgtgcagatcgccctggactacctgcggcaccggcaggtgaagctggtgaacatcagaaatgatgacattgctgatggcaaccccaagctgaccctgggcctcatctggaccatcatcctgcacttccagatcagtgacatccaggtgtctggccagagcgaggacatgacagccaaggagaagctgctgctgtggagccagaggatggtggagggctaccagggcctgcgctgtgacaacttcaccagctcctggagagatggccgcctcttcaatgccatcatccaccgccacaagcccctgctgattgacatgaacaaggtgtaccggcagaccaacctggagaacctggaccaggccttctctgtggccgagcgggacctgggcgtgacccggctgctggaccctgaagatgtggatgtgccccagccagatgagaagagcatcatcacctacgtgagcagcctgtatgatgccatgccccgggtgcctgatgtgcaggatggagtgcgggccaatgagctgcagctgcgctggcaggagtaccgggagctggtgctgctgctgctgcagtggatgaggcaccacacagctgcctttgaggagcggcgcttccccagcagctttgaggagattgagatcctgtggagccagttcctgaagttcaaggagatggagctgcctgccaaggaggccgacaagaacagaagcaagggcatctaccagagcctggagggcgctgtgcaggccggccagctgaaggtgcccccaggctaccaccccctggatgtggagaaggagtggggcaagctgcacgtggccatcctggagcgggagaagcagctgcggagtgaatttgagcggctggagtgcctgcagagaattgtgaccaagctgcagatggaggccggcctgtgtgaggagcagctgaaccaggctgatgccctgctgcagagtgatgtgcggctgctggccgccggcaaggtgccccagagagctggggaggtggagcgggacctggacaaggctgacagcatgatccggctgctcttcaatgatgtgcagaccctgaaggatggccgccacccccagggcgagcagatgtaccgccgggtgtaccgcctgcacgagcggctggtggccatcagaacagagtacaacctgcggctgaaggccggcgtggccgccccagccacccaggtggcccaggtgaccctgcagagcgtgcagaggaggcctgagctggaggacagcaccctgcgctacctgcaggacctgctggcctgggtggaggagaaccagcaccgggtggatggagctgagtggggcgtggacctgcccagcgtggaggcccagctgggcagccaccggggcctgcaccagagcattgaggagttccgggccaagattgaaagagcccggagtgatgagggccagctgagccctgccaccaggggggcctacagagactgcctgggccgcctggacctgcagtatgccaagctgctgaacagcagcaaggcccggctgcggagcctggagagcctgcacagctttgtggccgccgccaccaaggagctgatgtggctgaatgagaaggaggaggaggaggtgggctttgactggagcgacaggaacaccaacatgacagccaagaaggagagctacagcgccctgatgagggagctggagctgaaggagaagaagatcaaggagctgcagaatgctggggaccggctgctgcgggaggaccacccagcccggcccaccgtggagagcttccaggccgccctgcagacccagtggagctggatgctgcagctgtgctgctgcatcgaggcccacctgaaggaaaatgctgcctacttccagttcttcagtgatgtgcgggaggccgagggccagctgcagaagctgcaggaggccctgcggaggaagtacagctgtgacagaagtgccaccgtgacccggctggaggacctgctgcaggatgcccaggatgagaaggagcagctgaatgagtacaagggccacctgagcggcctggccaagagggccaaggctgtggtgcagctgaagcccaggcacccagcccaccccatgaggggccgcctgcccctgctggccgtgtgtgactacaagcaggtggaggtgacagtgcacaagggagatgagtgccagctggtgggccctgcccagcccagccactggaaggtgctgagcagcagcggcagcgaggccgctgtgcccagcgtgtgcttcctggtgcccccacccaaccaggaggcccaggaggccgtgacccggctggaggcccagcaccaggccctggtgaccctgtggcaccagctgcacgtggacatgaagagcctgctggcctggcagagcctgcggagagatgtgcagctgatccgctcctggagcctggccaccttccgcaccctgaagccagaggagcagaggcaggccctgcacagcctggagctgcactaccaggccttcctgcgggacagccaggatgctgggggcttcggcccagaagatcggctgatggccgagcgggagtatggcagctgcagccaccactaccagcagctgctgcagagcctggagcagggcgcccaggaggagagccgctgccagcgctgcatcagcgagctgaaggacatccggctgcagctggaggcctgtgagaccaggacagtgcaccggctgcggctgcccctggacaaggagcccgcccgggagtgtgcccagagaattgctgagcagcagaaggcccaggccgaggtggagggcctgggcaagggcgtggcccggctgtctgctgaggccgagaaggtgctggccctgcctgagcccagccctgctgcccccaccctgcggtctgagctggagctgaccctgggcaagctggagcaggtgcgcagcctgagcgccatctacctggagaagctgaagaccatcagcctggtgatccggggcacccagggcgctgaggaggtgctgcgggcccacgaggagcagctgaaggaggcccaggccgtgcctgccaccctgcctgagctggaggccaccaaggccagcctgaagaagctgcgggcccaggccgaggcccagcagcccacctttgatgccctgagagatgagctgcggggggcccaggaggtgggggagcggctgcagcagagacatggagagagagatgtggaggtggagcgctggagggagcgggtggcccagctgctggagcgctggcaggccgtgctggcccagacagatgtgcggcagcgggagctggagcagctgggccggcagctgcgctactaccgggagagcgctgaccccctgggcgcctggctgcaggatgcccggcggcggcaggagcagatccaggccatgcccctggccgacagccaggccgtgcgggagcagctgcggcaggagcaggccctgctggaggagattgaaagacatggagagaaggtggaggagtgccagagatttgccaagcagtacatcaatgccatcaaggactatgagctgcagctggtgacctacaaggcccagctggagcctgtggccagccctgccaagaagcccaaggtgcagagcggcagcgagagcgtcatccaggagtatgtggacctgcggacccactacagcgagctgaccaccctgaccagccagtacatcaagttcatcagcgagaccctgcggaggatggaggaggaggagcggctggccgagcagcagagagctgaggagcgggagcggctggccgaggtggaggccgccctggagaagcagaggcagctggccgaggcccacgcccaggccaaggcccaggccgagcgggaggccaaggagctgcagcagaggatgcaggaggaggtggtgagaagagaggaggccgctgtggatgcccagcagcagaagaggagcatccaggaggagctgcagcagctgcggcagagcagcgaggccgagatccaggccaaggcccggcaggccgaggccgctgagaggagccggctgcgcatcgaggaggagatccgggtggtgcggctgcagctggaggccacagagcggcagagaggaggagctgagggggagctgcaggccctgcgggcccgggcagaggaggccgaggcccagaagaggcaggcccaggaggaggccgagcggctgcggcggcaggtgcaggatgagagccagaggaagaggcaggccgaggtggagctggccagccgggtgaaggccgaggccgaggccgcccgggagaagcagagggccctgcaggccctggaggagctgcggctgcaggccgaggaggccgagcggcggctgcggcaggccgaggtggagcgggcccggcaggtgcaggtggccctggagacagcccagaggtctgctgaggccgagctgcagagcaagagggccagctttgctgagaagacagcccagctggagaggagcctgcaggaggagcacgtggccgtggcccagctgcgggaggaggccgagcggcgggcccagcagcaggccgaggccgagcgggcccgggaggaggccgagcgggagctggagcgctggcagctgaaggccaatgaggccctgcggctgcggctgcaggccgaggaggtggcccagcagaagagcctggcccaggccgaggccgagaagcagaaggaggaggccgagcgggaggccaggagaagaggcaaggccgaggagcaggccgtgcggcagcgggagctggccgagcaggagctggagaagcagaggcagctggccgagggcacagcccagcagaggctggccgctgagcaggagctgatccggctgcgggcagagacagagcagggcgagcagcagaggcagctgctggaggaggagctggcccggctgcagcgggaggccgctgctgccacccagaagaggcaggagctggaggccgagctggccaaggtgcgggcagagatggaggtgctgctggccagcaaggcccgggcagaggaggagagccgcagcaccagcgagaagagcaagcagaggctggaggccgaggccggccgcttccgggagctggccgaggaggccgcccggctgcgggccctggccgaggaggccaagaggcagaggcagctggccgaggaggatgctgcccggcagagagctgaggccgagcgggtgctggccgagaagctggccgccatcggggaggccacccggctgaagacagaggccgagatcgccctgaaggagaaggaggccgagaatgaaaggctgcggcggctggctgaagatgaggccttccagaggcggcggctggaggagcaggccgcccagcacaaggctgacatcgaggagcggctggcccagctgaggaaggccagtgacagcgagctggagcggcagaagggcctggtggaggacaccctgcggcagaggcggcaggtggaggaggagatcctggccctgaaggccagctttgagaaggctgctgctgggaaggccgagctggagctggagctgggccgcatccgcagcaatgctgaggacaccctgcggagcaaggagcaggccgagctggaggccgcccggcagaggcagctggccgctgaggaggagaggagaagaagagaggccgaggagcgggtgcagaagagcctggccgctgaggaggaggccgcccggcagaggaaggccgccctggaggaggtggagcggctgaaggccaaggtggaggaggcccggcggctgcgggagcgggcagagcaggagagcgcccggcagctgcagctggcccaggaggccgcccagaagaggctgcaggccgaggagaaggcccacgcctttgctgtgcagcagaaggagcaggagctgcagcagaccctgcagcaggagcagagcgtgctggaccagctgcggggggaggccgaggccgccaggagagctgctgaggaggccgaggaggcccgggtgcaggccgagcgggaggccgcccagagccggcggcaggtggaggaggccgagcggctgaagcagagcgctgaggagcaggcccaggcccgggcccaggcccaggccgctgctgagaagctgaggaaggaggccgagcaggaggccgcccggcgggcccaggccgagcaggccgccctgcggcagaagcaggccgcagatgctgagatggagaagcacaagaagtttgctgagcagaccctgcggcagaaggcccaggtggagcaggagctgaccaccctgcggctgcagctggaggagacagaccaccagaagaacctgctggatgaggagctgcagaggctgaaggccgaggccacagaagctgcccggcagaggagccaggtggaggaggagctgttctctgtgcgggtgcagatggaggagctgagcaagctgaaggccagaattgaagctgagaacagagccctgatcctgcgggacaaggacaacacccagcgcttcctgcaggaggaggccgagaagatgaagcaggtggccgaggaggccgcccggctgtctgtggccgcccaggaggccgcccggctgcggcagctggccgaggaggacctggcccagcagagggccctggccgagaagatgctgaaggagaagatgcaggccgtgcaggaggccacccggctgaaggccgaggccgagctgctgcagcagcagaaggagctggcccaggagcaggcccggcggctgcaggaggacaaggagcagatggcccagcagctggccgaggagacccagggcttccagaggaccctggaggccgagcggcagaggcagctggagatgtctgctgaggccgagcggctgaagctgcgggtggccgagatgagccgggcccaggcccgggcagaagaagatgcccagcgcttcaggaagcaggccgaggagattggagagaagctgcacaggacagagctggccacccaggagaaggtgaccctggtgcagaccctggagatccagaggcagcagagcgaccatgatgctgagcggctgcgggaggccatcgccgagctggagcgggagaaggagaagctgcagcaggaggccaagctgctgcagctgaagtctgaggagatgcagacagtgcagcaggagcagctgctgcaggagacccaggccctgcagcagagcttcctgtctgagaaggacagcctgctgcagcgggagcgcttcatcgagcaggagaaggccaagctggagcagctgttccaggatgaggtggccaaggcccagcagctgcgggaggagcagcagaggcagcagcagcagatggagcaggagcggcagaggctggtggcctccatggaggaggcccggcggcggcagcacgaggccgaggagggcgtgcggaggaagcaggaggagctgcagcagctggagcagcagaggcggcagcaggaggagctgctggccgaggagaaccagaggctgcgggagcagctgcagctgctggaggagcagcacagagctgccctggcccacagcgaggaggtgacagccagccaggtggccgccaccaagaccctgcccaacggcagagatgccctggatggccctgctgctgaggccgagcctgagcacagctttgatggcctgcggaggaaggtgtctgcccagaggctgcaggaggccggcatcctgtctgctgaggagctgcagaggctggcccagggccacaccaccgtggatgagctggcccggcgggaggatgtgcgccactacctgcagggccgcagcagcattgctggcctgctgctgaaggccaccaatgagaagctgtctgtgtatgctgccctgcagaggcagctgctgagccctggaacagccctgatcctgctggaggcccaggccgccagcggcttcctgctggaccctgtgaggaacagaaggctgactgtgaatgaagctgtgaaggagggcgtggtgggccctgagctgcaccacaagctgctgtctgctgagagagctgtgacaggctacaaggacccctacacaggccagcagatcagcctcttccaggccatgcagaagggcctgattgtgcgggagcacggcatccggctgctggaggcccagatcgccaccggcggcgtcatcgaccctgtgcacagccaccgggtgcctgtggatgtggcctacagaagaggctactttgatgaggagatgaacagagtgctggccgaccccagtgatgacaccaagggcttctttgaccccaacacccatgagaacctgacctacctgcagctgctggagcgctgtgtggaggaccctgagaccggcctgtgcctgctgcccctgacagacaaggccgccaagggcggggagctggtgtacacagattctgaggccagagatgtgtttgagaaggccaccgtgtctgccccctttgggaagttccagggcaagacagtgaccatctgggagatcatcaacagcgagtacttcaccgctgagcagaggcgggacctgctgcggcagttcagaacaggccgcatcaccgtggagaagatcatcaagatcatcatcaccgtggtggaggagcaggagcagaagggccgcctgtgctttgagggcctgcggagcctggtgcctgctgctgagctgctggagagcagggtcatcgaccgggagctgtaccagcagctgcagagaggagagaggtctgtgagagatgtggccgaggtggacacagtgagaagagccctgcggggggccaacgtgattgctggggtgtggctggaggaggccggccagaagctgagcatctacaatgccctgaagaaggacctgctgcccagcgacatggctgtggccctgctggaggcccaggccggcaccggccacatcatcgaccctgccaccagcgcccggctgactgtggatgaagctgtgcgggccggcctggtgggccctgagttccacgagaagctgctgtctgctgagaaggctgtgacaggctacagagacccctacacaggccagagcgtgtccctcttccaggccctgaagaagggcctcatcccccgggagcagggcctgcggctgctggatgcccagctgagcactggaggcatcgtggaccccagcaagagccaccgggtgcccctggatgtggcctgtgcccggggctgcctggatgaggagaccagccgggccctgagcgcccccagggcagatgccaaggcctacagcgaccccagcactggagagcccgccacctacggggagctgcagcagcgctgcaggccagaccagctgaccggcctgagcctgctgcccctgtctgagaaggccgcccgggcccggcaggaggagctgtacagcgagctgcaggcccgggagacctttgagaagacccctgtggaggtgcctgtgggcggcttcaagggccgcacagtgacagtgtgggagctgatcagcagcgagtacttcaccgctgagcagaggcaggagctgctgcggcagttcagaacaggcaaggtgacagtggagaaggtgatcaagatcctgatcaccatcgtggaggaggtggagaccctgcggcaggagcggctgtccttcagcggcctgcgggcccctgtgcctgccagcgagctgctggccagcggcgtgctgagccgggcccagtttgagcagctgaaggatggcaagaccaccgtgaaggacctgtctgagctgggctctgtgaggaccctgctgcagggcagcggctgcctggccggcatctacctggaggacaccaaggagaaggtgtccatctatgaggccatgaggcggggcctgctgcgggccaccacagctgccctgctgctggaggcccaggccgccaccggcttcctggtggaccctgtgaggaaccagaggctgtatgtgcatgaggccgtgaaggccggcgtggtgggccctgagctgcacgagcagctgctgtctgctgagaaggctgtgacaggctacagagacccctacagcggcagcaccatcagcctcttccaggccatgcagaagggcctggtgctgcggcagcacggcatccggctgctggaggcccagatcgccactggaggcatcattgatcctgtgcacagccaccgggtgcctgtggatgtggcctaccagaggggctacttcagcgaggagatgaacagagtgctggccgaccccagtgatgacaccaagggcttctttgaccccaacacccatgagaacctgacctaccggcagctgctggagcgctgtgtggaggaccctgagaccggcctgcggctgctgcccctgaagggagctgagaaggccgaggtggtggagaccacccaggtgtacacagaggaggagacccggcgggcctttgaggagacccagattgacatccctgggggcggcagccacggcggcagcaccatgagcctgtgggaggtgatgcagagcgacctgatccctgaggagcagagggcccagctgatggctgacttccaggccggccgggtgaccaaggagaggatgatcatcatcatcatcgagatcatcgagaagacagagatcatccggcagcagggcctggccagctatgactatgtgagaagaaggctgacagctgaggacctgtttgaggcccgcatcatcagcctggagacctacaacctgctgcgggagggcaccaggagcctgcgggaggccctggaggccgagagcgcctggtgctacctgtatggaactggatctgtggccggcgtgtacctgcccggcagccggcagaccctgagcatctaccaggccctgaagaagggcctgctgtctgctgaggtggcccggctgctgctggaggcccaggccgccaccggcttcctgctggaccctgtgaagggggagcggctgactgtggatgaagctgtgaggaagggcctggtgggccctgagctgcatgaccggctgctgtctgctgagagagctgtgacaggctacagagacccctacacagagcagaccatcagcctcttccaggccatgaagaaggagctgatccccacagaggaggccctgcggctgctggatgcccagctggccaccggcggcatcgtggacccccggctgggcttccacctgcccctggaggtggcctaccagaggggctacctgaacaaggacacccatgaccagctgtctgagcccagcgaggtgcgctcctatgtggaccccagcacagatgagcggctgagctacacccagctgctgcggcgctgcagaagagatgatggcaccggccagctgctgctgcccctgagtgatgccaggaagctgaccttccggggcctgaggaagcagatcaccatggaggagctggtgcgcagccaggtgatggatgaggccacagccctgcagctgcgggagggcctgaccagcattgaggaggtgaccaagaacctgcagaagttcctggagggcaccagctgcatcgccggcgtgtttgtggatgccaccaaggagcggctgtctgtgtaccaggccatgaagaagggcatcatccggcccggcacagcctttgagctgctggaggcccaggccgccaccggctacgtgattgaccccatcaagggcctgaagctgactgtggaggaggccgtgaggatgggcatcgtgggccctgagttcaaggacaagctgctgtctgctgagagagctgtgacaggctacaaggacccctacagcggcaagctgatcagcctcttccaggccatgaagaagggcctcatcctgaaggaccacggcatccggctgctggaggcccagatcgccactggaggcatcattgatcctgaggagagccaccggctgcctgtggaggtggcctacaagaggggcctgtttgatgaggagatgaatgagatcctgacagaccccagtgatgacaccaagggcttctttgaccccaacacagaggagaacctgacctacctgcagctgatggagcgctgcatcacagacccccagacaggcctgtgcctgctgcccctgaaggagaagaagcgggagaggaagaccagcagcaagagctctgtgaggaagagaagagtggtgattgtggaccctgagaccgggaaggagatgtctgtgtatgaggcctacaggaagggcctgattgaccaccagacctacctggagctgtctgagcaggagtgtgagtgggaggagatcaccatcagcagcagtgatggagtggtgaagtccatgatcatcgacagaagaagtggccggcagtatgacattgatgatgccatcgccaagaacctgattgacagaagtgccctggaccagtaccgggccggcaccctgagcatcacagaatttgctgacatgctgtctggaaatgctgggggcttccgcagccgcagcagctctgtgggcagcagcagcagctaccccatcagccctgctgtgtccaggacccagctggcctcctggagcgaccccacagaggagactggacctgtggccggcatcctggacacagagaccctggagaaggtgtccatcacagaggccatgcacaggaacctggtggacaacatcaccggccagaggctgctggaggcccaggcctgcaccggcggcatcatcgaccccagcactggagagcgcttccctgtgacagatgctgtgaacaagggcctggtggacaagatcatggtggaccgcatcaacctggcccagaaggccttctgtggctttgaggaccccaggaccaagaccaagatgtctgctgcccaggccctgaagaagggctggctgtactatgaagctggccagcgcttcctggaggtgcagtacctgaccggcggcctcatcgagccagacaccccaggccgggtgcccctggatgaggccctgcagaggggcaccgtggatgccaggacagcccagaagctgagagatgtgggcgcctacagcaagtacctgacctgccccaagaccaagctgaagatctcctacaaggatgccctggaccgctccatggtggaggagggcaccggcctgcggctgctggaggccgccgcccagagcaccaagggctactacagcccctacagcgtgtctggcagcggcagcacagctggcagcaggacaggcagcaggacaggcagcagagctggcagccggcggggcagctttgatgccactggaagtggcttctccatgaccttcagcagcagcagctacagcagcagcggctatggaagaagatatgccagcggcagcagcgccagcctgggcggccctgagagcgctgtggcctag

SEQ ID NO: 164413 - DNA, 13578 bp, synthetic construct
  misc_feature 1..13578: note = Description of Artificial Sequence: Synthetic coding sequence
  source 1..13578: mol_type = other DNA
atggaccccagccgggccatccagaatgagatcagcagcctgaaggatgagcgggacagagtgcagaagaagaccttcaccaagtgggtgaacaagcacctgatcaaggcccagaggcacatcagtgacctgtatgaggacctgagagatggccacaacctgatcagcctgctggaggtgctgagcggggacagcctgccccgggagaagggccgcatgaggttccacaagctgcagaatgtgcagatcgccctggactacctgcggcaccggcaggtgaagctggtgaacatcagaaatgatgacattgctgatggcaaccccaagctgaccctgggcctcatctggaccatcatcctgcacttccagatcagtgacatccaggtgtctggccagagcgaggacatgacagccaaggagaagctgctgctgtggagccagaggatggtggagggctaccagggcctgcgctgtgacaacttcaccagctcctggagagatggccgcctcttcaatgccatcatccaccgccacaagcccctgctgattgacatgaacaaggtgtaccggcagaccaacctggagaacctggaccaggccttctctgtggccgagcgggacctgggcgtgacccggctgctggaccctgaagatgtggatgtgccccagccagatgagaagagcatcatcacctacgtgagcagcctgtatgatgccatgccccgggtgcctgatgtgcaggatggagtgcgggccaatgagctgcagctgcgctggcaggagtaccgggagctggtgctgctgctgctgcagtggatgaggcaccacacagctgcctttgaggagcggcgcttccccagcagctttgaggagattgagatcctgtggagccagttcctgaagttcaaggagatggagctgcctgccaaggaggccgacaagaacagaagcaagggcatctaccagagcctggagggcgctgtgcaggccggccagctgaaggtgcccccaggctaccaccccctggatgtggagaaggagtggggcaagctgcacgtggccatcctggagcgggagaagcagctgcggagtgaatttgagcggctggagtgcctgcagagaattgtgaccaagctgcagatggaggccggcctgtgtgaggagcagctgaaccaggctgatgccctgctgcagagtgatgtgcggctgctggccgccggcaaggtgccccagagagctggggaggtggagcgggacctggacaaggctgacagcatgatccggctgctcttcaatgatgtgcagaccctgaaggatggccgccacccccagggcgagcagatgtaccgccgggtgtaccgcctgcacgagcggctggtggccatcagaacagagtacaacctgcggctgaaggccggcgtggccgccccagccacccaggtggcccaggtgaccctgcagagcgtgcagaggaggcctgagctggaggacagcaccctgcgctacctgcaggacctgctggcctgggtggaggagaaccagcaccgggtggatggagctgagtggggcgtggacctgcccagcgtggaggcccagctgggcagccaccggggcctgcaccagagcattgaggagttccgggccaagattgaaagagcccggagtgatgagggccagctgagccctgccaccaggggggcctacagagactgcctgggccgcctggacctgcagtatgccaagctgctgaacagcagcaaggcccggctgcggagcctggagagcctgcacagctttgtggccgccgccaccaaggagctgatgtggctgaatgagaaggaggaggaggaggtgggctttgactggagcgacaggaacaccaacatgacagccaagaaggagagctacagcgccctgatgagggagctggagctgaaggagaagaagatcaaggagctgcagaatgctggggaccggctgctgcgggaggaccacccagcccggcccaccgtggagagcttccaggccgccctgcagacccagtggagctggatgctgcagctgtgctgctgcatcgaggcccacctgaaggaaaatgctgcctacttccagttcttcagtgatgtgcgggaggccgagggccagctgcagaagctgcaggaggccctgcggaggaagtacagctgtgacagaagtgccaccgtgacccggctggaggacctgctgcaggatgcccaggatgagaaggagcagctgaatgagtacaagggccacctgagcggcctggccaagagggccaaggctgtggtgcagctgaagcccaggcacccagcccaccccatgaggggccgcctgcccctgctggccgtgtgtgactacaagcaggtggaggtgacagtgcacaagggagatgagtgccagctggtgggccctgcccagcccagccactggaaggtgctgagcagcagcggcagcgaggccgctgtgcccagcgtgtgcttcctggtgcccccacccaaccaggaggcccaggaggccgtgacccggctggaggcccagcaccaggccctggtgaccctgtggcaccagctgcacgtggacatgaagagcctgctggcctggcagagcctgcggagagatgtgcagctgatccgctcctggagcctggccaccttccgcaccctgaagccagaggagcagaggcaggccctgcacagcctggagctgcactaccaggccttcctgcgggacagccaggatgctgggggcttcggcccagaagatcggctgatggccgagcgggagtatggcagctgcagccaccactaccagcagctgctgcagagcctggagcagggcgcccaggaggagagccgctgccagcgctgcatcagcgagctgaaggacatccggctgcagctggaggcctgtgagaccaggacagtgcaccggctgcggctgcccctggacaaggagcccgcccgggagtgtgcccagagaattgctgagcagcagaaggcccaggccgaggtggagggcctgggcaagggcgtggcccggctgtctgctgaggccgagaaggtgctggccctgcctgagcccagccctgctgcccccaccctgcggtctgagctggagctgaccctgggcaagctggagcaggtgcgcagcctgagcgccatctacctggagaagctgaagaccatcagcctggtgatccggggcacccagggcgctgaggaggtgctgcgggcccacgaggagcagctgaaggaggcccaggccgtgcctgccaccctgcctgagctggaggccaccaaggccagcctgaagaagctgcgggcccaggccgaggcccagcagcccacctttgatgccctgagagatgagctgcggggggcccaggaggtgggggagcggctgcagcagagacatggagagagagatgtggaggtggagcgctggagggagcgggtggcccagctgctggagcgctggcaggccgtgctggcccagacagatgtgcggcagcgggagctggagcagctgggccggcagctgcgctactaccgggagagcgctgaccccctgggcgcctggctgcaggatgcccggcggcggcaggagcagatccaggccatgcccctggccgacagccaggccgtgcgggagcagctgcggcaggagcaggccctgctggaggagattgaaagacatggagagaaggtggaggagtgccagagatttgccaagcagtacatcaatgccatcaaggactatgagctgcagctggtgacctacaaggcccagctggagcctgtggccagccctgccaagaagcccaaggtgcagagcggcagcgagagcgtcatccaggagtatgtggacctgcggacccactacagcgagctgaccaccctgaccagccagtacatcaagttcatcagcgagaccctgcggaggatggaggaggaggagcggctggccgagcagcagagagctgaggagcgggagcggctggccgaggtggaggccgccctggagaagcagaggcagctggccgaggcccacgcccaggccaaggcccaggccgagcgggaggccaaggagctgcagcagaggatgcaggaggaggtggtgagaagagaggaggccgctgtggatgcccagcagcagaagaggagcatccaggaggagctgcagcagctgcggcagagcagcgaggccgagatccaggccaaggcccggcaggccgaggccgctgagaggagccggctgcgcatcgaggaggagatccgggtggtgcggctgcagctggaggccacagagcggcagagaggaggagctgagggggagctgcaggccctgcgggcccgggcagaggaggccgaggcccagaagaggcaggcccaggaggaggccgagcggctgcggcggcaggtgcaggatgagagccagaggaagaggcaggccgaggtggagctggccagccgggtgaaggccgaggccgaggccgcccgggagaagcagagggccctgcaggccctggaggagctgcggctgcaggccgaggaggccgagcggcggctgcggcaggccgaggtggagcgggcccggcaggtgcaggtggccctggagacagcccagaggtctgctgaggccgagctgcagagcaagagggccagctttgctgagaagacagcccagctggagaggagcctgcaggaggagcacgtggccgtggcccagctgcgggaggaggccgagcggcgggcccagcagcaggccgaggccgagcgggcccgggaggaggccgagcgggagctggagcgctggcagctgaaggccaatgaggccctgcggctgcggctgcaggccgaggaggtggcccagcagaagagcctggcccaggccgaggccgagaagcagaaggaggaggccgagcgggaggccaggagaagaggcaaggccgaggagcaggccgtgcggcagcgggagctggccgagcaggagctggagaagcagaggcagctggccgagggcacagcccagcagaggctggccgctgagcaggagctgatccggctgcgggcagagacagagcagggcgagcagcagaggcagctgctggaggaggagctggcccggctgcagcgggaggccgctgctgccacccagaagaggcaggagctggaggccgagctggccaaggtgcgggcagagatggaggtgctgctggccagcaaggcccgggcagaggaggagagccgcagcaccagcgagaagagcaagcagaggctggaggccgaggccggccgcttccgggagctggccgaggaggccgcccggctgcgggccctggccgaggaggccaagaggcagaggcagctggccgaggaggatgctgcccggcagagagctgaggccgagcgggtgctggccgagaagctggccgccatcggggaggccacccggctgaagacagaggccgagatcgccctgaaggagaaggaggccgagaatgaaaggctgcggcggctggctgaagatgaggccttccagaggcggcggctggaggagcaggccgcccagcacaaggctgacatcgaggagcggctggcccagctgaggaaggccagtgacagcgagctggagcggcagaagggcctggtggaggacaccctgcggcagaggcggcaggtggaggaggagatcctggccctgaaggccagctttgagaaggctgctgctgggaaggccgagctggagctggagctgggccgcatccgcagcaatgctgaggacaccctgcggagcaaggagcaggccgagctggaggccgcccggcagaggcagctggccgctgaggaggagaggagaagaagagaggccgaggagcgggtgcagaagagcctggccgctgaggaggaggccgcccggcagaggaaggccgccctggaggaggtggagcggctgaaggccaaggtggaggaggcccggcggctgcgggagcgggcagagcaggagagcgcccggcagctgcagctggcccaggaggccgcccagaagaggctgcaggccgaggagaaggcccacgcctttgctgtgcagcagaaggagcaggagctgcagcagaccctgcagcaggagcagagcgtgctggaccagctgcggggggaggccgaggccgccaggagagctgctgaggaggccgaggaggcccgggtgcaggccgagcgggaggccgcccagagccggcggcaggtggaggaggccgagcggctgaagcagagcgctgaggagcaggcccaggcccgggcccaggcccaggccgctgctgagaagctgaggaaggaggccgagcaggaggccgcccggcgggcccaggccgagcaggccgccctgcggcagaagcaggccgcagatgctgagatggagaagcacaagaagtttgctgagcagaccctgcggcagaaggcccaggtggagcaggagctgaccaccctgcggctgcagctggaggagacagaccaccagaagaacctgctggatgaggagctgcagaggctgaaggccgaggccacagaagctgcccggcagaggagccaggtggaggaggagctgttctctgtgcgggtgcagatggaggagctgagcaagctgaaggccagaattgaagctgagaacagagccctgatcctgcgggacaaggacaacacccagcgcttcctgcaggaggaggccgagaagatgaagcaggtggccgaggaggccgcccggctgtctgtggccgcccaggaggccgcccggctgcggcagctggccgaggaggacctggcccagcagagggccctggccgagaagatgctgaaggagaagatgcaggccgtgcaggaggccacccggctgaaggccgaggccgagctgctgcagcagcagaaggagctggcccaggagcaggcccggcggctgcaggaggacaaggagcagatggcccagcagctggccgaggagacccagggcttccagaggaccctggaggccgagcggcagaggcagctggagatgtctgctgaggccgagcggctgaagctgcgggtggccgagatgagccgggcccaggcccgggcagaagaagatgcccagcgcttcaggaagcaggccgaggagattggagagaagctgcacaggacagagctggccacccaggagaaggtgaccctggtgcagaccctggagatccagaggcagcagagcgaccatgatgctgagcggctgcgggaggccatcgccgagctggagcgggagaaggagaagctgcagcaggaggccaagctgctgcagctgaagtctgaggagatgcagacagtgcagcaggagcagctgctgcaggagacccaggccctgcagcagagcttcctgtctgagaaggacagcctgctgcagcgggagcgcttcatcgagcaggagaaggccaagctggagcagctgttccaggatgaggtggccaaggcccagcagctgcgggaggagcagcagaggcagcagcagcagatggagcaggagcggcagaggctggtggcctccatggaggaggcccggcggcggcagcacgaggccgaggagggcgtgcggaggaagcaggaggagctgcagcagctggagcagcagaggcggcagcaggaggagctgctggccgaggagaaccagaggctgcgggagcagctgcagctgctggaggagcagcacagagctgccctggcccacagcgaggaggtgacagccagccaggtggccgccaccaagaccctgcccaacggcagagatgccctggatggccctgctgctgaggccgagcctgagcacagctttgatggcctgcggaggaaggtgtctgcccagaggctgcaggaggccggcatcctgtctgctgaggagctgcagaggctggcccagggccacaccaccgtggatgagctggcccggcgggaggatgtgcgccactacctgcagggccgcagcagcattgctggcctgctgctgaaggccaccaatgagaagctgtctgtgtatgctgccctgcagaggcagctgctgagccctggaacagccctgatcctgctggaggcccaggccgccagcggcttcctgctggaccctgtgaggaacagaaggctgactgtgaatgaagctgtgaaggagggcgtggtgggccctgagctgcaccacaagctgctgtctgctgagagagctgtgacaggctacaaggacccctacacaggccagcagatcagcctcttccaggccatgcagaagggcctgattgtgcgggagcacggcatccggctgctggaggcccagatcgccaccggcggcgtcatcgaccctgtgcacagccaccgggtgcctgtggatgtggcctacagaagaggctactttgatgaggagatgaacagagtgctggccgaccccagtgatgacaccaagggcttctttgaccccaacacccatgagaacctgacctacctgcagctgctggagcgctgtgtggaggaccctgagaccggcctgtgcctgctgcccctgacagacaaggccgccaagggcggggagctggtgtacacagattctgaggccagagatgtgtttgagaaggccaccgtgtctgccccctttgggaagttccagggcaagacagtgaccatctgggagatcatcaacagcgagtacttcaccgctgagcagaggcgggacctgctgcggcagttcagaacaggccgcatcaccgtggagaagatcatcaagatcatcatcaccgtggtggaggagcaggagcagaagggccgcctgtgctttgagggcctgcggagcctggtgcctgctgctgagctgctggagagcagggtcatcgaccgggagctgtaccagcagctgcagagaggagagaggtctgtgagagatgtggccgaggtggacacagtgagaagagccctgcggggggccaacgtgattgctggggtgtggctggaggaggccggccagaagctgagcatctacaatgccctgaagaaggacctgctgcccagcgacatggctgtggccctgctggaggcccaggccggcaccggccacatcatcgaccctgccaccagcgcccggctgactgtggatgaagctgtgcgggccggcctggtgggccctgagttccacgagaagctgctgtctgctgagaaggctgtgacaggctacagagacccctacacaggccagagcgtgtccctcttccaggccctgaagaagggcctcatcccccgggagcagggcctgcggctgctggatgcccagctgagcactggaggcatcgtggaccccagcaagagccaccgggtgcccctggatgtggcctgtgcccggggctgcctggatgaggagaccagccgggccctgagcgcccccagggcagatgccaaggcctacagcgaccccagcactggagagcccgccacctacggggagctgcagcagcgctgcaggccagaccagctgaccggcctgagcctgctgcccctgtctgagaaggccgcccgggcccggcaggaggagctgtacagcgagctgcaggcccgggagacctttgagaagacccctgtggaggtgcctgtgggcggcttcaagggccgcacagtgacagtgtgggagctgatcagcagcgagtacttcaccgctgagcagaggcaggagctgctgcggcagttcagaacaggcaaggtgacagtggagaaggtgatcaagatcctgatcaccatcgtggaggaggtggagaccctgcggcaggagcggctgtccttcagcggcctgcgggcccctgtgcctgccagcgagctgctggccagcggcgtgctgagccgggcccagtttgagcagctgaaggatggcaagaccaccgtgaaggacctgtctgagctgggctctgtgaggaccctgctgcagggcagcggctgcctggccggcatctacctggaggacaccaaggagaaggtgtccatctatgaggccatgaggcggggcctgctgcgggccaccacagctgccctgctgctggaggcccaggccgccaccggcttcctggtggaccctgtgaggaaccagaggctgtatgtgcatgaggccgtgaaggccggcgtggtgggccctgagctgcacgagcagctgctgtctgctgagaaggctgtgacaggctacagagacccctacagcggcagcaccatcagcctcttccaggccatgcagaagggcctggtgctgcggcagcacggcatccggctgctggaggcccagatcgccactggaggcatcattgatcctgtgcacagccaccgggtgcctgtggatgtggcctaccagaggggctacttcagcgaggagatgaacagagtgctggccgaccccagtgatgacaccaagggcttctttgaccccaacacccatgagaacctgacctaccggcagctgctggagcgctgtgtggaggaccctgagaccggcctgcggctgctgcccctgaagggagctgagaaggccgaggtggtggagaccacccaggtgtacacagaggaggagacccggcgggcctttgaggagacccagattgacatccctgggggcggcagccacggcggcagcaccatgagcctgtgggaggtgatgcagagcgacctgatccctgaggagcagagggcccagctgatggctgacttccaggccggccgggtgaccaaggagaggatgatcatcatcatcatcgagatcatcgagaagacagagatcatccggcagcagggcctggccagctatgactatgtgagaagaaggctgacagctgaggacctgtttgaggcccgcatcatcagcctggagacctacaacctgctgcgggagggcaccaggagcctgcgggaggccctggaggccgagagcgcctggtgctacctgtatggaactggatctgtggccggcgtgtacctgcccggcagccggcagaccctgagcatctaccaggccctgaagaagggcctgctgtctgctgaggtggcccggctgctgctggaggcccaggccgccaccggcttcctgctggaccctgtgaagggggagcggctgactgtggatgaagctgtgaggaagggcctggtgggccctgagctgcatgaccggctgctgtctgctgagagagctgtgacaggctacagagacccctacacagagcagaccatcagcctcttccaggccatgaagaaggagctgatccccacagaggaggccctgcggctgctggatgcccagctggccaccggcggcatcgtggacccccggctgggcttccacctgcccctggaggtggcctaccagaggggctacctgaacaaggacacccatgaccagctgtctgagcccagcgaggtgcgctcctatgtggaccccagcacagatgagcggctgagctacacccagctgctgcggcgctgcagaagagatgatggcaccggccagctgctgctgcccctgagtgatgccaggaagctgaccttccggggcctgaggaagcagatcaccatggaggagctggtgcgcagccaggtgatggatgaggccacagccctgcagctgcgggagggcctgaccagcattgaggaggtgaccaagaacctgcagaagttcctggagggcaccagctgcatcgccggcgtgtttgtggatgccaccaaggagcggctgtctgtgtaccaggccatgaagaagggcatcatccggcccggcacagcctttgagctgctggaggcccaggccgccaccggctacgtgattgaccccatcaagggcctgaagctgactgtggaggaggccgtgaggatgggcatcgtgggccctgagttcaaggacaagctgctgtctgctgagagagctgtgacaggctacaaggacccctacagcggcaagctgatcagcctcttccaggccatgaagaagggcctcatcctgaaggaccacggcatccggctgctggaggcccagatcgccactggaggcatcattgatcctgaggagagccaccggctgcctgtggaggtggcctacaagaggggcctgtttgatgaggagatgaatgagatcctgacagaccccagtgatgacaccaagggcttctttgaccccaacacagaggagaacctgacctacctgcagctgatggagcgctgcatcacagacccccagacaggcctgtgcctgctgcccctgaaggagaagaagcgggagaggaagaccagcagcaagagctctgtgaggaagagaagagtggtgattgtggaccctgagaccgggaaggagatgtctgtgtatgaggcctacaggaagggcctgattgaccaccagacctacctggagctgtctgagcaggagtgtgagtgggaggagatcaccatcagcagcagtgatggagtggtgaagtccatgatcatcgacagaagaagtggccggcagtatgacattgatgatgccatcgccaagaacctgattgacagaagtgccctggaccagtaccgggccggcaccctgagcatcacagaatttgctgacatgctgtctggaaatgctgggggcttccgcagccgcagcagctctgtgggcagcagcagcagctaccccatcagccctgctgtgtccaggacccagctggcctcctggagcgaccccacagaggagactggacctgtggccggcatcctggacacagagaccctggagaaggtgtccatcacagaggccatgcacaggaacctggtggacaacatcaccggccagaggctgctggaggcccaggcctgcaccggcggcatcatcgaccccagcactggagagcgcttccctgtgacagatgctgtgaacaagggcctggtggacaagatcatggtggaccgcatcaacctggcccagaaggccttctgtggctttgaggaccccaggaccaagaccaagatgtctgctgcccaggccctgaagaagggctggctgtactatgaagctggccagcgcttcctggaggtgcagtacctgaccggcggcctcatcgagccagacaccccaggccgggtgcccctggatgaggccctgcagaggggcaccgtggatgccaggacagcccagaagctgagagatgtgggcgcctacagcaagtacctgacctgccccaagaccaagctgaagatctcctacaaggatgccctggaccgctccatggtggaggagggcaccggcctgcggctgctggaggccgccgcccagagcaccaagggctactacagcccctacagcgtgtctggcagcggcagcacagctggcagcaggacaggcagcaggacaggcagcagagctggcagccggcggggcagctttgatgccactggaagtggcttctccatgaccttcagcagcagcagctacagcagcagcggctatggaagaagatatgccagcggcagcagcgccagcctgggcggccctgagagcgctgtggcctag

SEQ ID NO: 164414 - DNA, 13602 bp, synthetic construct
  misc_feature 1..13602: note = Description of Artificial Sequence: Synthetic coding sequence
  source 1..13602: mol_type = other DNA
atggccggccccctgcctgatgagcaggacttcatccaggcctatgaggaggtgcgggagaagtacaaggatgagcgggacagagtgcagaagaagaccttcaccaagtgggtgaacaagcacctgatcaaggcccagaggcacatcagtgacctgtatgaggacctgagagatggccacaacctgatcagcctgctggaggtgctgagcggggacagcctgccccgggagaagggccgcatgaggttccacaagctgcagaatgtgcagatcgccctggactacctgcggcaccggcaggtgaagctggtgaacatcagaaatgatgacattgctgatggcaaccccaagctgaccctgggcctcatctggaccatcatcctgcacttccagatcagtgacatccaggtgtctggccagagcgaggacatgacagccaaggagaagctgctgctgtggagccagaggatggtggagggctaccagggcctgcgctgtgacaacttcaccagctcctggagagatggccgcctcttcaatgccatcatccaccgccacaagcccctgctgattgacatgaacaaggtgtaccggcagaccaacctggagaacctggaccaggccttctctgtggccgagcgggacctgggcgtgacccggctgctggaccctgaagatgtggatgtgccccagccagatgagaagagcatcatcacctacgtgagcagcctgtatgatgccatgccccgggtgcctgatgtgcaggatggagtgcgggccaatgagctgcagctgcgctggcaggagtaccgggagctggtgctgctgctgctgcagtggatgaggcaccacacagctgcctttgaggagcggcgcttccccagcagctttgaggagattgagatcctgtggagccagttcctgaagttcaaggagatggagctgcctgccaaggaggccgacaagaacagaagcaagggcatctaccagagcctggagggcgctgtgcaggccggccagctgaaggtgcccccaggctaccaccccctggatgtggagaaggagtggggcaagctgcacgtggccatcctggagcgggagaagcagctgcggagtgaatttgagcggctggagtgcctgcagagaattgtgaccaagctgcagatggaggccggcctgtgtgaggagcagctgaaccaggctgatgccctgctgcagagtgatgtgcggctgctggccgccggcaaggtgccccagagagctggggaggtggagcgggacctggacaaggctgacagcatgatccggctgctcttcaatgatgtgcagaccctgaaggatggccgccacccccagggcgagcagatgtaccgccgggtgtaccgcctgcacgagcggctggtggccatcagaacagagtacaacctgcggctgaaggccggcgtggccgccccagccacccaggtggcccaggtgaccctgcagagcgtgcagaggaggcctgagctggaggacagcaccctgcgctacctgcaggacctgctggcctgggtggaggagaaccagcaccgggtggatggagctgagtggggcgtggacctgcccagcgtggaggcccagctgggcagccaccggggcctgcaccagagcattgaggagttccgggccaagattgaaagagcccggagtgatgagggccagctgagccctgccaccaggggggcctacagagactgcctgggccgcctggacctgcagtatgccaagctgctgaacagcagcaaggcccggctgcggagcctggagagcctgcacagctttgtggccgccgccaccaaggagctgatgtggctgaatgagaaggaggaggaggaggtgggctttgactggagcgacaggaacaccaacatgacagccaagaaggagagctacagcgccctgatgagggagctggagctgaaggagaagaagatcaaggagctgcagaatgctggggaccggctgctgcgggaggaccacccagcccggcccaccgtggagagcttccaggccgccctgcagacccagtggagctggatgctgcagctgtgctgctgcatcgaggcccacctgaaggaaaatgctgcctacttccagttcttcagtgatgtgcgggaggccgagggccagctgcagaagctgcaggaggccctgcggaggaagtacagctgtgacagaagtgccaccgtgacccggctggaggacctgctgcaggatgcccaggatgagaaggagcagctgaatgagtacaagggccacctgagcggcctggccaagagggccaaggctgtggtgcagctgaagcccaggcacccagcccaccccatgaggggccgcctgcccctgctggccgtgtgtgactacaagcaggtggaggtgacagtgcacaagggagatgagtgccagctggtgggccctgcccagcccagccactggaaggtgctgagcagcagcggcagcgaggccgctgtgcccagcgtgtgcttcctggtgcccccacccaaccaggaggcccaggaggccgtgacccggctggaggcccagcaccaggccctggtgaccctgtggcaccagctgcacgtggacatgaagagcctgctggcctggcagagcctgcggagagatgtgcagctgatccgctcctggagcctggccaccttccgcaccctgaagccagaggagcagaggcaggccctgcacagcctggagctgcactaccaggccttcctgcgggacagccaggatgctgggggcttcggcccagaagatcggctgatggccgagcgggagtatggcagctgcagccaccactaccagcagctgctgcagagcctggagcagggcgcccaggaggagagccgctgccagcgctgcatcagcgagctgaaggacatccggctgcagctggaggcctgtgagaccaggacagtgcaccggctgcggctgcccctggacaaggagcccgcccgggagtgtgcccagagaattgctgagcagcagaaggcccaggccgaggtggagggcctgggcaagggcgtggcccggctgtctgctgaggccgagaaggtgctggccctgcctgagcccagccctgctgcccccaccctgcggtctgagctggagctgaccctgggcaagctggagcaggtgcgcagcctgagcgccatctacctggagaagctgaagaccatcagcctggtgatccggggcacccagggcgctgaggaggtgctgcgggcccacgaggagcagctgaaggaggcccaggccgtgcctgccaccctgcctgagctggaggccaccaaggccagcctgaagaagctgcgggcccaggccgaggcccagcagcccacctttgatgccctgagagatgagctgcggggggcccaggaggtgggggagcggctgcagcagagacatggagagagagatgtggaggtggagcgctggagggagcgggtggcccagctgctggagcgctggcaggccgtgctggcccagacagatgtgcggcagcgggagctggagcagctgggccggcagctgcgctactaccgggagagcgctgaccccctgggcgcctggctgcaggatgcccggcggcggcaggagcagatccaggccatgcccctggccgacagccaggccgtgcgggagcagctgcggcaggagcaggccctgctggaggagattgaaagacatggagagaaggtggaggagtgccagagatttgccaagcagtacatcaatgccatcaaggactatgagctgcagctggtgacctacaaggcccagctggagcctgtggccagccctgccaagaagcccaaggtgcagagcggcagcgagagcgtcatccaggagtatgtggacctgcggacccactacagcgagctgaccaccctgaccagccagtacatcaagttcatcagcgagaccctgcggaggatggaggaggaggagcggctggccgagcagcagagagctgaggagcgggagcggctggccgaggtggaggccgccctggagaagcagaggcagctggccgaggcccacgcccaggccaaggcccaggccgagcgggaggccaaggagctgcagcagaggatgcaggaggaggtggtgagaagagaggaggccgctgtggatgcccagcagcagaagaggagcatccaggaggagctgcagcagctgcggcagagcagcgaggccgagatccaggccaaggcccggcaggccgaggccgctgagaggagccggctgcgcatcgaggaggagatccgggtggtgcggctgcagctggaggccacagagcggcagagaggaggagctgagggggagctgcaggccctgcgggcccgggcagaggaggccgaggcccagaagaggcaggcccaggaggaggccgagcggctgcggcggcaggtgcaggatgagagccagaggaagaggcaggccgaggtggagctggccagccgggtgaaggccgaggccgaggccgcccgggagaagcagagggccctgcaggccctggaggagctgcggctgcaggccgaggaggccgagcggcggctgcggcaggccgaggtggagcgggcccggcaggtgcaggtggccctggagacagcccagaggtctgctgaggccgagctgcagagcaagagggccagctttgctgagaagacagcccagctggagaggagcctgcaggaggagcacgtggccgtggcccagctgcgggaggaggccgagcggcgggcccagcagcaggccgaggccgagcgggcccgggaggaggccgagcgggagctggagcgctggcagctgaaggccaatgaggccctgcggctgcggctgcaggccgaggaggtggcccagcagaagagcctggcccaggccgaggccgagaagcagaaggaggaggccgagcgggaggccaggagaagaggcaaggccgaggagcaggccgtgcggcagcgggagctggccgagcaggagctggagaagcagaggcagctggccgagggcacagcccagcagaggctggccgctgagcaggagctgatccggctgcgggcagagacagagcagggcgagcagcagaggcagctgctggaggaggagctggcccggctgcagcgggaggccgctgctgccacccagaagaggcaggagctggaggccgagctggccaaggtgcgggcagagatggaggtgctgctggccagcaaggcccgggcagaggaggagagccgcagcaccagcgagaagagcaagcagaggctggaggccgaggccggccgcttccgggagctggccgaggaggccgcccggctgcgggccctggccgaggaggccaagaggcagaggcagctggccgaggaggatgctgcccggcagagagctgaggccgagcgggtgctggccgagaagctggccgccatcggggaggccacccggctgaagacagaggccgagatcgccctgaaggagaaggaggccgagaatgaaaggctgcggcggctggctgaagatgaggccttccagaggcggcggctggaggagcaggccgcccagcacaaggctgacatcgaggagcggctggcccagctgaggaaggccagtgacagcgagctggagcggcagaagggcctggtggaggacaccctgcggcagaggcggcaggtggaggaggagatcctggccctgaaggccagctttgagaaggctgctgctgggaaggccgagctggagctggagctgggccgcatccgcagcaatgctgaggacaccctgcggagcaaggagcaggccgagctggaggccgcccggcagaggcagctggccgctgaggaggagaggagaagaagagaggccgaggagcgggtgcagaagagcctggccgctgaggaggaggccgcccggcagaggaaggccgccctggaggaggtggagcggctgaaggccaaggtggaggaggcccggcggctgcgggagcgggcagagcaggagagcgcccggcagctgcagctggcccaggaggccgcccagaagaggctgcaggccgaggagaaggcccacgcctttgctgtgcagcagaaggagcaggagctgcagcagaccctgcagcaggagcagagcgtgctggaccagctgcggggggaggccgaggccgccaggagagctgctgaggaggccgaggaggcccgggtgcaggccgagcgggaggccgcccagagccggcggcaggtggaggaggccgagcggctgaagcagagcgctgaggagcaggcccaggcccgggcccaggcccaggccgctgctgagaagctgaggaaggaggccgagcaggaggccgcccggcgggcccaggccgagcaggccgccctgcggcagaagcaggccgcagatgctgagatggagaagcacaagaagtttgctgagcagaccctgcggcagaaggcccaggtggagcaggagctgaccaccctgcggctgcagctggaggagacagaccaccagaagaacctgctggatgaggagctgcagaggctgaaggccgaggccacagaagctgcccggcagaggagccaggtggaggaggagctgttctctgtgcgggtgcagatggaggagctgagcaagctgaaggccagaattgaagctgagaacagagccctgatcctgcgggacaaggacaacacccagcgcttcctgcaggaggaggccgagaagatgaagcaggtggccgaggaggccgcccggctgtctgtggccgcccaggaggccgcccggctgcggcagctggccgaggaggacctggcccagcagagggccctggccgagaagatgctgaaggagaagatgcaggccgtgcaggaggccacccggctgaaggccgaggccgagctgctgcagcagcagaaggagctggcccaggagcaggcccggcggctgcaggaggacaaggagcagatggcccagcagctggccgaggagacccagggcttccagaggaccctggaggccgagcggcagaggcagctggagatgtctgctgaggccgagcggctgaagctgcgggtggccgagatgagccgggcccaggcccgggcagaagaagatgcccagcgcttcaggaagcaggccgaggagattggagagaagctgcacaggacagagctggccacccaggagaaggtgaccctggtgcagaccctggagatccagaggcagcagagcgaccatgatgctgagcggctgcgggaggccatcgccgagctggagcgggagaaggagaagctgcagcaggaggccaagctgctgcagctgaagtctgaggagatgcagacagtgcagcaggagcagctgctgcaggagacccaggccctgcagcagagcttcctgtctgagaaggacagcctgctgcagcgggagcgcttcatcgagcaggagaaggccaagctggagcagctgttccaggatgaggtggccaaggcccagcagctgcgggaggagcagcagaggcagcagcagcagatggagcaggagcggcagaggctggtggcctccatggaggaggcccggcggcggcagcacgaggccgaggagggcgtgcggaggaagcaggaggagctgcagcagctggagcagcagaggcggcagcaggaggagctgctggccgaggagaaccagaggctgcgggagcagctgcagctgctggaggagcagcacagagctgccctggcccacagcgaggaggtgacagccagccaggtggccgccaccaagaccctgcccaacggcagagatgccctggatggccctgctgctgaggccgagcctgagcacagctttgatggcctgcggaggaaggtgtctgcccagaggctgcaggaggccggcatcctgtctgctgaggagctgcagaggctggcccagggccacaccaccgtggatgagctggcccggcgggaggatgtgcgccactacctgcagggccgcagcagcattgctggcctgctgctgaaggccaccaatgagaagctgtctgtgtatgctgccctgcagaggcagctgctgagccctggaacagccctgatcctgctggaggcccaggccgccagcggcttcctgctggaccctgtgaggaacagaaggctgactgtgaatgaagctgtgaaggagggcgtggtgggccctgagctgcaccacaagctgctgtctgctgagagagctgtgacaggctacaaggacccctacacaggccagcagatcagcctcttccaggccatgcagaagggcctgattgtgcgggagcacggcatccggctgctggaggcccagatcgccaccggcggcgtcatcgaccctgtgcacagccaccgggtgcctgtggatgtggcctacagaagaggctactttgatgaggagatgaacagagtgctggccgaccccagtgatgacaccaagggcttctttgaccccaacacccatgagaacctgacctacctgcagctgctggagcgctgtgtggaggaccctgagaccggcctgtgcctgctgcccctgacagacaaggccgccaagggcggggagctggtgtacacagattctgaggccagagatgtgtttgagaaggccaccgtgtctgccccctttgggaagttccagggcaagacagtgaccatctgggagatcatcaacagcgagtacttcaccgctgagcagaggcgggacctgctgcggcagttcagaacaggccgcatcaccgtggagaagatcatcaagatcatcatcaccgtggtggaggagcaggagcagaagggccgcctgtgctttgagggcctgcggagcctggtgcctgctgctgagctgctggagagcagggtcatcgaccgggagctgtaccagcagctgcagagaggagagaggtctgtgagagatgtggccgaggtggacacagtgagaagagccctgcggggggccaacgtgattgctggggtgtggctggaggaggccggccagaagctgagcatctacaatgccctgaagaaggacctgctgcccagcgacatggctgtggccctgctggaggcccaggccggcaccggccacatcatcgaccctgccaccagcgcccggctgactgtggatgaagctgtgcgggccggcctggtgggccctgagttccacgagaagctgctgtctgctgagaaggctgtgacaggctacagagacccctacacaggccagagcgtgtccctcttccaggccctgaagaagggcctcatcccccgggagcagggcctgcggctgctggatgcccagctgagcactggaggcatcgtggaccccagcaagagccaccgggtgcccctggatgtggcctgtgcccggggctgcctggatgaggagaccagccgggccctgagcgcccccagggcagatgccaaggcctacagcgaccccagcactggagagcccgccacctacggggagctgcagcagcgctgcaggccagaccagctgaccggcctgagcctgctgcccctgtctgagaaggccgcccgggcccggcaggaggagctgtacagcgagctgcaggcccgggagacctttgagaagacccctgtggaggtgcctgtgggcggcttcaagggccgcacagtgacagtgtgggagctgatcagcagcgagtacttcaccgctgagcagaggcaggagctgctgcggcagttcagaacaggcaaggtgacagtggagaaggtgatcaagatcctgatcaccatcgtggaggaggtggagaccctgcggcaggagcggctgtccttcagcggcctgcgggcccctgtgcctgccagcgagctgctggccagcggcgtgctgagccgggcccagtttgagcagctgaaggatggcaagaccaccgtgaaggacctgtctgagctgggctctgtgaggaccctgctgcagggcagcggctgcctggccggcatctacctggaggacaccaaggagaaggtgtccatctatgaggccatgaggcggggcctgctgcgggccaccacagctgccctgctgctggaggcccaggccgccaccggcttcctggtggaccctgtgaggaaccagaggctgtatgtgcatgaggccgtgaaggccggcgtggtgggccctgagctgcacgagcagctgctgtctgctgagaaggctgtgacaggctacagagacccctacagcggcagcaccatcagcctcttccaggccatgcagaagggcctggtgctgcggcagcacggcatccggctgctggaggcccagatcgccactggaggcatcattgatcctgtgcacagccaccgggtgcctgtggatgtggcctaccagaggggctacttcagcgaggagatgaacagagtgctggccgaccccagtgatgacaccaagggcttctttgaccccaacacccatgagaacctgacctaccggcagctgctggagcgctgtgtggaggaccctgagaccggcctgcggctgctgcccctgaagggagctgagaaggccgaggtggtggagaccacccaggtgtacacagaggaggagacccggcgggcctttgaggagacccagattgacatccctgggggcggcagccacggcggcagcaccatgagcctgtgggaggtgatgcagagcgacctgatccctgaggagcagagggcccagctgatggctgacttccaggccggccgggtgaccaaggagaggatgatcatcatcatcatcgagatcatcgagaagacagagatcatccggcagcagggcctggccagctatgactatgtgagaagaaggctgacagctgaggacctgtttgaggcccgcatcatcagcctggagacctacaacctgctgcgggagggcaccaggagcctgcgggaggccctggaggccgagagcgcctggtgctacctgtatggaactggatctgtggccggcgtgtacctgcccggcagccggcagaccctgagcatctaccaggccctgaagaagggcctgctgtctgctgaggtggcccggctgctgctggaggcccaggccgccaccggcttcctgctggaccctgtgaagggggagcggctgactgtggatgaagctgtgaggaagggcctggtgggccctgagctgcatgaccggctgctgtctgctgagagagctgtgacaggctacagagacccctacacagagcagaccatcagcctcttccaggccatgaagaaggagctgatccccacagaggaggccctgcggctgctggatgcccagctggccaccggcggcatcgtggacccccggctgggcttccacctgcccctggaggtggcctaccagaggggctacctgaacaaggacacccatgaccagctgtctgagcccagcgaggtgcgctcctatgtggaccccagcacagatgagcggctgagctacacccagctgctgcggcgctgcagaagagatgatggcaccggccagctgctgctgcccctgagtgatgccaggaagctgaccttccggggcctgaggaagcagatcaccatggaggagctggtgcgcagccaggtgatggatgaggccacagccctgcagctgcgggagggcctgaccagcattgaggaggtgaccaagaacctgcagaagttcctggagggcaccagctgcatcgccggcgtgtttgtggatgccaccaaggagcggctgtctgtgtaccaggccatgaagaagggcatcatccggcccggcacagcctttgagctgctggaggcccaggccgccaccggctacgtgattgaccccatcaagggcctgaagctgactgtggaggaggccgtgaggatgggcatcgtgggccctgagttcaaggacaagctgctgtctgctgagagagctgtgacaggctacaaggacccctacagcggcaagctgatcagcctcttccaggccatgaagaagggcctcatcctgaaggaccacggcatccggctgctggaggcccagatcgccactggaggcatcattgatcctgaggagagccaccggctgcctgtggaggtggcctacaagaggggcctgtttgatgaggagatgaatgagatcctgacagaccccagtgatgacaccaagggcttctttgaccccaacacagaggagaacctgacctacctgcagctgatggagcgctgcatcacagacccccagacaggcctgtgcctgctgcccctgaaggagaagaagcgggagaggaagaccagcagcaagagctctgtgaggaagagaagagtggtgattgtggaccctgagaccgggaaggagatgtctgtgtatgaggcctacaggaagggcctgattgaccaccagacctacctggagctgtctgagcaggagtgtgagtgggaggagatcaccatcagcagcagtgatggagtggtgaagtccatgatcatcgacagaagaagtggccggcagtatgacattgatgatgccatcgccaagaacctgattgacagaagtgccctggaccagtaccgggccggcaccctgagcatcacagaatttgctgacatgctgtctggaaatgctgggggcttccgcagccgcagcagctctgtgggcagcagcagcagctaccccatcagccctgctgtgtccaggacccagctggcctcctggagcgaccccacagaggagactggacctgtggccggcatcctggacacagagaccctggagaaggtgtccatcacagaggccatgcacaggaacctggtggacaacatcaccggccagaggctgctggaggcccaggcctgcaccggcggcatcatcgaccccagcactggagagcgcttccctgtgacagatgctgtgaacaagggcctggtggacaagatcatggtggaccgcatcaacctggcccagaaggccttctgtggctttgaggaccccaggaccaagaccaagatgtctgctgcccaggccctgaagaagggctggctgtactatgaagctggccagcgcttcctggaggtgcagtacctgaccggcggcctcatcgagccagacaccccaggccgggtgcccctggatgaggccctgcagaggggcaccgtggatgccaggacagcccagaagctgagagatgtgggcgcctacagcaagtacctgacctgccccaagaccaagctgaagatctcctacaaggatgccctggaccgctccatggtggaggagggcaccggcctgcggctgctggaggccgccgcccagagcaccaagggctactacagcccctacagcgtgtctggcagcggcagcacagctggcagcaggacaggcagcaggacaggcagcagagctggcagccggcggggcagctttgatgccactggaagtggcttctccatgaccttcagcagcagcagctacagcagcagcggctatggaagaagatatgccagcggcagcagcgccagcctgggcggccctgagagcgctgtggcctag

SEQ ID NO: 164415 - DNA, 13656 bp, synthetic construct
  misc_feature 1..13656: note = Description of Artificial Sequence: Synthetic coding sequence
  source 1..13656: mol_type = other DNA
atgtctggggccggcggggcctttgccagcccccgggaggtgctgctggagcggccctgctggctggatggcggctgtgagcccgcccggcggggctacctgtaccagcagctgtgctgcgtggatgagcgggacagagtgcagaagaagaccttcaccaagtgggtgaacaagcacctgatcaaggcccagaggcacatcagtgacctgtatgaggacctgagagatggccacaacctgatcagcctgctggaggtgctgagcggggacagcctgccccgggagaagggccgcatgaggttccacaagctgcagaatgtgcagatcgccctggactacctgcggcaccggcaggtgaagctggtgaacatcagaaatgatgacattgctgatggcaaccccaagctgaccctgggcctcatctggaccatcatcctgcacttccagatcagtgacatccaggtgtctggccagagcgaggacatgacagccaaggagaagctgctgctgtggagccagaggatggtggagggctaccagggcctgcgctgtgacaacttcaccagctcctggagagatggccgcctcttcaatgccatcatccaccgccacaagcccctgctgattgacatgaacaaggtgtaccggcagaccaacctggagaacctggaccaggccttctctgtggccgagcgggacctgggcgtgacccggctgctggaccctgaagatgtggatgtgccccagccagatgagaagagcatcatcacctacgtgagcagcctgtatgatgccatgccccgggtgcctgatgtgcaggatggagtgcgggccaatgagctgcagctgcgctggcaggagtaccgggagctggtgctgctgctgctgcagtggatgaggcaccacacagctgcctttgaggagcggcgcttccccagcagctttgaggagattgagatcctgtggagccagttcctgaagttcaaggagatggagctgcctgccaaggaggccgacaagaacagaagcaagggcatctaccagagcctggagggcgctgtgcaggccggccagctgaaggtgcccccaggctaccaccccctggatgtggagaaggagtggggcaagctgcacgtggccatcctggagcgggagaagcagctgcggagtgaatttgagcggctggagtgcctgcagagaattgtgaccaagctgcagatggaggccggcctgtgtgaggagcagctgaaccaggctgatgccctgctgcagagtgatgtgcggctgctggccgccggcaaggtgccccagagagctggggaggtggagcgggacctggacaaggctgacagcatgatccggctgctcttcaatgatgtgcagaccctgaaggatggccgccacccccagggcgagcagatgtaccgccgggtgtaccgcctgcacgagcggctggtggccatcagaacagagtacaacctgcggctgaaggccggcgtggccgccccagccacccaggtggcccaggtgaccctgcagagcgtgcagaggaggcctgagctggaggacagcaccctgcgctacctgcaggacctgctggcctgggtggaggagaaccagcaccgggtggatggagctgagtggggcgtggacctgcccagcgtggaggcccagctgggcagccaccggggcctgcaccagagcattgaggagttccgggccaagattgaaagagcccggagtgatgagggccagctgagccctgccaccaggggggcctacagagactgcctgggccgcctggacctgcagtatgccaagctgctgaacagcagcaaggcccggctgcggagcctggagagcctgcacagctttgtggccgccgccaccaaggagctgatgtggctgaatgagaaggaggaggaggaggtgggctttgactggagcgacaggaacaccaacatgacagccaagaaggagagctacagcgccctgatgagggagctggagctgaaggagaagaagatcaaggagctgcagaatgctggggaccggctgctgcgggaggaccacccagcccggcccaccgtggagagcttccaggccgccctgcagacccagtggagctggatgctgcagctgtgctgctgcatcgaggcccacctgaaggaaaatgctgcctacttccagttcttcagtgatgtgcgggaggccgagggccagctgcagaagctgcaggaggccctgcggaggaagtacagctgtgacagaagtgccaccgtgacccggctggaggacctgctgcaggatgcccaggatgagaaggagcagctgaatgagtacaagggccacctgagcggcctggccaagagggccaaggctgtggtgcagctgaagcccaggcacccagcccaccccatgaggggccgcctgcccctgctggccgtgtgtgactacaagcaggtggaggtgacagtgcacaagggagatgagtgccagctggtgggccctgcccagcccagccactggaaggtgctgagcagcagcggcagcgaggccgctgtgcccagcgtgtgcttcctggtgcccccacccaaccaggaggcccaggaggccgtgacccggctggaggcccagcaccaggccctggtgaccctgtggcaccagctgcacgtggacatgaagagcctgctggcctggcagagcctgcggagagatgtgcagctgatccgctcctggagcctggccaccttccgcaccctgaagccagaggagcagaggcaggccctgcacagcctggagctgcactaccaggccttcctgcgggacagccaggatgctgggggcttcggcccagaagatcggctgatggccgagcgggagtatggcagctgcagccaccactaccagcagctgctgcagagcctggagcagggcgcccaggaggagagccgctgccagcgctgcatcagcgagctgaaggacatccggctgcagctggaggcctgtgagaccaggacagtgcaccggctgcggctgcccctggacaaggagcccgcccgggagtgtgcccagagaattgctgagcagcagaaggcccaggccgaggtggagggcctgggcaagggcgtggcccggctgtctgctgaggccgagaaggtgctggccctgcctgagcccagccctgctgcccccaccctgcggtctgagctggagctgaccctgggcaagctggagcaggtgcgcagcctgagcgccatctacctggagaagctgaagaccatcagcctggtgatccggggcacccagggcgctgaggaggtgctgcgggcccacgaggagcagctgaaggaggcccaggccgtgcctgccaccctgcctgagctggaggccaccaaggccagcctgaagaagctgcgggcccaggccgaggcccagcagcccacctttgatgccctgagagatgagctgcggggggcccaggaggtgggggagcggctgcagcagagacatggagagagagatgtggaggtggagcgctggagggagcgggtggcccagctgctggagcgctggcaggccgtgctggcccagacagatgtgcggcagcgggagctggagcagctgggccggcagctgcgctactaccgggagagcgctgaccccctgggcgcctggctgcaggatgcccggcggcggcaggagcagatccaggccatgcccctggccgacagccaggccgtgcgggagcagctgcggcaggagcaggccctgctggaggagattgaaagacatggagagaaggtggaggagtgccagagatttgccaagcagtacatcaatgccatcaaggactatgagctgcagctggtgacctacaaggcccagctggagcctgtggccagccctgccaagaagcccaaggtgcagagcggcagcgagagcgtcatccaggagtatgtggacctgcggacccactacagcgagctgaccaccctgaccagccagtacatcaagttcatcagcgagaccctgcggaggatggaggaggaggagcggctggccgagcagcagagagctgaggagcgggagcggctggccgaggtggaggccgccctggagaagcagaggcagctggccgaggcccacgcccaggccaaggcccaggccgagcgggaggccaaggagctgcagcagaggatgcaggaggaggtggtgagaagagaggaggccgctgtggatgcccagcagcagaagaggagcatccaggaggagctgcagcagctgcggcagagcagcgaggccgagatccaggccaaggcccggcaggccgaggccgctgagaggagccggctgcgcatcgaggaggagatccgggtggtgcggctgcagctggaggccacagagcggcagagaggaggagctgagggggagctgcaggccctgcgggcccgggcagaggaggccgaggcccagaagaggcaggcccaggaggaggccgagcggctgcggcggcaggtgcaggatgagagccagaggaagaggcaggccgaggtggagctggccagccgggtgaaggccgaggccgaggccgcccgggagaagcagagggccctgcaggccctggaggagctgcggctgcaggccgaggaggccgagcggcggctgcggcaggccgaggtggagcgggcccggcaggtgcaggtggccctggagacagcccagaggtctgctgaggccgagctgcagagcaagagggccagctttgctgagaagacagcccagctggagaggagcctgcaggaggagcacgtggccgtggcccagctgcgggaggaggccgagcggcgggcccagcagcaggccgaggccgagcgggcccgggaggaggccgagcgggagctggagcgctggcagctgaaggccaatgaggccctgcggctgcggctgcaggccgaggaggtggcccagcagaagagcctggcccaggccgaggccgagaagcagaaggaggaggccgagcgggaggccaggagaagaggcaaggccgaggagcaggccgtgcggcagcgggagctggccgagcaggagctggagaagcagaggcagctggccgagggcacagcccagcagaggctggccgctgagcaggagctgatccggctgcgggcagagacagagcagggcgagcagcagaggcagctgctggaggaggagctggcccggctgcagcgggaggccgctgctgccacccagaagaggcaggagctggaggccgagctggccaaggtgcgggcagagatggaggtgctgctggccagcaaggcccgggcagaggaggagagccgcagcaccagcgagaagagcaagcagaggctggaggccgaggccggccgcttccgggagctggccgaggaggccgcccggctgcgggccctggccgaggaggccaagaggcagaggcagctggccgaggaggatgctgcccggcagagagctgaggccgagcgggtgctggccgagaagctggccgccatcggggaggccacccggctgaagacagaggccgagatcgccctgaaggagaaggaggccgagaatgaaaggctgcggcggctggctgaagatgaggccttccagaggcggcggctggaggagcaggccgcccagcacaaggctgacatcgaggagcggctggcccagctgaggaaggccagtgacagcgagctggagcggcagaagggcctggtggaggacaccctgcggcagaggcggcaggtggaggaggagatcctggccctgaaggccagctttgagaaggctgctgctgggaaggccgagctggagctggagctgggccgcatccgcagcaatgctgaggacaccctgcggagcaaggagcaggccgagctggaggccgcccggcagaggcagctggccgctgaggaggagaggagaagaagagaggccgaggagcgggtgcagaagagcctggccgctgaggaggaggccgcccggcagaggaaggccgccctggaggaggtggagcggctgaaggccaaggtggaggaggcccggcggctgcgggagcgggcagagcaggagagcgcccggcagctgcagctggcccaggaggccgcccagaagaggctgcaggccgaggagaaggcccacgcctttgctgtgcagcagaaggagcaggagctgcagcagaccctgcagcaggagcagagcgtgctggaccagctgcggggggaggccgaggccgccaggagagctgctgaggaggccgaggaggcccgggtgcaggccgagcgggaggccgcccagagccggcggcaggtggaggaggccgagcggctgaagcagagcgctgaggagcaggcccaggcccgggcccaggcccaggccgctgctgagaagctgaggaaggaggccgagcaggaggccgcccggcgggcccaggccgagcaggccgccctgcggcagaagcaggccgcagatgctgagatggagaagcacaagaagtttgctgagcagaccctgcggcagaaggcccaggtggagcaggagctgaccaccctgcggctgcagctggaggagacagaccaccagaagaacctgctggatgaggagctgcagaggctgaaggccgaggccacagaagctgcccggcagaggagccaggtggaggaggagctgttctctgtgcgggtgcagatggaggagctgagcaagctgaaggccagaattgaagctgagaacagagccctgatcctgcgggacaaggacaacacccagcgcttcctgcaggaggaggccgagaagatgaagcaggtggccgaggaggccgcccggctgtctgtggccgcccaggaggccgcccggctgcggcagctggccgaggaggacctggcccagcagagggccctggccgagaagatgctgaaggagaagatgcaggccgtgcaggaggccacccggctgaaggccgaggccgagctgctgcagcagcagaaggagctggcccaggagcaggcccggcggctgcaggaggacaaggagcagatggcccagcagctggccgaggagacccagggcttccagaggaccctggaggccgagcggcagaggcagctggagatgtctgctgaggccgagcggctgaagctgcgggtggccgagatgagccgggcccaggcccgggcagaagaagatgcccagcgcttcaggaagcaggccgaggagattggagagaagctgcacaggacagagctggccacccaggagaaggtgaccctggtgcagaccctggagatccagaggcagcagagcgaccatgatgctgagcggctgcgggaggccatcgccgagctggagcgggagaaggagaagctgcagcaggaggccaagctgctgcagctgaagtctgaggagatgcagacagtgcagcaggagcagctgctgcaggagacccaggccctgcagcagagcttcctgtctgagaaggacagcctgctgcagcgggagcgcttcatcgagcaggagaaggccaagctggagcagctgttccaggatgaggtggccaaggcccagcagctgcgggaggagcagcagaggcagcagcagcagatggagcaggagcggcagaggctggtggcctccatggaggaggcccggcggcggcagcacgaggccgaggagggcgtgcggaggaagcaggaggagctgcagcagctggagcagcagaggcggcagcaggaggagctgctggccgaggagaaccagaggctgcgggagcagctgcagctgctggaggagcagcacagagctgccctggcccacagcgaggaggtgacagccagccaggtggccgccaccaagaccctgcccaacggcagagatgccctggatggccctgctgctgaggccgagcctgagcacagctttgatggcctgcggaggaaggtgtctgcccagaggctgcaggaggccggcatcctgtctgctgaggagctgcagaggctggcccagggccacaccaccgtggatgagctggcccggcgggaggatgtgcgccactacctgcagggccgcagcagcattgctggcctgctgctgaaggccaccaatgagaagctgtctgtgtatgctgccctgcagaggcagctgctgagccctggaacagccctgatcctgctggaggcccaggccgccagcggcttcctgctggaccctgtgaggaacagaaggctgactgtgaatgaagctgtgaaggagggcgtggtgggccctgagctgcaccacaagctgctgtctgctgagagagctgtgacaggctacaaggacccctacacaggccagcagatcagcctcttccaggccatgcagaagggcctgattgtgcgggagcacggcatccggctgctggaggcccagatcgccaccggcggcgtcatcgaccctgtgcacagccaccgggtgcctgtggatgtggcctacagaagaggctactttgatgaggagatgaacagagtgctggccgaccccagtgatgacaccaagggcttctttgaccccaacacccatgagaacctgacctacctgcagctgctggagcgctgtgtggaggaccctgagaccggcctgtgcctgctgcccctgacagacaaggccgccaagggcggggagctggtgtacacagattctgaggccagagatgtgtttgagaaggccaccgtgtctgccccctttgggaagttccagggcaagacagtgaccatctgggagatcatcaacagcgagtacttcaccgctgagcagaggcgggacctgctgcggcagttcagaacaggccgcatcaccgtggagaagatcatcaagatcatcatcaccgtggtggaggagcaggagcagaagggccgcctgtgctttgagggcctgcggagcctggtgcctgctgctgagctgctggagagcagggtcatcgaccgggagctgtaccagcagctgcagagaggagagaggtctgtgagagatgtggccgaggtggacacagtgagaagagccctgcggggggccaacgtgattgctggggtgtggctggaggaggccggccagaagctgagcatctacaatgccctgaagaaggacctgctgcccagcgacatggctgtggccctgctggaggcccaggccggcaccggccacatcatcgaccctgccaccagcgcccggctgactgtggatgaagctgtgcgggccggcctggtgggccctgagttccacgagaagctgctgtctgctgagaaggctgtgacaggctacagagacccctacacaggccagagcgtgtccctcttccaggccctgaagaagggcctcatcccccgggagcagggcctgcggctgctggatgcccagctgagcactggaggcatcgtggaccccagcaagagccaccgggtgcccctggatgtggcctgtgcccggggctgcctggatgaggagaccagccgggccctgagcgcccccagggcagatgccaaggcctacagcgaccccagcactggagagcccgccacctacggggagctgcagcagcgctgcaggccagaccagctgaccggcctgagcctgctgcccctgtctgagaaggccgcccgggcccggcaggaggagctgtacagcgagctgcaggcccgggagacctttgagaagacccctgtggaggtgcctgtgggcggcttcaagggccgcacagtgacagtgtgggagctgatcagcagcgagtacttcaccgctgagcagaggcaggagctgctgcggcagttcagaacaggcaaggtgacagtggagaaggtgatcaagatcctgatcaccatcgtggaggaggtggagaccctgcggcaggagcggctgtccttcagcggcctgcgggcccctgtgcctgccagcgagctgctggccagcggcgtgctgagccgggcccagtttgagcagctgaaggatggcaagaccaccgtgaaggacctgtctgagctgggctctgtgaggaccctgctgcagggcagcggctgcctggccggcatctacctggaggacaccaaggagaaggtgtccatctatgaggccatgaggcggggcctgctgcgggccaccacagctgccctgctgctggaggcccaggccgccaccggcttcctggtggaccctgtgaggaaccagaggctgtatgtgcatgaggccgtgaaggccggcgtggtgggccctgagctgcacgagcagctgctgtctgctgagaaggctgtgacaggctacagagacccctacagcggcagcaccatcagcctcttccaggccatgcagaagggcctggtgctgcggcagcacggcatccggctgctggaggcccagatcgccactggaggcatcattgatcctgtgcacagccaccgggtgcctgtggatgtggcctaccagaggggctacttcagcgaggagatgaacagagtgctggccgaccccagtgatgacaccaagggcttctttgaccccaacacccatgagaacctgacctaccggcagctgctggagcgctgtgtggaggaccctgagaccggcctgcggctgctgcccctgaagggagctgagaaggccgaggtggtggagaccacccaggtgtacacagaggaggagacccggcgggcctttgaggagacccagattgacatccctgggggcggcagccacggcggcagcaccatgagcctgtgggaggtgatgcagagcgacctgatccctgaggagcagagggcccagctgatggctgacttccaggccggccgggtgaccaaggagaggatgatcatcatcatcatcgagatcatcgagaagacagagatcatccggcagcagggcctggccagctatgactatgtgagaagaaggctgacagctgaggacctgtttgaggcccgcatcatcagcctggagacctacaacctgctgcgggagggcaccaggagcctgcgggaggccctggaggccgagagcgcctggtgctacctgtatggaactggatctgtggccggcgtgtacctgcccggcagccggcagaccctgagcatctaccaggccctgaagaagggcctgctgtctgctgaggtggcccggctgctgctggaggcccaggccgccaccggcttcctgctggaccctgtgaagggggagcggctgactgtggatgaagctgtgaggaagggcctggtgggccctgagctgcatgaccggctgctgtctgctgagagagctgtgacaggctacagagacccctacacagagcagaccatcagcctcttccaggccatgaagaaggagctgatccccacagaggaggccctgcggctgctggatgcccagctggccaccggcggcatcgtggacccccggctgggcttccacctgcccctggaggtggcctaccagaggggctacctgaacaaggacacccatgaccagctgtctgagcccagcgaggtgcgctcctatgtggaccccagcacagatgagcggctgagctacacccagctgctgcggcgctgcagaagagatgatggcaccggccagctgctgctgcccctgagtgatgccaggaagctgaccttccggggcctgaggaagcagatcaccatggaggagctggtgcgcagccaggtgatggatgaggccacagccctgcagctgcgggagggcctgaccagcattgaggaggtgaccaagaacctgcagaagttcctggagggcaccagctgcatcgccggcgtgtttgtggatgccaccaaggagcggctgtctgtgtaccaggccatgaagaagggcatcatccggcccggcacagcctttgagctgctggaggcccaggccgccaccggctacgtgattgaccccatcaagggcctgaagctgactgtggaggaggccgtgaggatgggcatcgtgggccctgagttcaaggacaagctgctgtctgctgagagagctgtgacaggctacaaggacccctacagcggcaagctgatcagcctcttccaggccatgaagaagggcctcatcctgaaggaccacggcatccggctgctggaggcccagatcgccactggaggcatcattgatcctgaggagagccaccggctgcctgtggaggtggcctacaagaggggcctgtttgatgaggagatgaatgagatcctgacagaccccagtgatgacaccaagggcttctttgaccccaacacagaggagaacctgacctacctgcagctgatggagcgctgcatcacagacccccagacaggcctgtgcctgctgcccctgaaggagaagaagcgggagaggaagaccagcagcaagagctctgtgaggaagagaagagtggtgattgtggaccctgagaccgggaaggagatgtctgtgtatgaggcctacaggaagggcctgattgaccaccagacctacctggagctgtctgagcaggagtgtgagtgggaggagatcaccatcagcagcagtgatggagtggtgaagtccatgatcatcgacagaagaagtggccggcagtatgacattgatgatgccatcgccaagaacctgattgacagaagtgccctggaccagtaccgggccggcaccctgagcatcacagaatttgctgacatgctgtctggaaatgctgggggcttccgcagccgcagcagctctgtgggcagcagcagcagctaccccatcagccctgctgtgtccaggacccagctggcctcctggagcgaccccacagaggagactggacctgtggccggcatcctggacacagagaccctggagaaggtgtccatcacagaggccatgcacaggaacctggtggacaacatcaccggccagaggctgctggaggcccaggcctgcaccggcggcatcatcgaccccagcactggagagcgcttccctgtgacagatgctgtgaacaagggcctggtggacaagatcatggtggaccgcatcaacctggcccagaaggccttctgtggctttgaggaccccaggaccaagaccaagatgtctgctgcccaggccctgaagaagggctggctgtactatgaagctggccagcgcttcctggaggtgcagtacctgaccggcggcctcatcgagccagacaccccaggccgggtgcccctggatgaggccctgcagaggggcaccgtggatgccaggacagcccagaagctgagagatgtgggcgcctacagcaagtacctgacctgccccaagaccaagctgaagatctcctacaaggatgccctggaccgctccatggtggaggagggcaccggcctgcggctgctggaggccgccgcccagagcaccaagggctactacagcccctacagcgtgtctggcagcggcagcacagctggcagcaggacaggcagcaggacaggcagcagagctggcagccggcggggcagctttgatgccactggaagtggcttctccatgaccttcagcagcagcagctacagcagcagcggctatggaagaagatatgccagcggcagcagcgccagcctgggcggccctgagagcgctgtggcctag

SEQ ID NO: 164416 - DNA, 13548 bp, synthetic construct
  misc_feature 1..13548: note = Description of Artificial Sequence: Synthetic coding sequence
  source 1..13548: mol_type = other DNA
atgaagatcgtgcctgatgagcgggacagagtgcagaagaagaccttcaccaagtgggtgaacaagcacctgatcaaggcccagaggcacatcagtgacctgtatgaggacctgagagatggccacaacctgatcagcctgctggaggtgctgagcggggacagcctgccccgggagaagggccgcatgaggttccacaagctgcagaatgtgcagatcgccctggactacctgcggcaccggcaggtgaagctggtgaacatcagaaatgatgacattgctgatggcaaccccaagctgaccctgggcctcatctggaccatcatcctgcacttccagatcagtgacatccaggtgtctggccagagcgaggacatgacagccaaggagaagctgctgctgtggagccagaggatggtggagggctaccagggcctgcgctgtgacaacttcaccagctcctggagagatggccgcctcttcaatgccatcatccaccgccacaagcccctgctgattgacatgaacaaggtgtaccggcagaccaacctggagaacctggaccaggccttctctgtggccgagcgggacctgggcgtgacccggctgctggaccctgaagatgtggatgtgccccagccagatgagaagagcatcatcacctacgtgagcagcctgtatgatgccatgccccgggtgcctgatgtgcaggatggagtgcgggccaatgagctgcagctgcgctggcaggagtaccgggagctggtgctgctgctgctgcagtggatgaggcaccacacagctgcctttgaggagcggcgcttccccagcagctttgaggagattgagatcctgtggagccagttcctgaagttcaaggagatggagctgcctgccaaggaggccgacaagaacagaagcaagggcatctaccagagcctggagggcgctgtgcaggccggccagctgaaggtgcccccaggctaccaccccctggatgtggagaaggagtggggcaagctgcacgtggccatcctggagcgggagaagcagctgcggagtgaatttgagcggctggagtgcctgcagagaattgtgaccaagctgcagatggaggccggcctgtgtgaggagcagctgaaccaggctgatgccctgctgcagagtgatgtgcggctgctggccgccggcaaggtgccccagagagctggggaggtggagcgggacctggacaaggctgacagcatgatccggctgctcttcaatgatgtgcagaccctgaaggatggccgccacccccagggcgagcagatgtaccgccgggtgtaccgcctgcacgagcggctggtggccatcagaacagagtacaacctgcggctgaaggccggcgtggccgccccagccacccaggtggcccaggtgaccctgcagagcgtgcagaggaggcctgagctggaggacagcaccctgcgctacctgcaggacctgctggcctgggtggaggagaaccagcaccgggtggatggagctgagtggggcgtggacctgcccagcgtggaggcccagctgggcagccaccggggcctgcaccagagcattgaggagttccgggccaagattgaaagagcccggagtgatgagggccagctgagccctgccaccaggggggcctacagagactgcctgggccgcctggacctgcagtatgccaagctgctgaacagcagcaaggcccggctgcggagcctggagagcctgcacagctttgtggccgccgccaccaaggagctgatgtggctgaatgagaaggaggaggaggaggtgggctttgactggagcgacaggaacaccaacatgacagccaagaaggagagctacagcgccctgatgagggagctggagctgaaggagaagaagatcaaggagctgcagaatgctggggaccggctgctgcgggaggaccacccagcccggcccaccgtggagagcttccaggccgccctgcagacccagtggagctggatgctgcagctgtgctgctgcatcgaggcccacctgaaggaaaatgctgcctacttccagttcttcagtgatgtgcgggaggccgagggccagctgcagaagctgcaggaggccctgcggaggaagtacagctgtgacagaagtgccaccgtgacccggctggaggacctgctgcaggatgcccaggatgagaaggagcagctgaatgagtacaagggccacctgagcggcctggccaagagggccaaggctgtggtgcagctgaagcccaggcacccagcccaccccatgaggggccgcctgcccctgctggccgtgtgtgactacaagcaggtggaggtgacagtgcacaagggagatgagtgccagctggtgggccctgcccagcccagccactggaaggtgctgagcagcagcggcagcgaggccgctgtgcccagcgtgtgcttcctggtgcccccacccaaccaggaggcccaggaggccgtgacccggctggaggcccagcaccaggccctggtgaccctgtggcaccagctgcacgtggacatgaagagcctgctggcctggcagagcctgcggagagatgtgcagctgatccgctcctggagcctggccaccttccgcaccctgaagccagaggagcagaggcaggccctgcacagcctggagctgcactaccaggccttcctgcgggacagccaggatgctgggggcttcggcccagaagatcggctgatggccgagcgggagtatggcagctgcagccaccactaccagcagctgctgcagagcctggagcagggcgcccaggaggagagccgctgccagcgctgcatcagcgagctgaaggacatccggctgcagctggaggcctgtgagaccaggacagtgcaccggctgcggctgcccctggacaaggagcccgcccgggagtgtgcccagagaattgctgagcagcagaaggcccaggccgaggtggagggcctgggcaagggcgtggcccggctgtctgctgaggccgagaaggtgctggccctgcctgagcccagccctgctgcccccaccctgcggtctgagctggagctgaccctgggcaagctggagcaggtgcgcagcctgagcgccatctacctggagaagctgaagaccatcagcctggtgatccggggcacccagggcgctgaggaggtgctgcgggcccacgaggagcagctgaaggaggcccaggccgtgcctgccaccctgcctgagctggaggccaccaaggccagcctgaagaagctgcgggcccaggccgaggcccagcagcccacctttgatgccctgagagatgagctgcggggggcccaggaggtgggggagcggctgcagcagagacatggagagagagatgtggaggtggagcgctggagggagcgggtggcccagctgctggagcgctggcaggccgtgctggcccagacagatgtgcggcagcgggagctggagcagctgggccggcagctgcgctactaccgggagagcgctgaccccctgggcgcctggctgcaggatgcccggcggcggcaggagcagatccaggccatgcccctggccgacagccaggccgtgcgggagcagctgcggcaggagcaggccctgctggaggagattgaaagacatggagagaaggtggaggagtgccagagatttgccaagcagtacatcaatgccatcaaggactatgagctgcagctggtgacctacaaggcccagctggagcctgtggccagccctgccaagaagcccaaggtgcagagcggcagcgagagcgtcatccaggagtatgtggacctgcggacccactacagcgagctgaccaccctgaccagccagtacatcaagttcatcagcgagaccctgcggaggatggaggaggaggagcggctggccgagcagcagagagctgaggagcgggagcggctggccgaggtggaggccgccctggagaagcagaggcagctggccgaggcccacgcccaggccaaggcccaggccgagcgggaggccaaggagctgcagcagaggatgcaggaggaggtggtgagaagagaggaggccgctgtggatgcccagcagcagaagaggagcatccaggaggagctgcagcagctgcggcagagcagcgaggccgagatccaggccaaggcccggcaggccgaggccgctgagaggagccggctgcgcatcgaggaggagatccgggtggtgcggctgcagctggaggccacagagcggcagagaggaggagctgagggggagctgcaggccctgcgggcccgggcagaggaggccgaggcccagaagaggcaggcccaggaggaggccgagcggctgcggcggcaggtgcaggatgagagccagaggaagaggcaggccgaggtggagctggccagccgggtgaaggccgaggccgaggccgcccgggagaagcagagggccctgcaggccctggaggagctgcggctgcaggccgaggaggccgagcggcggctgcggcaggccgaggtggagcgggcccggcaggtgcaggtggccctggagacagcccagaggtctgctgaggccgagctgcagagcaagagggccagctttgctgagaagacagcccagctggagaggagcctgcaggaggagcacgtggccgtggcccagctgcgggaggaggccgagcggcgggcccagcagcaggccgaggccgagcgggcccgggaggaggccgagcgggagctggagcgctggcagctgaaggccaatgaggccctgcggctgcggctgcaggccgaggaggtggcccagcagaagagcctggcccaggccgaggccgagaagcagaaggaggaggccgagcgggaggccaggagaagaggcaaggccgaggagcaggccgtgcggcagcgggagctggccgagcaggagctggagaagcagaggcagctggccgagggcacagcccagcagaggctggccgctgagcaggagctgatccggctgcgggcagagacagagcagggcgagcagcagaggcagctgctggaggaggagctggcccggctgcagcgggaggccgctgctgccacccagaagaggcaggagctggaggccgagctggccaaggtgcgggcagagatggaggtgctgctggccagcaaggcccgggcagaggaggagagccgcagcaccagcgagaagagcaagcagaggctggaggccgaggccggccgcttccgggagctggccgaggaggccgcccggctgcgggccctggccgaggaggccaagaggcagaggcagctggccgaggaggatgctgcccggcagagagctgaggccgagcgggtgctggccgagaagctggccgccatcggggaggccacccggctgaagacagaggccgagatcgccctgaaggagaaggaggccgagaatgaaaggctgcggcggctggctgaagatgaggccttccagaggcggcggctggaggagcaggccgcccagcacaaggctgacatcgaggagcggctggcccagctgaggaaggccagtgacagcgagctggagcggcagaagggcctggtggaggacaccctgcggcagaggcggcaggtggaggaggagatcctggccctgaaggccagctttgagaaggctgctgctgggaaggccgagctggagctggagctgggccgcatccgcagcaatgctgaggacaccctgcggagcaaggagcaggccgagctggaggccgcccggcagaggcagctggccgctgaggaggagaggagaagaagagaggccgaggagcgggtgcagaagagcctggccgctgaggaggaggccgcccggcagaggaaggccgccctggaggaggtggagcggctgaaggccaaggtggaggaggcccggcggctgcgggagcgggcagagcaggagagcgcccggcagctgcagctggcccaggaggccgcccagaagaggctgcaggccgaggagaaggcccacgcctttgctgtgcagcagaaggagcaggagctgcagcagaccctgcagcaggagcagagcgtgctggaccagctgcggggggaggccgaggccgccaggagagctgctgaggaggccgaggaggcccgggtgcaggccgagcgggaggccgcccagagccggcggcaggtggaggaggccgagcggctgaagcagagcgctgaggagcaggcccaggcccgggcccaggcccaggccgctgctgagaagctgaggaaggaggccgagcaggaggccgcccggcgggcccaggccgagcaggccgccctgcggcagaagcaggccgcagatgctgagatggagaagcacaagaagtttgctgagcagaccctgcggcagaaggcccaggtggagcaggagctgaccaccctgcggctgcagctggaggagacagaccaccagaagaacctgctggatgaggagctgcagaggctgaaggccgaggccacagaagctgcccggcagaggagccaggtggaggaggagctgttctctgtgcgggtgcagatggaggagctgagcaagctgaaggccagaattgaagctgagaacagagccctgatcctgcgggacaaggacaacacccagcgcttcctgcaggaggaggccgagaagatgaagcaggtggccgaggaggccgcccggctgtctgtggccgcccaggaggccgcccggctgcggcagctggccgaggaggacctggcccagcagagggccctggccgagaagatgctgaaggagaagatgcaggccgtgcaggaggccacccggctgaaggccgaggccgagctgctgcagcagcagaaggagctggcccaggagcaggcccggcggctgcaggaggacaaggagcagatggcccagcagctggccgaggagacccagggcttccagaggaccctggaggccgagcggcagaggcagctggagatgtctgctgaggccgagcggctgaagctgcgggtggccgagatgagccgggcccaggcccgggcagaagaagatgcccagcgcttcaggaagcaggccgaggagattggagagaagctgcacaggacagagctggccacccaggagaaggtgaccctggtgcagaccctggagatccagaggcagcagagcgaccatgatgctgagcggctgcgggaggccatcgccgagctggagcgggagaaggagaagctgcagcaggaggccaagctgctgcagctgaagtctgaggagatgcagacagtgcagcaggagcagctgctgcaggagacccaggccctgcagcagagcttcctgtctgagaaggacagcctgctgcagcgggagcgcttcatcgagcaggagaaggccaagctggagcagctgttccaggatgaggtggccaaggcccagcagctgcgggaggagcagcagaggcagcagcagcagatggagcaggagcggcagaggctggtggcctccatggaggaggcccggcggcggcagcacgaggccgaggagggcgtgcggaggaagcaggaggagctgcagcagctggagcagcagaggcggcagcaggaggagctgctggccgaggagaaccagaggctgcgggagcagctgcagctgctggaggagcagcacagagctgccctggcccacagcgaggaggtgacagccagccaggtggccgccaccaagaccctgcccaacggcagagatgccctggatggccctgctgctgaggccgagcctgagcacagctttgatggcctgcggaggaaggtgtctgcccagaggctgcaggaggccggcatcctgtctgctgaggagctgcagaggctggcccagggccacaccaccgtggatgagctggcccggcgggaggatgtgcgccactacctgcagggccgcagcagcattgctggcctgctgctgaaggccaccaatgagaagctgtctgtgtatgctgccctgcagaggcagctgctgagccctggaacagccctgatcctgctggaggcccaggccgccagcggcttcctgctggaccctgtgaggaacagaaggctgactgtgaatgaagctgtgaaggagggcgtggtgggccctgagctgcaccacaagctgctgtctgctgagagagctgtgacaggctacaaggacccctacacaggccagcagatcagcctcttccaggccatgcagaagggcctgattgtgcgggagcacggcatccggctgctggaggcccagatcgccaccggcggcgtcatcgaccctgtgcacagccaccgggtgcctgtggatgtggcctacagaagaggctactttgatgaggagatgaacagagtgctggccgaccccagtgatgacaccaagggcttctttgaccccaacacccatgagaacctgacctacctgcagctgctggagcgctgtgtggaggaccctgagaccggcctgtgcctgctgcccctgacagacaaggccgccaagggcggggagctggtgtacacagattctgaggccagagatgtgtttgagaaggccaccgtgtctgccccctttgggaagttccagggcaagacagtgaccatctgggagatcatcaacagcgagtacttcaccgctgagcagaggcgggacctgctgcggcagttcagaacaggccgcatcaccgtggagaagatcatcaagatcatcatcaccgtggtggaggagcaggagcagaagggccgcctgtgctttgagggcctgcggagcctggtgcctgctgctgagctgctggagagcagggtcatcgaccgggagctgtaccagcagctgcagagaggagagaggtctgtgagagatgtggccgaggtggacacagtgagaagagccctgcggggggccaacgtgattgctggggtgtggctggaggaggccggccagaagctgagcatctacaatgccctgaagaaggacctgctgcccagcgacatggctgtggccctgctggaggcccaggccggcaccggccacatcatcgaccctgccaccagcgcccggctgactgtggatgaagctgtgcgggccggcctggtgggccctgagttccacgagaagctgctgtctgctgagaaggctgtgacaggctacagagacccctacacaggccagagcgtgtccctcttccaggccctgaagaagggcctcatcccccgggagcagggcctgcggctgctggatgcccagctgagcactggaggcatcgtggaccccagcaagagccaccgggtgcccctggatgtggcctgtgcccggggctgcctggatgaggagaccagccgggccctgagcgcccccagggcagatgccaaggcctacagcgaccccagcactggagagcccgccacctacggggagctgcagcagcgctgcaggccagaccagctgaccggcctgagcctgctgcccctgtctgagaaggccgcccgggcccggcaggaggagctgtacagcgagctgcaggcccgggagacctttgagaagacccctgtggaggtgcctgtgggcggcttcaagggccgcacagtgacagtgtgggagctgatcagcagcgagtacttcaccgctgagcagaggcaggagctgctgcggcagttcagaacaggcaaggtgacagtggagaaggtgatcaagatcctgatcaccatcgtggaggaggtggagaccctgcggcaggagcggctgtccttcagcggcctgcgggcccctgtgcctgccagcgagctgctggccagcggcgtgctgagccgggcccagtttgagcagctgaaggatggcaagaccaccgtgaaggacctgtctgagctgggctctgtgaggaccctgctgcagggcagcggctgcctggccggcatctacctggaggacaccaaggagaaggtgtccatctatgaggccatgaggcggggcctgctgcgggccaccacagctgccctgctgctggaggcccaggccgccaccggcttcctggtggaccctgtgaggaaccagaggctgtatgtgcatgaggccgtgaaggccggcgtggtgggccctgagctgcacgagcagctgctgtctgctgagaaggctgtgacaggctacagagacccctacagcggcagcaccatcagcctcttccaggccatgcagaagggcctggtgctgcggcagcacggcatccggctgctggaggcccagatcgccactggaggcatcattgatcctgtgcacagccaccgggtgcctgtggatgtggcctaccagaggggctacttcagcgaggagatgaacagagtgctggccgaccccagtgatgacaccaagggcttctttgaccccaacacccatgagaacctgacctaccggcagctgctggagcgctgtgtggaggaccctgagaccggcctgcggctgctgcccctgaagggagctgagaaggccgaggtggtggagaccacccaggtgtacacagaggaggagacccggcgggcctttgaggagacccagattgacatccctgggggcggcagccacggcggcagcaccatgagcctgtgggaggtgatgcagagcgacctgatccctgaggagcagagggcccagctgatggctgacttccaggccggccgggtgaccaaggagaggatgatcatcatcatcatcgagatcatcgagaagacagagatcatccggcagcagggcctggccagctatgactatgtgagaagaaggctgacagctgaggacctgtttgaggcccgcatcatcagcctggagacctacaacctgctgcgggagggcaccaggagcctgcgggaggccctggaggccgagagcgcctggtgctacctgtatggaactggatctgtggccggcgtgtacctgcccggcagccggcagaccctgagcatctaccaggccctgaagaagggcctgctgtctgctgaggtggcccggctgctgctggaggcccaggccgccaccggcttcctgctggaccctgtgaagggggagcggctgactgtggatgaagctgtgaggaagggcctggtgggccctgagctgcatgaccggctgctgtctgctgagagagctgtgacaggctacagagacccctacacagagcagaccatcagcctcttccaggccatgaagaaggagctgatccccacagaggaggccctgcggctgctggatgcccagctggccaccggcggcatcgtggacccccggctgggcttccacctgcccctggaggtggcctaccagaggggctacctgaacaaggacacccatgaccagctgtctgagcccagcgaggtgcgctcctatgtggaccccagcacagatgagcggctgagctacacccagctgctgcggcgctgcagaagagatgatggcaccggccagctgctgctgcccctgagtgatgccaggaagctgaccttccggggcctgaggaagcagatcaccatggaggagctggtgcgcagccaggtgatggatgaggccacagccctgcagctgcgggagggcctgaccagcattgaggaggtgaccaagaacctgcagaagttcctggagggcaccagctgcatcgccggcgtgtttgtggatgccaccaaggagcggctgtctgtgtaccaggccatgaagaagggcatcatccggcccggcacagcctttgagctgctggaggcccaggccgccaccggctacgtgattgaccccatcaagggcctgaagctgactgtggaggaggccgtgaggatgggcatcgtgggccctgagttcaaggacaagctgctgtctgctgagagagctgtgacaggctacaaggacccctacagcggcaagctgatcagcctcttccaggccatgaagaagggcctcatcctgaaggaccacggcatccggctgctggaggcccagatcgccactggaggcatcattgatcctgaggagagccaccggctgcctgtggaggtggcctacaagaggggcctgtttgatgaggagatgaatgagatcctgacagaccccagtgatgacaccaagggcttctttgaccccaacacagaggagaacctgacctacctgcagctgatggagcgctgcatcacagacccccagacaggcctgtgcctgctgcccctgaaggagaagaagcgggagaggaagaccagcagcaagagctctgtgaggaagagaagagtggtgattgtggaccctgagaccgggaaggagatgtctgtgtatgaggcctacaggaagggcctgattgaccaccagacctacctggagctgtctgagcaggagtgtgagtgggaggagatcaccatcagcagcagtgatggagtggtgaagtccatgatcatcgacagaagaagtggccggcagtatgacattgatgatgccatcgccaagaacctgattgacagaagtgccctggaccagtaccgggccggcaccctgagcatcacagaatttgctgacatgctgtctggaaatgctgggggcttccgcagccgcagcagctctgtgggcagcagcagcagctaccccatcagccctgctgtgtccaggacccagctggcctcctggagcgaccccacagaggagactggacctgtggccggcatcctggacacagagaccctggagaaggtgtccatcacagaggccatgcacaggaacctggtggacaacatcaccggccagaggctgctggaggcccaggcctgcaccggcggcatcatcgaccccagcactggagagcgcttccctgtgacagatgctgtgaacaagggcctggtggacaagatcatggtggaccgcatcaacctggcccagaaggccttctgtggctttgaggaccccaggaccaagaccaagatgtctgctgcccaggccctgaagaagggctggctgtactatgaagctggccagcgcttcctggaggtgcagtacctgaccggcggcctcatcgagccagacaccccaggccgggtgcccctggatgaggccctgcagaggggcaccgtggatgccaggacagcccagaagctgagagatgtgggcgcctacagcaagtacctgacctgccccaagaccaagctgaagatctcctacaaggatgccctggaccgctccatggtggaggagggcaccggcctgcggctgctggaggccgccgcccagagcaccaagggctactacagcccctacagcgtgtctggcagcggcagcacagctggcagcaggacaggcagcaggacaggcagcagagctggcagccggcggggcagctttgatgccactggaagtggcttctccatgaccttcagcagcagcagctacagcagcagcggctatggaagaagatatgccagcggcagcagcgccagcctgggcggccctgagagcgctgtggcctag

SEQ ID NO: 164417 - DNA, 13725 bp, synthetic construct
  misc_feature 1..13725: note = Description of Artificial Sequence: Synthetic coding sequence
  source 1..13725: mol_type = other DNA
atgtctggagaagatgctgaggtgcgggctgtgtctgaagatgtgtccaatggcagcagcggcagccccagccctggggacaccctgccctggaacctgggcaagacccagaggagccgccgcagcggcggcggggccggcagcaatggatctgtgctggaccctgctgagagagctgtgatcagaattgctgatgagcgggacagagtgcagaagaagaccttcaccaagtgggtgaacaagcacctgatcaaggcccagaggcacatcagtgacctgtatgaggacctgagagatggccacaacctgatcagcctgctggaggtgctgagcggggacagcctgccccgggagaagggccgcatgaggttccacaagctgcagaatgtgcagatcgccctggactacctgcggcaccggcaggtgaagctggtgaacatcagaaatgatgacattgctgatggcaaccccaagctgaccctgggcctcatctggaccatcatcctgcacttccagatcagtgacatccaggtgtctggccagagcgaggacatgacagccaaggagaagctgctgctgtggagccagaggatggtggagggctaccagggcctgcgctgtgacaacttcaccagctcctggagagatggccgcctcttcaatgccatcatccaccgccacaagcccctgctgattgacatgaacaaggtgtaccggcagaccaacctggagaacctggaccaggccttctctgtggccgagcgggacctgggcgtgacccggctgctggaccctgaagatgtggatgtgccccagccagatgagaagagcatcatcacctacgtgagcagcctgtatgatgccatgccccgggtgcctgatgtgcaggatggagtgcgggccaatgagctgcagctgcgctggcaggagtaccgggagctggtgctgctgctgctgcagtggatgaggcaccacacagctgcctttgaggagcggcgcttccccagcagctttgaggagattgagatcctgtggagccagttcctgaagttcaaggagatggagctgcctgccaaggaggccgacaagaacagaagcaagggcatctaccagagcctggagggcgctgtgcaggccggccagctgaaggtgcccccaggctaccaccccctggatgtggagaaggagtggggcaagctgcacgtggccatcctggagcgggagaagcagctgcggagtgaatttgagcggctggagtgcctgcagagaattgtgaccaagctgcagatggaggccggcctgtgtgaggagcagctgaaccaggctgatgccctgctgcagagtgatgtgcggctgctggccgccggcaaggtgccccagagagctggggaggtggagcgggacctggacaaggctgacagcatgatccggctgctcttcaatgatgtgcagaccctgaaggatggccgccacccccagggcgagcagatgtacagaagagtgtaccgcctgcacgagcggctggtggccatcagaacagagtacaacctgcggctgaaggccggcgtggccgccccagccacccaggtggcccaggtgaccctgcagagcgtgcagaggaggcctgagctggaggacagcaccctgcgctacctgcaggacctgctggcctgggtggaggagaaccagcaccgggtggatggagctgagtggggcgtggacctgcccagcgtggaggcccagctgggcagccaccggggcctgcaccagagcattgaggagttccgggccaagattgagcgggcccggagtgatgagggccagctgagccctgccaccaggggggcctacagagactgcctgggccgcctggacctgcagtatgccaagctgctgaacagcagcaaggcccggctgcggagcctggagagcctgcacagctttgtggccgccgccaccaaggagctgatgtggctgaatgagaaggaggaggaggaggtgggctttgactggagcgacaggaacaccaacatgacagccaagaaggagagctacagcgccctgatgagggagctggagctgaaggagaagaagatcaaggagctgcagaatgctggggaccggctgctgcgggaggaccacccagcccggcccaccgtggagagcttccaggccgccctgcagacccagtggagctggatgctgcagctgtgctgctgcatcgaggcccacctgaaggaaaatgctgcctacttccagttcttcagtgatgtgcgggaggccgagggccagctgcagaagctgcaggaggccctgcggaggaagtacagctgtgacagaagtgccaccgtgacccggctggaggacctgctgcaggatgcccaggatgagaaggagcagctgaatgagtacaagggccacctgagcggcctggccaagagggccaaggctgtggtgcagctgaagcccaggcacccagcccaccccatgaggggccgcctgcccctgctggccgtgtgtgactacaagcaggtggaggtgacagtgcacaagggagatgagtgccagctggtgggccctgcccagcccagccactggaaggtgctgagcagcagcggcagcgaggccgctgtgcccagcgtgtgcttcctggtgcccccacccaaccaggaggcccaggaggccgtgacccggctggaggcccagcaccaggccctggtgaccctgtggcaccagctgcacgtggacatgaagagcctgctggcctggcagagcctgcggagagatgtgcagctgatccgctcctggagcctggccaccttccgcaccctgaagccagaggagcagaggcaggccctgcacagcctggagctgcactaccaggccttcctgcgggacagccaggatgctgggggctttggacctgaggaccggctgatggccgagcgggagtatggcagctgcagccaccactaccagcagctgctgcagagcctggagcagggcgcccaggaggagagccgctgccagcgctgcatcagcgagctgaaggacatccggctgcagctggaggcctgtgagaccaggacagtgcaccggctgcggctgcccctggacaaggagcccgccagagaatgtgcccagagaattgctgagcagcagaaggcccaggccgaggtggagggcctgggcaaaggagtggcccggctgtctgctgaggccgagaaggtgctggccctgcctgagcccagccctgctgcccccaccctgcggtctgagctggagctgaccctgggcaagctggagcaggtgcgcagcctgagcgccatctacctggagaagctgaagaccatcagcctggtgatccggggcacccagggcgctgaggaggtgctgcgggcccacgaggagcagctgaaggaggcccaggccgtgcctgccaccctgcctgagctggaggccaccaaggccagcctgaagaagctgcgggcccaggccgaggcccagcagcccacctttgatgccctgagagatgagctgcggggggcccaggaggtgggggagcggctgcagcagagacatggagagagagatgtggaggtggagcgctggagggagcgggtggcccagctgctggagcgctggcaggccgtgctggcccagacagatgtgcggcagcgggagctggagcagctgggccggcagctgcgctactaccgggagagcgctgaccccctgggcgcctggctgcaggatgcccggcggcggcaggagcagatccaggccatgcccctggccgacagccaggccgtgcgggagcagctgcggcaggagcaggccctgctggaggagattgagcggcacggggagaaggtggaggagtgccagagatttgccaagcagtacatcaatgccatcaaggactatgagctgcagctggtgacctacaaggcccagctggagcctgtggccagccctgccaagaagcccaaggtgcagagcggcagcgagagcgtcatccaggagtatgtggacctgcggacccactacagcgagctgaccaccctgaccagccagtacatcaagttcatcagcgagaccctgcggaggatggaggaggaggagcggctggccgagcagcagagagctgaggagcgggagcggctggccgaggtggaggccgccctggagaagcagaggcagctggccgaggcccacgcccaggccaaggcccaggccgagcgggaggccaaggagctgcagcagaggatgcaggaggaggtggtgcggcgggaggaggccgctgtggatgcccagcagcagaagaggagcatccaggaggagctgcagcagctgcggcagagcagcgaggccgagatccaggccaaggcccggcaggccgaggccgctgagaggagccggctgagaattgaggaggagatccgggtggtgcggctgcagctggaggccacagagcggcagaggggcggcgctgagggggagctgcaggccctgcgggcccgggcagaggaggccgaggcccagaagaggcaggcccaggaggaggccgagcggctgcggcggcaggtgcaggatgagagccagaggaagaggcaggccgaggtggagctggccagccgggtgaaggccgaggccgaggccgcccgggagaagcagagggccctgcaggccctggaggagctgcggctgcaggccgaggaggccgagcggcggctgcggcaggccgaggtggagcgggcccggcaggtgcaggtggccctggagacagcccagaggtctgctgaggccgagctgcagagcaagagggccagctttgctgagaagacagcccagctggagaggagcctgcaggaggagcacgtggccgtggcccagctgcgggaggaggccgagcggcgggcccagcagcaggccgaggccgagcgggcccgggaggaggccgagcgggagctggagcgctggcagctgaaggccaatgaggccctgcggctgcggctgcaggccgaggaggtggcccagcagaagagcctggcccaggccgaggccgagaagcagaaggaggaggccgagcgggaggcccggcggcggggcaaggccgaggagcaggccgtgcggcagcgggagctggccgagcaggagctggagaagcagaggcagctggccgagggcacagcccagcagaggctggccgctgagcaggagctgatccggctgcgggcagagacagagcagggcgagcagcagaggcagctgctggaggaggagctggcccggctgcagcgggaggccgccgccgccacccagaagaggcaggagctggaggccgagctggccaaggtgcgggcagagatggaggtgctgctggccagcaaggcccgggcagaggaggagagccgcagcaccagcgagaagagcaagcagaggctggaggccgaggccggccgcttccgggagctggccgaggaggccgcccggctgcgggccctggccgaggaggccaagaggcagaggcagctggccgaggaggatgctgcccggcagagagctgaggccgagcgggtgctggccgagaagctggccgccatcggggaggccacccggctgaagacagaagctgagatcgccctgaaggagaaggaggctgaaaatgaaaggctgcggcggctggccgaggatgaggccttccagaggcggcggctggaggagcaggccgcccagcacaaggctgacatcgaggagcggctggcccagctgaggaaggccagtgacagcgagctggagcggcagaagggcctggtggaggacaccctgcggcagaggcggcaggtggaggaggagatcctggccctgaaggccagctttgagaaggctgctgctgggaaggccgagctggagctggagctgggccgcatccgcagcaatgctgaggacaccctgcggagcaaggagcaggccgagctggaggccgcccggcagaggcagctggccgctgaggaggagaggagaagaagagaagctgaggagcgggtgcagaagagcctggccgctgaggaggaggccgcccggcagaggaaggccgccctggaggaggtggagcggctgaaggccaaggtggaggaggcccggcggctgcgggagagagctgagcaggagagcgcccggcagctgcagctggcccaggaggccgcccagaagaggctgcaggccgaggagaaggcccacgcctttgctgtgcagcagaaggagcaggagctgcagcagaccctgcagcaggagcagagcgtgctggaccagctgcggggggaggccgaggccgcccggcgggctgctgaggaggccgaggaggcccgggtgcaggccgagcgggaggccgcccagagccggcggcaggtggaggaggccgagcggctgaagcagagcgctgaggagcaggcccaggcccgggcccaggcccaggccgctgctgagaagctgaggaaggaggccgagcaggaggccgcccggcgggcccaggccgagcaggccgccctgcggcagaagcaggccgcagatgctgagatggagaagcacaagaagtttgctgagcagaccctgcggcagaaggcccaggtggagcaggagctgaccaccctgcggctgcagctggaggagacagaccaccagaagaacctgctggatgaggagctgcagaggctgaaggccgaggccacagaggccgcccggcagaggagccaggtggaggaggagctgttctctgtgcgggtgcagatggaggagctgagcaagctgaaggcccgcatcgaggctgaaaatagagccctgatcctgcgggacaaggacaacacccagcgcttcctgcaggaggaggccgagaagatgaagcaggtggccgaggaggccgcccggctgtctgtggccgcccaggaggccgcccggctgcggcagctggccgaggaggacctggcccagcagagggccctggccgagaagatgctgaaggagaagatgcaggccgtgcaggaggccacccggctgaaggccgaggccgagctgctgcagcagcagaaggagctggcccaggagcaggcccggcggctgcaggaggacaaggagcagatggcccagcagctggccgaggagacccagggcttccagaggaccctggaggccgagcggcagaggcagctggagatgtctgctgaggccgagcggctgaagctgcgggtggccgagatgagccgggcccaggcccgggcagaggaggatgcccagcgcttcaggaagcaggccgaggagatcggggagaagctgcacaggacagagctggccacccaggagaaggtgaccctggtgcagaccctggagatccagaggcagcagagcgaccatgatgctgagcggctgcgggaggccatcgccgagctggagcgggagaaggagaagctgcagcaggaggccaagctgctgcagctgaagtctgaggagatgcagacagtgcagcaggagcagctgctgcaggagacccaggccctgcagcagagcttcctgtctgagaaggacagcctgctgcagcgggagcgcttcatcgagcaggagaaggccaagctggagcagctgttccaggatgaggtggccaaggcccagcagctgcgggaggagcagcagaggcagcagcagcagatggagcaggagcggcagaggctggtggcctccatggaggaggcccggcggcggcagcatgaagctgaggagggcgtgcggaggaagcaggaggagctgcagcagctggagcagcagaggcggcagcaggaggagctgctggccgaggagaaccagaggctgcgggagcagctgcagctgctggaggagcagcaccgggccgccctggcccacagcgaggaggtgacagccagccaggtggccgccaccaagaccctgcccaacggcagagatgccctggatggccctgctgctgaggccgagcctgagcacagctttgatggcctgcggaggaaggtgtctgcccagaggctgcaggaggccggcatcctgtctgctgaggagctgcagaggctggcccagggccacaccaccgtggatgagctggccaggagagaagatgtgcgccactacctgcagggccgcagcagcattgctggcctgctgctgaaggccaccaatgagaagctgtctgtgtatgctgccctgcagaggcagctgctgagccctggaacagccctgatcctgctggaggcccaggccgccagcggcttcctgctggaccctgtgaggaacagaaggctgactgtgaatgaggccgtgaaggagggcgtggtgggccctgagctgcaccacaagctgctgtctgctgagagagctgtgacaggctacaaggacccctacacaggccagcagatcagcctcttccaggccatgcagaagggcctcatcgtgcgggagcacggcatccggctgctggaggcccagatcgccactggaggagtgattgatcctgtgcacagccaccgggtgcctgtggatgtggcctaccgccggggctactttgatgaggagatgaacagagtgctggccgaccccagtgatgacaccaagggcttctttgaccccaacacccatgagaacctgacctacctgcagctgctggagcgctgtgtggaggaccctgagaccggcctgtgcctgctgcccctgacagacaaggccgccaagggcggggagctggtgtacacagacagcgaggccagagatgtgtttgagaaggccaccgtgtctgccccctttgggaagttccagggcaagacagtgaccatctgggagatcatcaacagcgagtacttcaccgctgagcagaggcgggacctgctgcggcagttcagaacaggccgcatcaccgtggagaagatcatcaagatcatcatcaccgtggtggaggagcaggagcagaagggccgcctgtgctttgagggcctgcggagcctggtgcctgctgctgagctgctggagagccgggtgattgaccgggagctgtaccagcagctgcagagaggagagaggtctgtgagagatgtggccgaggtggacacagtgcggcgggccctgcggggggccaacgtgattgctggggtgtggctggaggaggccggccagaagctgagcatctacaatgccctgaagaaggacctgctgcccagcgacatggctgtggccctgctggaggcccaggccggcaccggccacatcattgatcctgccaccagcgcccggctgactgtggatgaggccgtgcgggccggcctggtgggccctgagttccacgagaagctgctgtctgctgagaaggctgtgacaggctacagagacccctacacaggccagagcgtgtccctcttccaggccctgaagaagggcctcatcccccgggagcagggcctgcggctgctggatgcccagctgagcactggaggcatcgtggaccccagcaagagccaccgggtgcccctggatgtggcctgtgcccggggctgcctggatgaggagaccagccgggccctgagcgcccccagggcagatgccaaggcctacagcgaccccagcactggagagcccgccacctatggagagctgcagcagcgctgcaggccagaccagctgaccggcctgagcctgctgcccctgtctgagaaggccgcccgggcccggcaggaggagctgtacagcgagctgcaggcccgggagacctttgagaagacccctgtggaggtgcctgtgggcggcttcaagggccgcacagtgacagtgtgggagctgatcagcagcgagtacttcaccgctgagcagaggcaggagctgctgcggcagttcagaacaggcaaggtgacagtggagaaggtgatcaagatcctgatcaccatcgtggaggaggtggagaccctgcggcaggagcggctgtccttcagcggcctgcgggcccctgtgcctgccagcgagctgctggccagcggcgtgctgagccgggcccagtttgagcagctgaaggatggcaagaccaccgtgaaggacctgtctgagctgggctctgtgaggaccctgctgcagggcagcggctgcctggccggcatctacctggaggacaccaaggagaaggtgtccatctatgaggccatgagaagaggcctgctgcgggccaccacagctgccctgctgctggaggcccaggccgccaccggcttcctggtggaccctgtgaggaaccagaggctgtatgtgcatgaagctgtgaaggccggcgtggtgggccctgagctgcacgagcagctgctgtctgctgagaaggctgtgacaggctacagagacccctacagcggcagcaccatcagcctcttccaggccatgcagaagggcctggtgctgcggcagcacggcatccggctgctggaggcccagatcgccaccggcggcatcatcgaccctgtgcacagccaccgggtgcctgtggatgtggcctaccagaggggctacttcagcgaggagatgaacagagtgctggccgaccccagtgatgacaccaagggcttctttgaccccaacacccatgagaacctgacctaccggcagctgctggagcgctgtgtggaggaccctgagaccggcctgcggctgctgcccctgaagggagctgagaaggccgaggtggtggagaccacccaggtgtacacagaggaggagacccggcgggcctttgaggagacccagattgacatccctgggggcggcagccatggaggcagcaccatgagcctgtgggaggtgatgcagagcgacctgatccctgaggagcagagggcccagctgatggctgacttccaggccggccgggtgaccaaggagaggatgatcatcatcatcatcgagatcatcgagaagacagagatcatccggcagcagggcctggccagctatgactatgtgagaagaaggctgacagctgaggacctgtttgaggcccgcatcatcagcctggagacctacaacctgctgcgggagggcaccaggagcctgcgggaggccctggaggccgagagcgcctggtgctacctgtatggcaccggctctgtggccggcgtgtacctgcccggcagccggcagaccctgagcatctaccaggccctgaagaagggcctgctgtctgctgaggtggcccggctgctgctggaggcccaggccgccaccggcttcctgctggaccctgtgaagggggagcggctgactgtggatgaggccgtgaggaagggcctggtgggccctgagctgcatgaccggctgctgtctgctgagagagctgtgacaggctacagagacccctacacagagcagaccatcagcctcttccaggccatgaagaaggagctgatccccacagaggaggccctgcggctgctggatgcccagctggccactggaggcatcgtggacccccggctgggcttccacctgcccctggaggtggcctaccagaggggctacctgaacaaggacacccatgaccagctgtctgagcccagcgaggtgcgctcctatgtggaccccagcacagatgagcggctgagctacacccagctgctgcggcgctgcagaagagatgatggcaccggccagctgctgctgcccctgagtgatgccaggaagctgaccttccggggcctgaggaagcagatcaccatggaggagctggtgcgcagccaggtgatggatgaggccacagccctgcagctgcgggagggcctgaccagcattgaggaggtgaccaagaacctgcagaagttcctggagggcaccagctgcatcgccggcgtgtttgtggatgccaccaaggagcggctgtctgtgtaccaggccatgaagaagggcatcatccggcctggaacagcctttgagctgctggaggcccaggccgccaccggctacgtgattgaccccatcaagggcctgaagctgactgtggaggaggccgtgaggatgggcatcgtgggccctgagttcaaggacaagctgctgtctgctgagagagctgtgacaggctacaaggacccctacagcggcaagctgatcagcctcttccaggccatgaagaagggcctcatcctgaaggaccacggcatccggctgctggaggcccagatcgccaccggcggcatcatcgaccctgaggagagccaccggctgcctgtggaggtggcctacaagaggggcctgtttgatgaggagatgaatgagatcctgacagaccccagtgatgacaccaagggcttctttgaccccaacacagaggagaacctgacctacctgcagctgatggagcgctgcatcacagacccccagacaggcctgtgcctgctgcccctgaaggagaagaagcgggagaggaagaccagcagcaagagctctgtgaggaagagaagagtggtgattgtggaccctgagaccgggaaggagatgtctgtgtatgaggcctacaggaagggcctgattgaccaccagacctacctggagctgtctgagcaggagtgtgagtgggaggagatcaccatcagcagcagtgatggagtggtgaagtccatgatcatcgaccggcgcagcggccggcagtatgacattgatgatgccatcgccaagaacctgattgacagaagtgccctggaccagtacagagctggcaccctgagcatcacagaatttgctgacatgctgtctggaaatgccggcggcttccgcagccgcagcagctctgtgggcagcagcagcagctaccccatcagccctgctgtgtccaggacccagctggcctcctggagcgaccccacagaggagaccggccctgtggccggcatcctggacacagagaccctggagaaggtgtccatcacagaggccatgcacaggaacctggtggacaacatcaccggccagaggctgctggaggcccaggcctgcacaggaggcatcatcgaccccagcactggagagcgcttccctgtgacagatgctgtgaacaagggcctggtggacaagatcatggtggaccgcatcaacctggcccagaaggccttctgtggctttgaggaccccaggaccaagaccaagatgtctgctgcccaggccctgaagaagggctggctgtactatgaggccggccagcgcttcctggaggtgcagtacctgactggaggcctgattgaaccagacaccccaggccgggtgcccctggatgaggccctgcagaggggcaccgtggatgccaggacagcccagaagctgagagatgtgggcgcctacagcaagtacctgacctgccccaagaccaagctgaagatctcctacaaggatgccctggaccgctccatggtggaggagggcaccggcctgcggctgctggaggccgccgcccagagcaccaagggctactacagcccctacagcgtgtctggcagcggcagcacagctggcagcaggacaggcagcaggacaggcagccgggccggcagcagaagaggcagctttgatgccaccggcagcggcttctccatgaccttcagcagcagcagctacagcagcagcggctacggccgccgctatgccagcggcagcagcgccagcctgggcggccctgagagcgctgtggcctag

SEQ ID NO: 164418 - DNA, 13713 bp, synthetic construct
  misc_feature 1..13713: note = Description of Artificial Sequence: Synthetic coding sequence
  source 1..13713: mol_type = other DNA
atgtctggagaagatgctgaggtgcgggctgtgtctgaagatgtgtccaatggcagcagcggcagccccagccctggggacaccctgccctggaacctgggcaagacccagaggagccgccgcagcggcggcggggccggcagcaatggatctgtgctggaccctgctgagagagctgtgatcagaattgctgatgagcgggacagagtgcagaagaagaccttcaccaagtgggtgaacaagcacctgatcaaggcccagaggcacatcagtgacctgtatgaggacctgagagatggccacaacctgatcagcctgctggaggtgctgagcggggacagcctgccccgggagaagggccgcatgaggttccacaagctgcagaatgtgcagatcgccctggactacctgcggcaccggcaggtgaagctggtgaacatcagaaatgatgacattgctgatggcaaccccaagctgaccctgggcctcatctggaccatcatcctgcacttccagatcagtgacatccaggtgtctggccagagcgaggacatgacagccaaggagaagctgctgctgtggagccagaggatggtggagggctaccagggcctgcgctgtgacaacttcaccagctcctggagagatggccgcctcttcaatgccatcatccaccgccacaagcccctgctgattgacatgaacaaggtgtaccggcagaccaacctggagaacctggaccaggccttctctgtggccgagcgggacctgggcgtgacccggctgctggaccctgaagatgtggatgtgccccagccagatgagaagagcatcatcacctacgtgagcagcctgtatgatgccatgccccgggtgcctgatgtgcaggatggagagctgcagctgcgctggcaggagtaccgggagctggtgctgctgctgctgcagtggatgaggcaccacacagctgcctttgaggagcggcgcttccccagcagctttgaggagattgagatcctgtggagccagttcctgaagttcaaggagatggagctgcctgccaaggaggccgacaagaacagaagcaagggcatctaccagagcctggagggcgctgtgcaggccggccagctgaaggtgcccccaggctaccaccccctggatgtggagaaggagtggggcaagctgcacgtggccatcctggagcgggagaagcagctgcggagtgaatttgagcggctggagtgcctgcagagaattgtgaccaagctgcagatggaggccggcctgtgtgaggagcagctgaaccaggctgatgccctgctgcagagtgatgtgcggctgctggccgccggcaaggtgccccagagagctggggaggtggagcgggacctggacaaggctgacagcatgatccggctgctcttcaatgatgtgcagaccctgaaggatggccgccacccccagggcgagcagatgtacagaagagtgtaccgcctgcacgagcggctggtggccatcagaacagagtacaacctgcggctgaaggccggcgtggccgccccagccacccaggtggcccaggtgaccctgcagagcgtgcagaggaggcctgagctggaggacagcaccctgcgctacctgcaggacctgctggcctgggtggaggagaaccagcaccgggtggatggagctgagtggggcgtggacctgcccagcgtggaggcccagctgggcagccaccggggcctgcaccagagcattgaggagttccgggccaagattgagcgggcccggagtgatgagggccagctgagccctgccaccaggggggcctacagagactgcctgggccgcctggacctgcagtatgccaagctgctgaacagcagcaaggcccggctgcggagcctggagagcctgcacagctttgtggccgccgccaccaaggagctgatgtggctgaatgagaaggaggaggaggaggtgggctttgactggagcgacaggaacaccaacatgacagccaagaaggagagctacagcgccctgatgagggagctggagctgaaggagaagaagatcaaggagctgcagaatgctggggaccggctgctgcgggaggaccacccagcccggcccaccgtggagagcttccaggccgccctgcagacccagtggagctggatgctgcagctgtgctgctgcatcgaggcccacctgaaggaaaatgctgcctacttccagttcttcagtgatgtgcgggaggccgagggccagctgcagaagctgcaggaggccctgcggaggaagtacagctgtgacagaagtgccaccgtgacccggctggaggacctgctgcaggatgcccaggatgagaaggagcagctgaatgagtacaagggccacctgagcggcctggccaagagggccaaggctgtggtgcagctgaagcccaggcacccagcccaccccatgaggggccgcctgcccctgctggccgtgtgtgactacaagcaggtggaggtgacagtgcacaagggagatgagtgccagctggtgggccctgcccagcccagccactggaaggtgctgagcagcagcggcagcgaggccgctgtgcccagcgtgtgcttcctggtgcccccacccaaccaggaggcccaggaggccgtgacccggctggaggcccagcaccaggccctggtgaccctgtggcaccagctgcacgtggacatgaagagcctgctggcctggcagagcctgcggagagatgtgcagctgatccgctcctggagcctggccaccttccgcaccctgaagccagaggagcagaggcaggccctgcacagcctggagctgcactaccaggccttcctgcgggacagccaggatgctgggggctttggacctgaggaccggctgatggccgagcgggagtatggcagctgcagccaccactaccagcagctgctgcagagcctggagcagggcgcccaggaggagagccgctgccagcgctgcatcagcgagctgaaggacatccggctgcagctggaggcctgtgagaccaggacagtgcaccggctgcggctgcccctggacaaggagcccgccagagaatgtgcccagagaattgctgagcagcagaaggcccaggccgaggtggagggcctgggcaaaggagtggcccggctgtctgctgaggccgagaaggtgctggccctgcctgagcccagccctgctgcccccaccctgcggtctgagctggagctgaccctgggcaagctggagcaggtgcgcagcctgagcgccatctacctggagaagctgaagaccatcagcctggtgatccggggcacccagggcgctgaggaggtgctgcgggcccacgaggagcagctgaaggaggcccaggccgtgcctgccaccctgcctgagctggaggccaccaaggccagcctgaagaagctgcgggcccaggccgaggcccagcagcccacctttgatgccctgagagatgagctgcggggggcccaggaggtgggggagcggctgcagcagagacatggagagagagatgtggaggtggagcgctggagggagcgggtggcccagctgctggagcgctggcaggccgtgctggcccagacagatgtgcggcagcgggagctggagcagctgggccggcagctgcgctactaccgggagagcgctgaccccctgggcgcctggctgcaggatgcccggcggcggcaggagcagatccaggccatgcccctggccgacagccaggccgtgcgggagcagctgcggcaggagcaggccctgctggaggagattgagcggcacggggagaaggtggaggagtgccagagatttgccaagcagtacatcaatgccatcaaggactatgagctgcagctggtgacctacaaggcccagctggagcctgtggccagccctgccaagaagcccaaggtgcagagcggcagcgagagcgtcatccaggagtatgtggacctgcggacccactacagcgagctgaccaccctgaccagccagtacatcaagttcatcagcgagaccctgcggaggatggaggaggaggagcggctggccgagcagcagagagctgaggagcgggagcggctggccgaggtggaggccgccctggagaagcagaggcagctggccgaggcccacgcccaggccaaggcccaggccgagcgggaggccaaggagctgcagcagaggatgcaggaggaggtggtgcggcgggaggaggccgctgtggatgcccagcagcagaagaggagcatccaggaggagctgcagcagctgcggcagagcagcgaggccgagatccaggccaaggcccggcaggccgaggccgctgagaggagccggctgagaattgaggaggagatccgggtggtgcggctgcagctggaggccacagagcggcagaggggcggcgctgagggggagctgcaggccctgcgggcccgggcagaggaggccgaggcccagaagaggcaggcccaggaggaggccgagcggctgcggcggcaggtgcaggatgagagccagaggaagaggcaggccgaggtggagctggccagccgggtgaaggccgaggccgaggccgcccgggagaagcagagggccctgcaggccctggaggagctgcggctgcaggccgaggaggccgagcggcggctgcggcaggccgaggtggagcgggcccggcaggtgcaggtggccctggagacagcccagaggtctgctgaggccgagctgcagagcaagagggccagctttgctgagaagacagcccagctggagaggagcctgcaggaggagcacgtggccgtggcccagctgcgggaggaggccgagcggcgggcccagcagcaggccgaggccgagcgggcccgggaggaggccgagcgggagctggagcgctggcagctgaaggccaatgaggccctgcggctgcggctgcaggccgaggaggtggcccagcagaagagcctggcccaggccgaggccgagaagcagaaggaggaggccgagcgggaggcccggcggcggggcaaggccgaggagcaggccgtgcggcagcgggagctggccgagcaggagctggagaagcagaggcagctggccgagggcacagcccagcagaggctggccgctgagcaggagctgatccggctgcgggcagagacagagcagggcgagcagcagaggcagctgctggaggaggagctggcccggctgcagcgggaggccgccgccgccacccagaagaggcaggagctggaggccgagctggccaaggtgcgggcagagatggaggtgctgctggccagcaaggcccgggcagaggaggagagccgcagcaccagcgagaagagcaagcagaggctggaggccgaggccggccgcttccgggagctggccgaggaggccgcccggctgcgggccctggccgaggaggccaagaggcagaggcagctggccgaggaggatgctgcccggcagagagctgaggccgagcgggtgctggccgagaagctggccgccatcggggaggccacccggctgaagacagaagctgagatcgccctgaaggagaaggaggctgaaaatgaaaggctgcggcggctggccgaggatgaggccttccagaggcggcggctggaggagcaggccgcccagcacaaggctgacatcgaggagcggctggcccagctgaggaaggccagtgacagcgagctggagcggcagaagggcctggtggaggacaccctgcggcagaggcggcaggtggaggaggagatcctggccctgaaggccagctttgagaaggctgctgctgggaaggccgagctggagctggagctgggccgcatccgcagcaatgctgaggacaccctgcggagcaaggagcaggccgagctggaggccgcccggcagaggcagctggccgctgaggaggagaggagaagaagagaagctgaggagcgggtgcagaagagcctggccgctgaggaggaggccgcccggcagaggaaggccgccctggaggaggtggagcggctgaaggccaaggtggaggaggcccggcggctgcgggagagagctgagcaggagagcgcccggcagctgcagctggcccaggaggccgcccagaagaggctgcaggccgaggagaaggcccacgcctttgctgtgcagcagaaggagcaggagctgcagcagaccctgcagcaggagcagagcgtgctggaccagctgcggggggaggccgaggccgcccggcgggctgctgaggaggccgaggaggcccgggtgcaggccgagcgggaggccgcccagagccggcggcaggtggaggaggccgagcggctgaagcagagcgctgaggagcaggcccaggcccgggcccaggcccaggccgctgctgagaagctgaggaaggaggccgagcaggaggccgcccggcgggcccaggccgagcaggccgccctgcggcagaagcaggccgcagatgctgagatggagaagcacaagaagtttgctgagcagaccctgcggcagaaggcccaggtggagcaggagctgaccaccctgcggctgcagctggaggagacagaccaccagaagaacctgctggatgaggagctgcagaggctgaaggccgaggccacagaggccgcccggcagaggagccaggtggaggaggagctgttctctgtgcgggtgcagatggaggagctgagcaagctgaaggcccgcatcgaggctgaaaatagagccctgatcctgcgggacaaggacaacacccagcgcttcctgcaggaggaggccgagaagatgaagcaggtggccgaggaggccgcccggctgtctgtggccgcccaggaggccgcccggctgcggcagctggccgaggaggacctggcccagcagagggccctggccgagaagatgctgaaggagaagatgcaggccgtgcaggaggccacccggctgaaggccgaggccgagctgctgcagcagcagaaggagctggcccaggagcaggcccggcggctgcaggaggacaaggagcagatggcccagcagctggccgaggagacccagggcttccagaggaccctggaggccgagcggcagaggcagctggagatgtctgctgaggccgagcggctgaagctgcgggtggccgagatgagccgggcccaggcccgggcagaggaggatgcccagcgcttcaggaagcaggccgaggagatcggggagaagctgcacaggacagagctggccacccaggagaaggtgaccctggtgcagaccctggagatccagaggcagcagagcgaccatgatgctgagcggctgcgggaggccatcgccgagctggagcgggagaaggagaagctgcagcaggaggccaagctgctgcagctgaagtctgaggagatgcagacagtgcagcaggagcagctgctgcaggagacccaggccctgcagcagagcttcctgtctgagaaggacagcctgctgcagcgggagcgcttcatcgagcaggagaaggccaagctggagcagctgttccaggatgaggtggccaaggcccagcagctgcgggaggagcagcagaggcagcagcagcagatggagcaggagcggcagaggctggtggcctccatggaggaggcccggcggcggcagcatgaagctgaggagggcgtgcggaggaagcaggaggagctgcagcagctggagcagcagaggcggcagcaggaggagctgctggccgaggagaaccagaggctgcgggagcagctgcagctgctggaggagcagcaccgggccgccctggcccacagcgaggaggtgacagccagccaggtggccgccaccaagaccctgcccaacggcagagatgccctggatggccctgctgctgaggccgagcctgagcacagctttgatggcctgcggaggaaggtgtctgcccagaggctgcaggaggccggcatcctgtctgctgaggagctgcagaggctggcccagggccacaccaccgtggatgagctggccaggagagaagatgtgcgccactacctgcagggccgcagcagcattgctggcctgctgctgaaggccaccaatgagaagctgtctgtgtatgctgccctgcagaggcagctgctgagccctggaacagccctgatcctgctggaggcccaggccgccagcggcttcctgctggaccctgtgaggaacagaaggctgactgtgaatgaggccgtgaaggagggcgtggtgggccctgagctgcaccacaagctgctgtctgctgagagagctgtgacaggctacaaggacccctacacaggccagcagatcagcctcttccaggccatgcagaagggcctcatcgtgcgggagcacggcatccggctgctggaggcccagatcgccactggaggagtgattgatcctgtgcacagccaccgggtgcctgtggatgtggcctaccgccggggctactttgatgaggagatgaacagagtgctggccgaccccagtgatgacaccaagggcttctttgaccccaacacccatgagaacctgacctacctgcagctgctggagcgctgtgtggaggaccctgagaccggcctgtgcctgctgcccctgacagacaaggccgccaagggcggggagctggtgtacacagacagcgaggccagagatgtgtttgagaaggccaccgtgtctgccccctttgggaagttccagggcaagacagtgaccatctgggagatcatcaacagcgagtacttcaccgctgagcagaggcgggacctgctgcggcagttcagaacaggccgcatcaccgtggagaagatcatcaagatcatcatcaccgtggtggaggagcaggagcagaagggccgcctgtgctttgagggcctgcggagcctggtgcctgctgctgagctgctggagagccgggtgattgaccgggagctgtaccagcagctgcagagaggagagaggtctgtgagagatgtggccgaggtggacacagtgcggcgggccctgcggggggccaacgtgattgctggggtgtggctggaggaggccggccagaagctgagcatctacaatgccctgaagaaggacctgctgcccagcgacatggctgtggccctgctggaggcccaggccggcaccggccacatcattgatcctgccaccagcgcccggctgactgtggatgaggccgtgcgggccggcctggtgggccctgagttccacgagaagctgctgtctgctgagaaggctgtgacaggctacagagacccctacacaggccagagcgtgtccctcttccaggccctgaagaagggcctcatcccccgggagcagggcctgcggctgctggatgcccagctgagcactggaggcatcgtggaccccagcaagagccaccgggtgcccctggatgtggcctgtgcccggggctgcctggatgaggagaccagccgggccctgagcgcccccagggcagatgccaaggcctacagcgaccccagcactggagagcccgccacctatggagagctgcagcagcgctgcaggccagaccagctgaccggcctgagcctgctgcccctgtctgagaaggccgcccgggcccggcaggaggagctgtacagcgagctgcaggcccgggagacctttgagaagacccctgtggaggtgcctgtgggcggcttcaagggccgcacagtgacagtgtgggagctgatcagcagcgagtacttcaccgctgagcagaggcaggagctgctgcggcagttcagaacaggcaaggtgacagtggagaaggtgatcaagatcctgatcaccatcgtggaggaggtggagaccctgcggcaggagcggctgtccttcagcggcctgcgggcccctgtgcctgccagcgagctgctggccagcggcgtgctgagccgggcccagtttgagcagctgaaggatggcaagaccaccgtgaaggacctgtctgagctgggctctgtgaggaccctgctgcagggcagcggctgcctggccggcatctacctggaggacaccaaggagaaggtgtccatctatgaggccatgagaagaggcctgctgcgggccaccacagctgccctgctgctggaggcccaggccgccaccggcttcctggtggaccctgtgaggaaccagaggctgtatgtgcatgaagctgtgaaggccggcgtggtgggccctgagctgcacgagcagctgctgtctgctgagaaggctgtgacaggctacagagacccctacagcggcagcaccatcagcctcttccaggccatgcagaagggcctggtgctgcggcagcacggcatccggctgctggaggcccagatcgccaccggcggcatcatcgaccctgtgcacagccaccgggtgcctgtggatgtggcctaccagaggggctacttcagcgaggagatgaacagagtgctggccgaccccagtgatgacaccaagggcttctttgaccccaacacccatgagaacctgacctaccggcagctgctggagcgctgtgtggaggaccctgagaccggcctgcggctgctgcccctgaagggagctgagaaggccgaggtggtggagaccacccaggtgtacacagaggaggagacccggcgggcctttgaggagacccagattgacatccctgggggcggcagccatggaggcagcaccatgagcctgtgggaggtgatgcagagcgacctgatccctgaggagcagagggcccagctgatggctgacttccaggccggccgggtgaccaaggagaggatgatcatcatcatcatcgagatcatcgagaagacagagatcatccggcagcagggcctggccagctatgactatgtgagaagaaggctgacagctgaggacctgtttgaggcccgcatcatcagcctggagacctacaacctgctgcgggagggcaccaggagcctgcgggaggccctggaggccgagagcgcctggtgctacctgtatggcaccggctctgtggccggcgtgtacctgcccggcagccggcagaccctgagcatctaccaggccctgaagaagggcctgctgtctgctgaggtggcccggctgctgctggaggcccaggccgccaccggcttcctgctggaccctgtgaagggggagcggctgactgtggatgaggccgtgaggaagggcctggtgggccctgagctgcatgaccggctgctgtctgctgagagagctgtgacaggctacagagacccctacacagagcagaccatcagcctcttccaggccatgaagaaggagctgatccccacagaggaggccctgcggctgctggatgcccagctggccactggaggcatcgtggacccccggctgggcttccacctgcccctggaggtggcctaccagaggggctacctgaacaaggacacccatgaccagctgtctgagcccagcgaggtgcgctcctatgtggaccccagcacagatgagcggctgagctacacccagctgctgcggcgctgcagaagagatgatggcaccggccagctgctgctgcccctgagtgatgccaggaagctgaccttccggggcctgaggaagcagatcaccatggaggagctggtgcgcagccaggtgatggatgaggccacagccctgcagctgcgggagggcctgaccagcattgaggaggtgaccaagaacctgcagaagttcctggagggcaccagctgcatcgccggcgtgtttgtggatgccaccaaggagcggctgtctgtgtaccaggccatgaagaagggcatcatccggcctggaacagcctttgagctgctggaggcccaggccgccaccggctacgtgattgaccccatcaagggcctgaagctgactgtggaggaggccgtgaggatgggcatcgtgggccctgagttcaaggacaagctgctgtctgctgagagagctgtgacaggctacaaggacccctacagcggcaagctgatcagcctcttccaggccatgaagaagggcctcatcctgaaggaccacggcatccggctgctggaggcccagatcgccaccggcggcatcatcgaccctgaggagagccaccggctgcctgtggaggtggcctacaagaggggcctgtttgatgaggagatgaatgagatcctgacagaccccagtgatgacaccaagggcttctttgaccccaacacagaggagaacctgacctacctgcagctgatggagcgctgcatcacagacccccagacaggcctgtgcctgctgcccctgaaggagaagaagcgggagaggaagaccagcagcaagagctctgtgaggaagagaagagtggtgattgtggaccctgagaccgggaaggagatgtctgtgtatgaggcctacaggaagggcctgattgaccaccagacctacctggagctgtctgagcaggagtgtgagtgggaggagatcaccatcagcagcagtgatggagtggtgaagtccatgatcatcgaccggcgcagcggccggcagtatgacattgatgatgccatcgccaagaacctgattgacagaagtgccctggaccagtacagagctggcaccctgagcatcacagaatttgctgacatgctgtctggaaatgccggcggcttccgcagccgcagcagctctgtgggcagcagcagcagctaccccatcagccctgctgtgtccaggacccagctggcctcctggagcgaccccacagaggagaccggccctgtggccggcatcctggacacagagaccctggagaaggtgtccatcacagaggccatgcacaggaacctggtggacaacatcaccggccagaggctgctggaggcccaggcctgcacaggaggcatcatcgaccccagcactggagagcgcttccctgtgacagatgctgtgaacaagggcctggtggacaagatcatggtggaccgcatcaacctggcccagaaggccttctgtggctttgaggaccccaggaccaagaccaagatgtctgctgcccaggccctgaagaagggctggctgtactatgaggccggccagcgcttcctggaggtgcagtacctgactggaggcctgattgaaccagacaccccaggccgggtgcccctggatgaggccctgcagaggggcaccgtggatgccaggacagcccagaagctgagagatgtgggcgcctacagcaagtacctgacctgccccaagaccaagctgaagatctcctacaaggatgccctggaccgctccatggtggaggagggcaccggcctgcggctgctggaggccgccgcccagagcaccaagggctactacagcccctacagcgtgtctggcagcggcagcacagctggcagcaggacaggcagcaggacaggcagccgggccggcagcagaagaggcagctttgatgccaccggcagcggcttctccatgaccttcagcagcagcagctacagcagcagcggctacggccgccgctatgccagcggcagcagcgccagcctgggcggccctgagagcgctgtggcctag

SEQ ID NO: 164419 - DNA, 1503 bp, synthetic construct
  misc_feature 1..1503: note = Description of Artificial Sequence: Synthetic coding sequence
  source 1..1503: mol_type = other DNA
atggccaccgtcatccctggggacctgtctgaggtgcgggacacccagaaggtgcccagcggcaagaggaagagaggagagaccaagcccaggaagaacttcccctgccagctgtgtgacaaggccttcaacagcgtggagaagctgaaggtgcacagctacagccacactggagagcggccctacaagtgcatccagcaggactgcaccaaggcctttgtgtccaagtacaagctgcagaggcacatggccacccacagccctgagaagacccacaagtgcaactactgtgagaagatgttccacaggaaggaccacctgaagaaccacctgcacacccatgaccccaacaaggagaccttcaagtgtgaagaatgtgggaagaactacaacaccaagctgggcttcaagaggcacctggccctgcacgccgccaccagcggggacctgacctgcaaggtgtgcctgcagacctttgagagcactggagtgctgctggagcacctgaagagccatgctgggaagagcagtggaggagtgaaggagaagaagcaccagtgtgagcactgtgaccggcgcttctacaccaggaaggatgtgagaagacacatggtggtgcacacaggcaggaaggacttcctgtgccagtactgtgcccagcgcttcggcaggaaggaccacctgaccaggcacatgaagaagagccacaaccaggagctgctgaaggtgaagacagagcctgtggacttcctggaccccttcacctgcaatgtgtctgtgcccatcaaggatgagctgctgcctgtgatgagcctgcccagcagcgagctgctgagcaagcccttcaccaacaccctgcagctgaacctgtacaacacccccttccagagcatgcagagcagcggcagcgcccaccagatgatcaccaccctgcccctgggcatgacctgccccatcgacatggacacagtgcaccccagccaccacctgtccttcaagtaccccttcagcagcaccagctatgccatcagcatccctgagaaggagcagcccctgaagggggagattgagagctacctgatggagctgcagggcggcgtgcccagcagcagccaggacagccaggccagcagcagcagcaagctgggcctggacccccagatcggcagcctggatgatggagctggggacctgagcctgagcaagagcagcatcagcatcagtgaccccctgaacaccccagccctggacttcagccagctgttcaacttcatccccctgaatggccccccctacaaccccctgtctgtgggcagcctgggcatgagctacagccaggaggaggcccacagctctgtgtcccagctgcccccccagacccaggacctgcaggaccctgccaacaccatcggcctgggcagcctgcacagcctgtctgctgccttcaccagcagcctgagcaccagcaccaccctgccccgcttccaccaggccttccagtag

SEQ ID NO: 164420 - DNA, 1257 bp, synthetic construct
  misc_feature 1..1257: note = Description of Artificial Sequence: Synthetic coding sequence
  source 1..1257: mol_type = other DNA
atggccacccacagccctgagaagacccacaagtgcaactactgtgagaagatgttccacaggaaggaccacctgaagaaccacctgcacacccatgaccccaacaaggagaccttcaagtgtgaagaatgtgggaagaactacaacaccaagctgggcttcaagaggcacctggccctgcacgccgccaccagcggggacctgacctgcaaggtgtgcctgcagacctttgagagcactggagtgctgctggagcacctgaagagccatgctgggaagagcagtggaggagtgaaggagaagaagcaccagtgtgagcactgtgaccggcgcttctacaccaggaaggatgtgagaagacacatggtggtgcacacaggcaggaaggacttcctgtgccagtactgtgcccagcgcttcggcaggaaggaccacctgaccaggcacatgaagaagagccacaaccaggagctgctgaaggtgaagacagagcctgtggacttcctggaccccttcacctgcaatgtgtctgtgcccatcaaggatgagctgctgcctgtgatgagcctgcccagcagcgagctgctgagcaagcccttcaccaacaccctgcagctgaacctgtacaacacccccttccagagcatgcagagcagcggcagcgcccaccagatgatcaccaccctgcccctgggcatgacctgccccatcgacatggacacagtgcaccccagccaccacctgtccttcaagtaccccttcagcagcaccagctatgccatcagcatccctgagaaggagcagcccctgaagggggagattgagagctacctgatggagctgcagggcggcgtgcccagcagcagccaggacagccaggccagcagcagcagcaagctgggcctggacccccagatcggcagcctggatgatggagctggggacctgagcctgagcaagagcagcatcagcatcagtgaccccctgaacaccccagccctggacttcagccagctgttcaacttcatccccctgaatggccccccctacaaccccctgtctgtgggcagcctgggcatgagctacagccaggaggaggcccacagctctgtgtcccagctgcccccccagacccaggacctgcaggaccctgccaacaccatcggcctgggcagcctgcacagcctgtctgctgccttcaccagcagcctgagcaccagcaccaccctgccccgcttccaccaggccttccagtag

SEQ ID NO: 164421 - DNA, 1503 bp, synthetic construct; identical to SEQ ID NO: 164419
  misc_feature 1..1503: note = Description of Artificial Sequence: Synthetic coding sequence
  source 1..1503: mol_type = other DNA

SEQ ID NO: 164422 - DNA, 1392 bp, synthetic construct
  misc_feature 1..1392: note = Description of Artificial Sequence: Synthetic coding sequence
  source 1..1392: mol_type = other DNA
atggccaccttcccctgccagctgtgtgggaagaccttcctgaccctggagaagttcaccatccacaactacagccacagccgggagcggccctacaagtgtgtgcagcctgactgtgggaaggcctttgtgagccgctacaagctgatgaggcacatggccacccacagcccccagaagagccaccagtgtgcccactgtgagaagaccttcaacaggaaggaccacctgaagaaccacctgcagacccatgaccccaacaagatggccttcggctgtgaagaatgtgggaagaagtacaacaccatgctgggctacaagaggcacctggccctgcacgccgccagcagcggggacctgacctgtggggtgtgtgccctggagctgggcagcacagaggtgctgctggaccacctgaaggcccatgctgaggagaagcccccatctggcaccaaggagaagaagcaccagtgtgaccactgtgagcgctgcttctacaccaggaaggatgtgcggcggcacctggtggtgcacacaggctgcaaggacttcctgtgccagttctgtgcccagagatttggaaggaaggaccacctgaccaggcacaccaagaagacccacagccaggagctgatgaaggagagcctgcagacaggagacctgctgagcaccttccacaccatcagccccagcttccagctgaaggctgctgccctgccccccttccccctgggcgccagcgcccagaatggcctggccagcagcctgcctgctgaggtgcacagcctgaccctgagccccccagagcaggccgcccagcccatgcagcccctgcctgagagcctggccagcctgcaccccagcgtgtccccaggcagccccccaccacccctgcccaaccacaagtacaacaccaccagcaccagctacagccccctggccagcctgcccctgaaggctgacaccaagggcttctgcaacatcagcctgtttgaggacctgcccctgcaggagccccagagcccccagaagctgaaccctggctttgacctggccaagggaaatgctgggaaggtgaacctgcccaaggagctgcctgcagatgctgtgaacctgaccatcccagccagcctggacctgagccccctgctgggcttctggcagctgcccccaccagccacccagaacaccttcggcaacagcaccctggccctgggccctggagagagcctgccccaccggctgagctgcctgggccagcagcagcaggagccccccctggccatgggcaccgtgtccctgggccagctgcccctgccccccatcccccacgtgttttctgctggcaccggcagcgccatcctgccccacttccaccacgccttcagatag

SEQ ID NO: 164423 - DNA, 1392 bp, synthetic construct; identical to SEQ ID NO: 164422
  misc_feature 1..1392: note = Description of Artificial Sequence: Synthetic coding sequence
  source 1..1392: mol_type = other DNA

SEQ ID NO: 164424 - DNA, 1392 bp, synthetic construct; identical to SEQ ID NO: 164422
  misc_feature 1..1392: note = Description of Artificial Sequence: Synthetic coding sequence
  source 1..1392: mol_type = other DNA

SEQ ID NO: 164425 - DNA, 1236 bp, synthetic construct
  misc_feature 1..1236: note = Description of Artificial Sequence: Synthetic coding sequence
  source 1..1236: mol_type = other DNA
atggccacccacagcccccagaagagccaccagtgtgcccactgtgagaagaccttcaacaggaaggaccacctgaagaaccacctgcagacccatgaccccaacaagatggccttcggctgtgaagaatgtgggaagaagtacaacaccatgctgggctacaagaggcacctggccctgcacgccgccagcagcggggacctgacctgtggggtgtgtgccctggagctgggcagcacagaggtgctgctggaccacctgaaggcccatgctgaggagaagcccccatctggcaccaaggagaagaagcaccagtgtgaccactgtgagcgctgcttctacaccaggaaggatgtgcggcggcacctggtggtgcacacaggctgcaaggacttcctgtgccagttctgtgcccagagatttggaaggaaggaccacctgaccaggcacaccaagaagacccacagccaggagctgatgaaggagagcctgcagacaggagacctgctgagcaccttccacaccatcagccccagcttccagctgaaggctgctgccctgccccccttccccctgggcgccagcgcccagaatggcctggccagcagcctgcctgctgaggtgcacagcctgaccctgagccccccagagcaggccgcccagcccatgcagcccctgcctgagagcctggccagcctgcaccccagcgtgtccccaggcagccccccaccacccctgcccaaccacaagtacaacaccaccagcaccagctacagccccctggccagcctgcccctgaaggctgacaccaagggcttctgcaacatcagcctgtttgaggacctgcccctgcaggagccccagagcccccagaagctgaaccctggctttgacctggccaagggaaatgctgggaaggtgaacctgcccaaggagctgcctgcagatgctgtgaacctgaccatcccagccagcctggacctgagccccctgctgggcttctggcagctgcccccaccagccacccagaacaccttcggcaacagcaccctggccctgggccctggagagagcctgccccaccggctgagctgcctgggccagcagcagcaggagccccccctggccatgggcaccgtgtccctgggccagctgcccctgccccccatcccccacgtgttttctgctggcaccggcagcgccatcctgccccacttccaccacgccttcagatag

SEQ ID NO: 164426 - DNA, 1236 bp, synthetic construct; identical to SEQ ID NO: 164425
  misc_feature 1..1236: note = Description of Artificial Sequence: Synthetic coding sequence
  source 1..1236: mol_type = other DNA

SEQ ID NO: 164427 - DNA, 1392 bp, synthetic construct; identical to SEQ ID NO: 164422
  misc_feature 1..1392: note = Description of Artificial Sequence: Synthetic coding sequence
  source 1..1392: mol_type = other DNA

SEQ ID NO: 164428 - DNA, 1392 bp, synthetic construct; identical to SEQ ID NO: 164422
  misc_feature 1..1392: note = Description of Artificial Sequence: Synthetic coding sequence
  source 1..1392: mol_type = other DNA

SEQ ID NO: 164429 - DNA, 531 bp, synthetic construct
  misc_feature 1..531: note = Description of Artificial Sequence: Synthetic coding sequence
  source 1..531: mol_type = other DNA
atggccacccacagcccccagaagagccaccagtgtgcccactgtgagaagaccttcaacaggaaggaccacctgaagaaccacctgcagacccatgaccccaacaagatggccttcggctgtgaagaatgtgggaagaagtacaacaccatgctgggctacaagaggcacctggccctgcacgccgccagcagcggggacctgacctgtggggtgtgtgccctggagctgggcagcacagaggtgctgctggaccacctgaaggcccatgctgaggagaagcccccatctggcaccaaggagaagaagcaccagtgtgaccactgtgagcgctgcttctacaccaggaaggatgtgcggcggcacctggtggtgcacacaggctgcaaggacttcctgtgccagttctgtgcccagagatttggaaggaaggaccacctgaccaggcacaccaagaagacccacagccaggagctgatgaaggagagcctgcagacaggagacctgctgagcaccttccacaccatctag

SEQ ID NO: 164430 - DNA, 1392 bp, synthetic construct; identical to SEQ ID NO: 164422
  misc_feature 1..1392: note = Description of Artificial Sequence: Synthetic coding sequence
  source 1..1392: mol_type = other DNA

SEQ ID NO: 164431 - DNA, 1236 bp, synthetic construct; identical to SEQ ID NO: 164425
  misc_feature 1..1236: note = Description of Artificial Sequence: Synthetic coding sequence
  source 1..1236: mol_type = other DNA

SEQ ID NO: 164432 - DNA, 1392 bp, synthetic construct; identical to SEQ ID NO: 164422
  misc_feature 1..1392: note = Description of Artificial Sequence: Synthetic coding sequence
  source 1..1392: mol_type = other DNA

SEQ ID NO: 164433 - DNA, 759 bp, synthetic construct
  misc_feature 1..759: note = Description of Artificial Sequence: Synthetic coding sequence
  source 1..759: mol_type = other DNA
atgaaggagagcctgcagacaggagacctgctgagcaccttccacaccatcagccccagcttccagctgaaggccgccgccctgccccccttccccctgggcgccagcgcccagaatggcctggccagcagcctgcctgctgaggtgcacagcctgaccctgagccccccagagcaggccgcccagcccatgcagcccctgcctgagagcctggccagcctgcaccccagcgtgtccccaggcagccccccaccacccctgcccaaccacaagtacaacaccaccagcaccagctacagccccctggccagcctgcccctgaaggctgacaccaagggcttctgcaacatcagcctgtttgaggacctgcccctgcaggagccccagagcccccagaagctgaaccctggctttgacctggccaagggaaatgccggcaaggtgaacctgcccaaggagctgcctgcagatgctgtgaacctgaccatcccagccagcctggacctgagccccctgctgggcttctggcagctgcccccaccagccacccagaacacctttggaaacagcaccctggccctgggccctggagagagcctgccccaccggctgagctgcctgggccagcagcagcaggagccccccctggccatgggcaccgtgtccctgggccagctgcccctgccccccatcccccacgtgttttctgctggcactggaagtgccatcctgccccacttccaccacgccttcagatag

SEQ ID NO: 164434 - DNA, 1491 bp, synthetic construct
  misc_feature 1..1491: note = Description of Artificial Sequence: Synthetic coding sequence
  source 1..1491: mol_type = other DNA
atgaccaccttcttcacctctgtgcccccctggatccaggatgccaagcaggaggaggaggtgggctggaagctggtgccccggccccggggccgggaggccgagagccaggtgaagtgccagtgtgagatcagcggcacccccttcagcaatggagagaagctgcggccccacagcctgccccagcctgagcagaggccctacagctgcccccagctgcactgcggcaaggcctttgccagcaagtacaagctgtaccgccacatggccacccacagcgcccagaagccccaccagtgcatgtactgtgacaagatgttccacaggaaggaccacctgaggaaccacctgcagacccatgaccccaacaaggaggccctgcactgcagtgaatgtgggaagaactacaacaccaagctgggctacagaagacacctggccatgcacgccgccagcagcggggacctgagctgcaaggtgtgcctgcagacctttgagagcacccaggccctgctggagcacctgaaggcccacagccggcgggtggccggcggggccaaggagaagaagcacccctgtgaccactgtgaccggcgcttctacaccaggaaggatgtgagaagacacctggtggtgcacacaggcaggaaggacttcctgtgccagtactgtgcccagcgcttcggcaggaaggaccacctgaccaggcatgtgaagaagagccacagccaggagctgctgaagatcaagacagagcctgtggacatgctgggcctgctgagctgcagcagcacagtgtctgtgaaggaggagctgagccctgtgctgtgcatggccagcagagatgtgatgggcaccaaggccttccctggcatgctgcccatgggcatgtacggggcccacatccccaccatgcccagcactggagtgccccacagcctggtgcacaacaccctgcccatgggcatgagctaccccctggagagcagccccatcagcagccctgcccagctgccccccaagtaccagctgggcagcaccagctacctgcctgacaagctgcccaaggtggaggtggacagcttcctggccgagctgcccggcagcctgagcctgagcagcgctgagccccagcctgccagcccccagcctgctgctgctgctgccctgctggatgaggccctgctggccaagagccctgccaacctgtctgaggccctgtgtgccgccaacgtggacttcagccacctgctgggcttcctgcccctgaacctgcccccctgcaaccccccaggggccaccggcggcctggtgatgggctacagccaggccgaggcccagcccctgctgaccaccctgcaggcccagccccaggacagccctggagctgggggccccctgaactttggccccctgcacagcctgccccctgtgttcaccagcggcctgagcagcaccaccctgccccgcttccaccaggccttccagtag

SEQ ID NO: 164435 - DNA, 507 bp, synthetic construct
  misc_feature 1..507: note = Description of Artificial Sequence: Synthetic coding sequence
  source 1..507: mol_type = other DNA
atgcaggcccagcagtaccagcagcagaggaggaagtttgctgctgccttcctggccttcatcttcatcctggccgctgtggacacagctgaggccggcaagaaggagaagccagagaagaaggtgaagaagagtgactgtggggagtggcagtggagcgtgtgtgtgcccaccagcggggactgtggcctgggcacccgggagggcaccaggactggagctgagtgcaagcagaccatgaagacccagcgctgcaagatcccctgcaactggaagaagcagtttggagctgagtgcaagtaccagttccaggcctggggagaatgtgacctgaacacagccctgaagaccaggacaggcagcctgaagagggccctgcacaatgctgagtgccagaagacagtgaccatcagcaagccctgtgggaagctgaccaagcccaagccccaggccgagagcaagaagaagaagaaggagggcaagaagcaggagaagatgctggactag

SEQ ID NO: 164436 - DNA, 1518 bp, synthetic construct
  misc_feature 1..1518: note = Description of Artificial Sequence: Synthetic coding sequence
  source 1..1518: mol_type = other DNA
atggtggaggaggtgcagaagcacagcgtgcacaccctggtgttccgcagcctgaagaggacccatgacatgtttgtggccgacaatggcaagcctgtgcccctggatgaggagagccacaagaggaagatggccatcaagctgagaaatgaatatggccctgtgctgcacatgcccaccagcaaagaaaacctgaaggagaagggcccccagaatgccacagacagctatgtgcacaagcagtacccagccaaccagggccaggaggtggagtactttgtggccggcgtggccctgacagctgacaccaagatccagaggatgcccagcgagagcgctgcccagagcctggccgtggccctgcccctgcagaccaaggcagatgccaacagaacagcccccagcggcagcgagtaccgccaccctggggccagtgaccggccccagcccacagccatgaacagcatcgtgatggagaccggcaacaccaagaacagcgccctgatggccaagaaggcccccaccatgcccaagccccagtggcaccccccctggaagctgtacagagtcatcagcggccacctgggctgggtgcgctgcatcgctgtggagcccggcaaccagtggtttgtgacaggcagcgctgacaggaccatcaagatctgggacctggccagcggcaagctgaagctgagcctgaccggccacatcagcacagtgcggggcgtcatcgtgtccaccaggagcccctacctgttcagctgtggggaggacaagcaggtgaagtgctgggacctggagtacaacaaggtgatccgccactaccacggccacctgtctgctgtgtatggcctggacctgcaccccaccattgatgtgctggtgacctgcagccgggacagcacagcccgcatctgggatgtgaggaccaaggcctctgtgcacaccctgagcggccacaccaatgctgtggccaccgtgcgctgccaggccgctgagccccagatcatcaccggcagccatgacaccaccatccggctgtgggacctggtggccggcaagaccagggtgaccctgaccaaccacaagaagtctgtgcgggctgtggtgctgcaccccaggcactacacctttgccagcggcagcccagacaacatcaagcagtggaagttcccagatggcagcttcatccagaacctgagcggccacaatgccatcatcaacaccctgactgtgaacagtgatggagtgctggtgtctggagctgacaatggcaccatgcacctgtgggactggaggacaggctacaacttccagagggtgcatgctgctgtgcagcccggcagcctggacagcgagagcggcatctttgcctgtgcctttgaccagagcgagagccggctgctgacagctgaggccgacaagaccatcaaggtgtaccgggaggatgacacagccacagaggagacccaccctgtgtcctggaagccagagatcatcaagaggaagcgcttctag

SEQ ID NO: 164437 - DNA, 1545 bp, synthetic construct
  misc_feature 1..1545: note = Description of Artificial Sequence: Synthetic coding sequence
  source 1..1545: mol_type = other DNA
atgatctgtgaggtgcagaagcacagcgtgcacaccctggtgttccgcagcctgaagaggacccatgacatgtttgtggccgacaatggcaagcctgtgcccctggatgaggagagccacaagaggaagatggccatcaagctgagaaatgaatatggccctgtgctgcacatgcccaccagcaaagaaaacctgaaggagaagggcccccagaatgccacagacagctatgtgcacaagcagtacccagccaaccagggccaggaggtggagtactttgtggccggcacccacccctacccacctggccctggggtggccctgacagctgacaccaagatccagaggatgcccagcgagagcgctgcccagagcctggccgtggccctgcccctgcagaccaaggcagatgccaacagaacagcccccagcggcagcgagtaccgccaccctggggccagtgaccggccccagcccacagccatgaacagcatcgtgatggagactggaaacaccaagaacagcgccctgatggccaagaaggcccccaccatgcccaagccccagtggcaccccccctggaagctgtacagagtcatcagcggccacctgggctgggtgcgctgcatcgctgtggagcccggcaaccagtggtttgtgactggatctgctgacaggaccatcaagatctgggacctggccagcggcaagctgaagctgagcctgaccggccacatcagcacagtgcggggcgtgattgtgtccaccaggagcccctacctgttcagctgtggggaggacaagcaggtgaagtgctgggacctggagtacaacaaggtgatccgccactaccacggccacctgtctgctgtgtatggcctggacctgcaccccaccattgatgtgctggtgacctgcagccgggacagcacagcccgcatctgggatgtgaggaccaaggcctctgtgcacaccctgagcggccacaccaatgctgtggccaccgtgcgctgccaggccgctgagccccagatcatcaccggcagccatgacaccaccatccggctgtgggacctggtggccggcaagaccagggtgaccctgaccaaccacaagaagtctgtgcgggctgtggtgctgcaccccaggcactacacctttgccagcggcagcccagacaacatcaagcagtggaagttcccagatggcagcttcatccagaacctgagcggccacaatgccatcatcaacaccctgactgtgaacagtgatggagtgctggtgtctggagctgacaatggcaccatgcacctgtgggactggaggacaggctacaacttccagagggtgcacgccgctgtgcagcccggcagcctggacagcgagagcggcatctttgcctgtgcctttgaccagagcgagagccggctgctgacagctgaggccgacaagaccatcaaggtgtacagagaagatgacacagccacagaggagacccaccctgtgtcctggaagccagagatcatcaagaggaagcgcttctag

SEQ ID NO: 164438 - DNA, 1545 bp, synthetic construct
  misc_feature 1..1545: note = Description of Artificial Sequence: Synthetic coding sequence
  source 1..1545: mol_type = other DNA
atggtggaggaggtgcagaagcacagcgtgcacaccctggtgttccgcagcctgaagaggacccatgacatgtttgtggccgacaatggcaagcctgtgcccctggatgaggagagccacaagaggaagatggccatcaagctgagaaatgaatatggccctgtgctgcacatgcccaccagcaaagaaaacctgaaggagaagggcccccagaatgccacagacagctatgtgcacaagcagtacccagccaaccagggccaggaggtggagtactttgtggccggcacccacccctacccacctggccctggggtggccctgacagctgacaccaagatccagaggatgcccagcgagagcgctgcccagagcctggccgtggccctgcccctgcagaccaaggcagatgccaacagaacagcccccagcggcagcgagtaccgccaccctggggccagtgaccggccccagcccacagccatgaacagcatcgtgatggagactggaaacaccaagaacagcgccctgatggccaagaaggcccccaccatgcccaagccccagtggcaccccccctggaagctgtacagagtcatcagcggccacctgggctgggtgcgctgcatcgctgtggagcccggcaaccagtggtttgtgactggatctgctgacaggaccatcaagatctgggacctggccagcggcaagctgaagctgagcctgaccggccacatcagcacagtgcggggcgtgattgtgtccaccaggagcccctacctgttcagctgtggggaggacaagcaggtgaagtgctgggacctggagtacaacaaggtgatccgccactaccacggccacctgtctgctgtgtatggcctggacctgcaccccaccattgatgtgctggtgacctgcagccgggacagcacagcccgcatctgggatgtgaggaccaaggcctctgtgcacaccctgagcggccacaccaatgctgtggccaccgtgcgctgccaggccgctgagccccagatcatcaccggcagccatgacaccaccatccggctgtgggacctggtggccggcaagaccagggtgaccctgaccaaccacaagaagtctgtgcgggctgtggtgctgcaccccaggcactacacctttgccagcggcagcccagacaacatcaagcagtggaagttcccagatggcagcttcatccagaacctgagcggccacaatgccatcatcaacaccctgactgtgaacagtgatggagtgctggtgtctggagctgacaatggcaccatgcacctgtgggactggaggacaggctacaacttccagagggtgcacgccgctgtgcagcccggcagcctggacagcgagagcggcatctttgcctgtgcctttgaccagagcgagagccggctgctgacagctgaggccgacaagaccatcaaggtgtacagagaagatgacacagccacagaggagacccaccctgtgtcctggaagccagagatcatcaagaggaagcgcttctag

SEQ ID NO: 164439 - DNA, 5622 bp, synthetic construct
  misc_feature 1..5622: note = Description of Artificial Sequence: Synthetic coding sequence
  source 1..5622: mol_type = other DNA
atgtgggccgaggccggcctgccccgggccggcggcggcagccagccccccttccgcaccttcagcgccagtgactggggcctgacccacctggtggtgcatgagcagacaggagaggtgtatgtgggcgctgtgaaccgcatctacaagctgagcggcaacctgaccctgctgcgggcccacgtgactggacctgtggaggacaatgagaagtgctacccacctccttctgtgcagagctgcccccacggcctgggcagcacagacaacgtgaacaagctgctgctgctggactatgctgccaaccggctgctggcctgtggcagcgccagccagggcatctgccagttcctgcggctggatgacctcttcaagctgggggagccccaccacaggaaggagcactacctgagctctgtgcaggaggccggctccatggccggcgtgctgattgctggccccccaggccagggccaggccaagctgtttgtgggcacccccattgatggcaagtctgagtacttccccaccctgagcagccggcggctgatggccaatgaggaggatgctgacatgtttggatttgtgtaccaggatgaatttgtgagcagccagctgaagatccccagcgacaccctgagcaagtttcctgcctttgacatctactacgtgtacagcttccgctctgagcagtttgtgtactacctgaccctgcagctggacacccagctgaccagcccagatgctgctggggagcacttcttcaccagcaagatcgtgcggctgtgtgtggatgaccccaagttctacagctatgtggagttccccatcggctgtgagcaggccggcgtggagtaccgcctggtgcaggatgcctacctgagcaggcctggccgggccctggcccaccagctgggcctggctgaagatgaagatgtgctcttcaccgtgtttgcccagggccagaagaacagagtgaagccacccaaggagagcgccctgtgcctcttcaccctgcgggccatcaaggagaagatcaaggagcgcatccagagctgctacagaggagagggcaagctgagcctgccctggctgctgaacaaggagctgggctgcatcaacagccccctgcagattgatgatgacttctgtggccaggacttcaaccagcccctgggcggcaccgtgaccatcgagggcacccccctgtttgtggacaaggatgatggcctgacagctgtggccgcctatgactaccggggccgcacagtggtgtttgctggcaccaggagcggccgcatcaggaagatcctggtggacctgagcaaccctgggggccggcctgccctggcctatgagagcgtggtggcccaggagggcagccccatcctgcgggacctggtgctgagccccaaccaccagtacctgtatgccatgacagagaagcaggtgaccagggtgcctgtggagagctgtgtgcagtacaccagctgtgagctgtgcctgggcagccgggacccccactgcggctggtgtgtgctgcacagcatctgcagcagaagagatgcctgtgaaagagcagatgagccccagagatttgctgctgacctgctgcagtgtgtgcagctgactgtgcagcccagaaatgtgtctgtgaccatgagccaggtgcccctggtgctgcaggcctggaatgtgcctgacctgtctgctggggtgaactgcagctttgaggacttcacagaaagtgaatctgtgctggaggatggccgcatccactgccgcagccccagcgcccgggaggtggcccccatcacccggggccagggcgaccagagggtggtgaagctgtacctgaagagcaaggagaccgggaagaagtttgcctctgtggactttgtgttctacaactgcagcgtgcaccagagctgcctgagctgtgtgaatggcagcttcccctgccactggtgcaagtacagacatgtgtgcacccacaacgtggccgactgtgccttcctggagggccgggtgaatgtgtctgaggactgcccccagatcctgcccagcacccagatctacgtgcctgtgggcgtggtgaagcccatcaccctggccgccaggaacctgccccagccccagagcggccagaggggctatgagtgcctcttccacatccctggcagccctgcccgggtgacagccctgcgcttcaacagcagcagcctgcagtgccagaacagcagctacagctatgagggcaatgatgtgtctgacctgcctgtgaacctgtctgtggtgtggaatggaaactttgtgattgacaacccccagaacatccaggcccacctgtacaagtgcccagccctgcgggagagctgtggcctgtgcctgaaggctgaccccaggtttgaatgtggctggtgtgtggccgagcggcgctgcagcctgcggcaccactgtgccgctgacaccccagcctcctggatgcacgcccggcacggcagcagccgctgcacagaccccaagatcctgaagctgagccctgagaccggcccccggcagggcggcacccggctgaccatcaccggggagaacctgggcctgcgctttgaagatgtgcggctgggcgtgcgggtgggcaaggtgctgtgcagccctgtggagagcgagtacatctctgctgagcagatcgtgtgtgaaattggagatgccagctctgtgcgggcccatgatgccctggtggaggtgtgtgtgcgggactgcagcccccactaccgggccctgagccccaagcgcttcacctttgtgacccccaccttctacagagtgagccccagccggggccccctgagcggcggcacctggattggcatcgagggcagccacctgaatgccggcagtgatgtggccgtgtctgtgggcggccggccctgcagcttctcctggaggaacagccgggagatccgctgcctgaccccacctggccagagccctggcagcgcccccatcatcatcaacatcaacagagcccagctgaccaaccctgaggtgaagtacaactacacagaggaccccaccatcctgagaattgatcctgagtggagcatcaacagcggcggcaccctgctgactgtgacaggcaccaacctggccaccgtgcgggagccccgcatccgggccaagtatggaggcatcgagcgggagaatggctgcctggtgtacaatgacaccaccatggtgtgccgggcccccagcgtggccaaccctgtgcgcagccccccagagctgggggagaggccagatgagctgggctttgtgatggacaacgtgcgcagcctgctggtgctgaacagcaccagcttcctgtactacccagaccctgtgctggagcccctgagccccaccggcctgctggagctgaagcccagcagccccctcatcctgaagggcaggaacctgctgcccccagcccctggcaacagccggctgaactacacagtgctgattggcagcaccccctgcaccctgactgtgtctgagacccagctgctgtgtgaggcccccaacctgaccggccagcacaaggtgacagtgcgggccggcggctttgagttcagccctggcaccctgcaggtgtacagcgacagcctgctgaccctgcctgccatcgtgggcatcggcggcggcggcggcctgctgctgctggtgattgtggccgtgctgattgcctacaagaggaagagcagagatgctgacaggaccctgaagaggctgcagctgcagatggacaacctggagagccgggtggccctggagtgcaaggaggcctttgctgagctgcagacagacatccacgagctgaccaatgacctggatggagctggcatccccttcctggactaccgcacctacgccatgagggtgctcttccctggcatcgaggaccaccctgtgctgaaggagatggaggtgcaggccaacgtggagaagagcctgaccctgtttggccagctgctgaccaagaagcacttcctgctgaccttcatccgcaccctggaggcccagaggagcttctccatgagggacagaggaaatgtggccagcctcatcatgacagccctgcagggcgagatggagtatgccaccggggtgctgaagcagctgctgagtgacctgattgagaagaacctggagagcaagaaccaccccaagctgctgctgcggaggacagagagcgtggccgagaagatgctgaccaactggttcaccttcctgctgtacaagttcctgaaggaatgtgccggggagcccctcttcatgctgtactgtgccatcaagcagcagatggagaagggccccattgatgccatcaccggggaggcccgctacagcctgtctgaggacaagctgatccggcagcagattgactacaagaccctgaccctgaactgtgtgaacccagaaaatgaaaatgcccctgaggtgcctgtgaagggcctggactgtgacacagtgacccaggccaaggagaagctgctggatgctgcctacaagggcgtgccctacagccagaggcccaaggctgctgacatggacctggagtggaggcagggccgcatggcccgcatcatcctgcaggatgaagatgtgaccaccaagattgacaatgactggaagaggctgaacaccctggcccactaccaggtgacagatggcagctctgtggccctggtgcccaagcagaccagcgcctacaacatcagcaacagcagcaccttcaccaagagcctgagccgctatgagagcatgctgaggacagccagcagcccagacagcctgcggagcaggacccccatgatcaccccagacctggagagcggcaccaagctgtggcacctggtgaagaaccacgaccacctggaccagcgggagggggaccggggcagcaagatggtgtctgagatctacctgacccggctgctggccaccaagggcaccctgcagaagtttgtggatgacctgtttgagaccatcttcagcacagcccaccggggcagcgccctgcccctggccatcaagtacatgtttgacttcctggatgagcaggccgacaagcaccagatccatgatgctgatgtgcgccacacctggaagagcaactgcctgcccctgcgcttctgggtgaatgtcatcaagaacccccagtttgtgtttgacatccacaagaacagcatcacagatgcctgcctgtctgtggtggcccagaccttcatggacagctgcagcaccagcgagcacaagctgggcaaggacagccccagcaacaagctgctgtatgccaaggacatccccaactacaagtcctgggtggagcgctactatgctgacatcgccaagatgcctgccatcagtgaccaggacatgtctgcctacctggccgagcagagccggctgcacctgagccagttcaacagcatgtctgccctgcacgagatctacagctacatcaccaagtacaaggatgagatcctggccgccctggagaaggatgagcaggcccggcggcagaggctgcggagcaagctggagcaggtggtggacaccatggccctgagcagctag

SEQ ID NO: 164440 - DNA, 5691 bp, synthetic construct
  misc_feature 1..5691: note = Description of Artificial Sequence: Synthetic coding sequence
  source 1..5691: mol_type = other DNA
atgcccctgccccccaggagcctgcaggtgctgctgctgctgctgctgctgctgctgctgctgcccggcatgtgggccgaggccggcctgcccagggctgggggcggcagccagccccccttccgcaccttcagcgccagtgactggggcctgacccacctggtggtgcatgagcagacaggagaggtgtatgtgggcgctgtgaaccgcatctacaagctgagcggcaacctgaccctgctgcgggcccacgtgacaggccctgtggaggacaatgagaagtgctaccccccacccagcgtgcagagctgcccccacggcctgggcagcacagacaacgtgaacaagctgctgctgctggactatgctgccaaccggctgctggcctgtggcagcgccagccagggcatctgccagttcctgcggctggatgacctcttcaagctgggggagccccaccacaggaaggagcactacctgagctctgtgcaggaggccggctccatggccggcgtgctgattgctggccccccaggccagggccaggccaagctgtttgtgggcacccccattgatggcaagtctgagtacttccccaccctgagcagccggcggctgatggccaatgaagaagatgctgacatgtttggatttgtgtaccaggatgaatttgtgagcagccagctgaagatccccagcgacaccctgagcaagtttcctgcctttgacatctactacgtgtacagcttccgctctgagcagtttgtgtactacctgaccctgcagctggacacccagctgaccagcccagatgctgctggggagcacttcttcaccagcaagatcgtgcggctgtgtgtggatgaccccaagttctacagctatgtggagttccccatcggctgtgagcaggccggcgtggagtaccgcctggtgcaggatgcctacctgagccggcccggccgggccctggcccaccagctgggcctggccgaggatgaagatgtgctcttcaccgtgtttgcccagggccagaagaacagagtgaagccacccaaggagagcgccctgtgcctcttcaccctgcgggccatcaaggagaagatcaaggagcgcatccagagctgctacagaggagagggcaagctgagcctgccctggctgctgaacaaggagctgggctgcatcaacagccccctgcagattgatgatgacttctgtggccaggacttcaaccagcccctgggcggcaccgtgaccatcgagggcacccccctgtttgtggacaaggatgatggcctgacagctgtggccgcctatgactaccggggccgcacagtggtgtttgctggcaccaggagcggccgcatcaggaagatcctggtggacctgagcaaccctgggggccgcccagccctggcctatgaatctgtggtggcccaggagggcagccccatcctgcgggacctggtgctgagccccaaccaccagtacctgtatgccatgacagagaagcaggtgaccagggtgcctgtggagagctgtgtgcagtacaccagctgtgagctgtgcctgggcagccgggacccccactgcggctggtgtgtgctgcacagcatctgcagcagaagagatgcctgtgagcgggcagatgagccccagagatttgctgctgacctgctgcagtgtgtgcagctgactgtgcagcccagaaatgtgtctgtgaccatgagccaggtgcccctggtgctgcaggcctggaatgtgcctgacctgtctgctggggtgaactgcagctttgaggacttcacagagagcgagagcgtgctggaggatggccgcatccactgccgcagccccagcgcccgggaggtggcccccatcacccggggccagggcgaccagagggtggtgaagctgtacctgaagagcaaggagaccgggaagaagtttgcctctgtggactttgtgttctacaactgcagcgtgcaccagagctgcctgagctgtgtgaatggcagcttcccctgccactggtgcaagtaccgccacgtgtgcacccacaacgtggccgactgtgccttcctggagggccgggtgaatgtgtctgaggactgcccccagatcctgcccagcacccagatctacgtgcctgtgggcgtggtgaagcccatcaccctggccgccaggaacctgccccagccccagagcggccagaggggctatgaatgtctcttccacatccctggcagccctgcccgggtgacagccctgcgcttcaacagcagcagcctgcagtgccagaacagcagctacagctatgagggcaatgatgtgtctgacctgcctgtgaacctgtctgtggtgtggaatggaaacttcgtcatcgacaacccccagaacatccaggcccacctgtacaagtgcccagccctgcgggagagctgtggcctgtgcctgaaggctgaccccaggtttgaatgtggctggtgtgtggccgagcggcgctgcagcctgcggcaccactgtgccgctgacaccccagcctcctggatgcacgcccggcacggcagcagccgctgcacagaccccaagatcctgaagctgagccctgagaccggcccccggcagggcggcacccggctgaccatcactggagagaacctgggcctgcgctttgaagatgtgcggctgggcgtgcgggtgggcaaggtgctgtgcagccctgtggagagcgagtacatctctgctgagcagatcgtgtgtgaaattggagatgccagctctgtgcgggcccatgatgccctggtggaggtgtgtgtgcgggactgcagcccccactaccgggccctgagccccaagcgcttcacctttgtgacccccaccttctacagagtgagccccagccggggccccctgagcggcggcacctggattggaattgagggcagccacctgaatgccggcagtgatgtggccgtgtctgtgggcggccggccctgcagcttctcctggaggaacagccgggagatccgctgcctgaccccacctggccagagccctggcagcgcccccatcatcatcaacatcaacagagcccagctgaccaaccctgaggtgaagtacaactacacagaggaccccaccatcctgagaattgatcctgagtggagcatcaacagcggcggcaccctgctgactgtgacaggcaccaacctggccaccgtgcgggagccccgcatccgggccaagtatggaggcatcgagagagaaaatggctgcctggtgtacaatgacaccaccatggtgtgccgggcccccagcgtggccaaccctgtgcgcagccccccagagctgggggagaggccagatgagctgggctttgtgatggacaacgtgcgcagcctgctggtgctgaacagcaccagcttcctgtactacccagaccctgtgctggagcccctgagccccaccggcctgctggagctgaagcccagcagccccctcatcctgaagggcaggaacctgctgcccccagcccctggcaacagccggctgaactacacagtgctgattggcagcaccccctgcaccctgactgtgtctgagacccagctgctgtgtgaggcccccaacctgaccggccagcacaaggtgacagtgcgggccggcggctttgagttcagccctggcaccctgcaggtgtacagcgacagcctgctgaccctgcctgccatcgtgggcattggaggcggcggcggcctgctgctgctggtgattgtggccgtgctgattgcctacaagaggaagagcagagatgctgacaggaccctgaagaggctgcagctgcagatggacaacctggagagccgggtggccctggagtgcaaggaggcctttgctgagctgcagacagacatccacgagctgaccaatgacctggatggagctggcatccccttcctggactaccgcacctacgccatgagggtgctcttccctggcatcgaggaccaccctgtgctgaaggagatggaggtgcaggccaacgtggagaagagcctgaccctgtttggccagctgctgaccaagaagcacttcctgctgaccttcatccgcaccctggaggcccagaggagcttctccatgagggacagaggaaatgtggccagcctcatcatgacagccctgcagggcgagatggagtatgccactggagtgctgaagcagctgctgagtgacctgattgagaagaacctggagagcaagaaccaccccaagctgctgctgcggaggacagaatctgtggccgagaagatgctgaccaactggttcaccttcctgctgtacaagttcctgaaggaatgtgccggggagcccctcttcatgctgtactgtgccatcaagcagcagatggagaagggccccattgatgccatcactggagaggcccgctacagcctgtctgaggacaagctgatccggcagcagattgactacaagaccctgaccctgaactgtgtgaacccagaaaatgaaaatgcccctgaggtgcctgtgaagggcctggactgtgacacagtgacccaggccaaggagaagctgctggatgctgcctacaagggcgtgccctacagccagaggcccaaggctgctgacatggacctggagtggaggcagggccgcatggcccgcatcatcctgcaggatgaagatgtgaccaccaagattgacaatgactggaagaggctgaacaccctggcccactaccaggtgacagatggcagctctgtggccctggtgcccaagcagaccagcgcctacaacatcagcaacagcagcaccttcaccaagagcctgagccgctatgaatccatgctgaggacagccagcagcccagacagcctgcggagcaggacccccatgatcaccccagacctggagagcggcaccaagctgtggcacctggtgaagaaccacgaccacctggaccagcgggagggggaccggggcagcaagatggtgtctgagatctacctgacccggctgctggccaccaagggcaccctgcagaagtttgtggatgacctgtttgagaccatcttcagcacagcccaccggggcagcgccctgcccctggccatcaagtacatgtttgacttcctggatgagcaggccgacaagcaccagatccatgatgctgatgtgcgccacacctggaagagcaactgcctgcccctgcgcttctgggtgaatgtcatcaagaacccccagtttgtgtttgacatccacaagaacagcatcacagatgcctgcctgtctgtggtggcccagaccttcatggacagctgcagcaccagcgagcacaagctgggcaaggacagccccagcaacaagctgctgtatgccaaggacatccccaactacaagtcctgggtggagcgctactatgctgacatcgccaagatgcctgccatcagtgaccaggacatgtctgcctacctggccgagcagagccggctgcacctgagccagttcaacagcatgtctgccctgcacgagatctacagctacatcaccaagtacaaggatgagatcctggccgccctggagaaggatgagcaggcccggcggcagaggctgcggagcaagctggagcaggtggtggacaccatggccctgagcagctag

SEQ ID NO: 164441 - DNA, 5685 bp, synthetic construct
  misc_feature 1..5685: note = Description of Artificial Sequence: Synthetic coding sequence
  source 1..5685: mol_type = other DNA
atggagcagaggcggccctggccccgggccctggaggtggacagccgctctgtggtgctgctgtctgtggtgtgggtgctgctggcccccccagctgctggcatgccccagttcagcaccttccacagcgagaacagagactggaccttcaaccacctgactgtgcaccagggcactggagctgtgtatgtgggcgccatcaacagagtgtacaagctgaccggcaacctgaccatccaggtggcccacaagacaggccctgaggaggacaacaagagctgctacccacccctgattgtgcagccctgcagcgaggtgctgaccctgaccaacaacgtgaacaagctgctgatcatcgactacagtgaaaatcggctgctggcctgtggcagcctgtaccagggcgtgtgcaagctgctgcggctggatgacctcttcatcctggtggagcccagccacaagaaggagcactacctgagctctgtgaacaagacaggcaccatgtatggagtcatcgtgcgctctgagggggaggatggcaagctgttcatcggcacagctgtggatggcaagcaggactacttccccaccctgagcagcaggaagctgccccgggaccctgagagcagcgccatgctggactatgagctgcacagcgactttgtgagcagcctcatcaagatccccagcgacaccctggccctggtgagccactttgacatcttctacatctacggctttgccagcggcggctttgtgtacttcctgactgtgcagcctgagaccccagagggcgtggccatcaacagcgctggggacctcttctacaccagccgcatcgtgcggctgtgcaaggatgaccccaagttccacagctatgtgtccctgcccttcggctgcaccagggctggggtggagtaccgcctgctgcaggccgcctacctggccaagccaggggacagcctggcccaggccttcaacatcaccagccaggatgatgtgctgtttgccatcttcagcaagggccagaagcagtaccaccaccccccagatgattctgccctgtgtgccttccccatccgggccatcaacctgcagatcaaggagcggctgcagagctgctaccagggcgagggcaacctggagctgaactggctgctgggcaaggatgtgcagtgcaccaaggcccctgtgcccattgatgacaacttctgtggcctggacatcaaccagcccctgggcggcagcacccctgtggagggcctgaccctgtacaccaccagccgggacaggatgacctctgtggccagctatgtgtacaacggctacagcgtggtgtttgtgggcaccaagagcggcaagctgaagaagatccgggcagatggcccccctcatggaggagtgcagtatgagatggtgtctgtgctgaaggatggcagccccatcctgcgggacatggccttcagcattgaccagcgctacctgtatgtgatgtctgagcggcaggtgaccagggtgcctgtggagagctgtgagcagtacaccacctgtggagaatgtctgagcagcggggacccccactgcggctggtgtgccctgcacaacatgtgcagcagaagagacaagtgccagcaggcctgggagcccaacagatttgctgccagcatcagccagtgtgtgtccctggccgtgcaccccagcagcatctctgtgtctgagcacagccggctgctgagcctggtggtgtctgatgccccagacctgtctgctggcatcgcctgtgccttcggcaacctgacagaggtggagggccaggtgtctggcagccaggtgatctgcatcagccctggccccaaggatgtgcctgtgatccccctggaccaggactggtttggcctggagctgcagctgcggagcaaggagaccgggaagatctttgtgtccacagagttcaagttctacaactgcagcgcccaccagctgtgcctgagctgtgtgaacagcgccttccgctgccactggtgcaagtacagaaacctgtgcacccatgaccccaccacctgcagcttccaggagggccgcatcaacatcagcgaggactgcccccagctggtgcccacagaggagatcctgatccctgtgggggaggtgaagcccatcaccctgaaggccaggaacctgccccagccccagagcggccagaggggctatgaatgtgtgctgaacatccagggcgccatccaccgggtgcctgccctgcgcttcaacagcagctctgtgcagtgccagaacagcagctaccagtatgatggcatggacatcagcaacctggccgtggactttgctgtggtgtggaatggaaacttcatcatcgacaacccccaggacctgaaggtgcacctgtacaagtgtgccgcccagcgggagagctgtggcctgtgcctgaaggctgacaggaagtttgaatgtggctggtgcagcggggagcggcgctgcaccctgcaccagcactgcaccagccccagcagcccctggctggactggagcagccacaacgtgaagtgcagcaacccccagatcacagagatcctgactgtgtctggccccccagagggcggcaccagggtgaccatccatggagtgaacctgggcctggacttcagcgagatcgcccaccacgtgcaggtggccggcgtgccctgcacccccctgcctggagagtacatcatcgccgagcagatcgtgtgtgagatgggccacgccctggtgggcaccaccagcggccctgtgcggctgtgcatcggggagtgcaagccagagttcatgaccaagagccaccagcagtacacctttgtgaaccccagcgtgctgagcctgaaccccatccggggccctgagagcggcggcaccatggtgaccatcaccggccactacctgggcgccggcagctctgtggccgtgtacctgggcaaccagacctgtgagttctacggccgctccatgtctgagatcgtgtgtgtgtccccacccagcagcaatggcctgggccctgtgcctgtgtctgtgtctgtggaccgggcccacgtggacagcaacctgcagtttgagtacattgatgacccccgggtgcagagaattgagcctgagtggagcatcgccagcggccacacccccctgaccatcaccggcttcaacctggatgtgatccaggagccccgcatccgggtgaagttcaacgggaaggagagcgtgaatgtgtgcaaggtggtgaacaccaccaccctgacctgcctggcccccagcctgaccacagactaccggcccggcctggacacagtggagaggccagatgaatttggatttgtgttcaacaacgtgcagagcctgctgatctacaatgacaccaagttcatctactaccccaaccccacctttgagctgctgagccccactggagtgctggaccagaagccaggcagccccatcatcctgaagggcaagaacctgtgccccccagccagcggcggggccaagctgaactacacagtgctgattggagagaccccctgtgctgtgacagtgtctgagacccagctgctgtgtgagccccccaacctgaccggccagcacaaggtgatggtgcacgtgggcggcatggtgttcagccctggctctgtgtctgtcatcagtgacagcctgctgaccctgcctgccatcgtgtccattgctgctgggggcagcctgctgctgatcatcgtcatcatcgtgctgattgcctacaagaggaagagccgggagaatgacctgaccctgaagaggctgcagatgcagatggacaacctggagagccgggtggccctggagtgcaaggaggcctttgctgagctgcagacagacatcaatgagctgaccagtgacctggacaggagcggcatcccctacctggactaccgcacctacgccatgagggtgctcttccctggcatcgaggaccaccctgtgctgcgggagctggaggtgcagggcaatggccagcagcacgtggagaaggccctgaagctgtttgcccagctgatcaacaacaaggtgttcctgctgaccttcatccgcaccctggagctgcagaggagcttctccatgagggacagaggaaatgtggccagcctcatcatgacaggcctgcagggccgcctggagtatgccacagatgtgctgaagcagctgctgagtgacctgattgacaagaacctggagaacaagaaccaccccaagctgctgctgcggaggacagagagcgtggccgagaagatgctgaccaactggtttgccttcctgctgcacaagttcctgaaggaatgtgccggggagcccctcttcatgctgtactgtgccatcaagcagcagatggagaagggccccattgatgccatcaccggggaggcccgctacagcctgtctgaggacaagctgatccggcagcagatcgagtacaagaccctcatcctgaactgtgtgaacccagacaatgaaaacagccctgagatccctgtgaaggtgctgaactgtgacaccatcacccaggtgaaggagaagatcctggatgctgtgtacaagaatgtgccctacagccagaggcccagggctgtggacatggacctggagtggaggcagggccgcatcgcccgggtggtgctgcaggatgaggacatcaccaccaagattgaaggagactggaagaggctgaacaccctgatgcactaccaggtgtctgacagatctgtggtggccctggtgcccaagcagaccagcagctacaacatcccagccagcgccagcatcagcaggaccagcatcagccgctatgacagcagcttccgctacacaggcagcccagacagcctgcggagccgggcccccatgatcaccccagacctggagagcggcgtgaaggtgtggcacctggtgaagaaccacgaccacggggaccagaaggagggggaccggggcagcaagatggtgtctgagatctacctgacccggctgctggccaccaagggcaccctgcagaagtttgtggatgacctgtttgagaccctcttcagcacagtgcaccggggcagcgccctgcccctggccatcaagtacatgtttgacttcctggatgagcaggccgacagacacagcatccatgacacagatgtgcgccacacctggaagagcaactgcctgcccctgcgcttctgggtgaatgtcatcaagaacccccagtttgtgtttgacatccacaagggcagcatcacagatgcctgcctgtctgtggtggcccagaccttcatggacagctgcagcaccagcgagcaccggctgggcaaggacagccccagcaacaagctgctgtatgccaaggacatccccagctacaagtcctgggtggagcgctactatgctgacatcgccaagctgcctgccatcagtgaccaggacatgaatgcctacctggccgagcagagccggctgcatgctgtggagttcaacatgctgagcgccctgaatgagatctacagctatgtgtccaagtacagcgaggagctgattggagccctggagcaggatgagcaggcccggcggcagaggctggcctacaaggtggagcagctgatcaatgccatgagcattgagagctag

SEQ ID NO: 164442 - DNA, 5685 bp, synthetic construct
  misc_feature 1..5685: note = Description of Artificial Sequence: Synthetic coding sequence
  source 1..5685: mol_type = other DNA
atgaaggccatgccctggaactggacctgcctgctgagccacctgctgatggtgggcatgggcagcagcaccctgctgacccggcagcctgcccccctgagccagaagcagaggagctttgtgaccttccggggggagcctgctgagggcttcaaccacctggtggtggatgagaggacaggccacatctacctgggcgctgtgaaccgcatctacaagctgagcagtgacctgaaggtgctggtgacccatgagaccggcccagatgaggacaaccccaagtgctacccaccccgcatcgtgcagacctgcaatgagcccctgaccaccaccaacaacgtgaacaagatgctgctgattgactacaaggagaacagactcatcgcctgtggcagcctgtaccagggcatctgcaagctgctgcggctggaggacctcttcaagctgggggagccctaccacaagaaggagcactacctgtctggagtgaatgaaagtggctctgtgtttggagtgattgtgtcctacagcaacctggatgacaagctgttcatcgccacagctgtggatggcaagccagagtacttccccaccatcagcagcaggaagctgaccaagaacagcgaggctgatggcatgtttgcctacgtgttccatgatgaatttgtggcctccatgatcaagatccccagcgacaccttcaccatcatcccagactttgacatctactacgtgtatggcttcagcagcggcaactttgtgtacttcctgaccctgcagcctgagatggtgagccccccaggcagcaccaccaaggagcaggtgtacaccagcaagctggtgcggctgtgcaaggaggacacagccttcaacagctatgtggaggtgcccatcggctgtgagaggtctggagtggagtaccgcctgctgcaggccgcctacctgagcaaggccggggctgtgctgggccgcaccctgggcgtgcacccagatgatgacctgctcttcaccgtcttcagcaagggccagaagaggaagatgaagagcctggatgaaagtgccctgtgcatcttcatcctgaagcagatcaatgaccgcatcaaggagcggctgcagagctgctacagaggagagggcaccctggacctggcctggctgaaggtgaaggacatcccctgcagcagcgccctgctgaccattgatgacaacttctgtggcctggacatgaatgcccccctgggcgtgtctgacatggtgcggggcatccctgtgttcacagaagatcgggacaggatgaccagcgtcatcgcctacgtgtacaagaaccacagcctggcctttgtgggcaccaagagcggcaagctgaagaagatccgggtggatggccccagaggaaatgccctgcagtatgagaccgtgcaggtggtggaccccggccctgtgctgcgggacatggccttcagcaaggaccacgagcagctgtacatcatgtctgagcggcagctgaccagggtgcctgtggagagctgtggccagtaccagagctgtggggagtgcctgggcagcggggacccccactgcggctggtgtgtgctgcacaacacctgcaccaggaaggagcgctgtgagaggagcaaggagcccaggagatttgccagcgagatgaagcagtgtgtgcggctgactgtgcaccccaacaacatctctgtgtcccagtacaacgtgctgctggtgctggagacctacaacgtgcctgagctgtctgctggggtgaactgcacctttgaggacctgtctgagatggatggcctggtggtgggcaaccagatccagtgctacagccctgctgccaaggaggtgccccgcatcatcacagaaaatggagaccaccacgtggtgcagctgcagctgaagagcaaggagaccggcatgacctttgccagcaccagctttgtgttctacaactgcagcgtgcacaacagctgcctgagctgtgtggagagcccctaccgctgccactggtgcaagtacagacatgtgtgcacccatgaccccaagacctgcagcttccaggagggccgggtgaagctgcctgaggactgcccccagctgctgcgggtggacaagatcctggtgcctgtggaggtgatcaagcccatcaccctgaaggccaagaacctgccccagccccagagcggccagaggggctatgagtgcatcctgaacatccagggcagcgagcagagggtgcctgccctgcgcttcaacagcagctctgtgcagtgccagaacaccagctacagctatgagggcatggagatcaacaacctgcctgtggagctgactgtggtgtggaatggccacttcaacatcgacaacccagcccagaacaaggtgcacctgtacaagtgtggggccatgagggagagctgtggcctgtgcctgaaggctgaccctgactttgcctgtggctggtgccagggccctggccagtgcaccctgcggcagcactgcccagcccaggagagccagtggctggagctgagcggggccaagagcaagtgcaccaacccccgcatcacagagatcatccctgtgacaggcccccgggagggcggcaccaaggtgaccatcagaggagagaacctgggcctggagttccgggacatcgccagccacgtgaaggtggccggcgtggagtgcagccccctggtggatggctacatcccagctgagcagatcgtgtgtgagatgggagaggccaagcccagccagcacgccggctttgtggagatctgtgtggccgtgtgcaggcctgagttcatggcccggagcagccagctgtactacttcatgaccctgaccctgagtgacctgaagcccagccggggccccatgtctgggggcacccaggtgaccatcaccggcaccaacctgaatgccggcagcaatgtggtggtgatgtttgggaagcagccctgcctcttccaccggcgcagccccagctacatcgtgtgcaacaccaccagcagtgatgaggtgctggagatgaaggtgtctgtgcaggtggaccgggccaagatccaccaggacctggtgttccagtatgtggaggaccccaccatcgtgagaattgagcctgagtggagcatcgtgtctggcaacacccccatcgctgtgtggggcacccacctggacctgatccagaacccccagatccgggccaagcatggaggcaaggagcacatcaacatctgtgaggtgctgaatgccacagagatgacctgccaggccccagccctggccctgggccctgaccaccagagcgacctgacagagaggcctgaggagtttggcttcatcctggacaacgtgcagagcctgctgatcctgaacaagaccaacttcacctactaccccaaccctgtgtttgaggccttcggccccagcggcatcctggagctgaagccaggcacccccatcatcctgaagggcaagaacctgatcccccctgtggccggcggcaatgtgaagctgaactacacagtgctggtgggggagaagccctgcaccgtgacagtgtctgatgtgcagctgctgtgtgagagccccaacctgattggccgccacaaggtgatggcccgggtgggcggcatggagtacagccctggcatggtgtacatcgccccagacagccccctgagcctgcctgccatcgtgtccattgctgtggccggcggcctgctgatcatcttcatcgtggccgtgctgattgcctacaagaggaagagccgggagagtgacctgaccctgaagaggctgcagatgcagatggacaacctggagagccgggtggccctggagtgcaaggaggcctttgctgagctgcagacagacatccacgagctgaccagtgacctggatggagctggcatccccttcctggactaccgcacctacaccatgagggtgctcttccctggcatcgaggaccaccctgtgctgcgggacctggaggtgcccggctaccggcaggagcgggtggagaagggcctgaagctgtttgcccagctgatcaacaacaaggtgttcctgctgtccttcatccgcaccctggagagccagaggagcttctccatgagggacagaggaaatgtggccagcctcatcatgacagtgctgcagagcaagctggagtatgccacagatgtgctgaagcagctgctggccgacctgattgacaagaacctggagagcaagaaccaccccaagctgctgctgcggaggacagagagcgtggccgagaagatgctgaccaactggttcaccttcctgctgtacaagttcctgaaggaatgtgccggggagcccctcttcagcctcttctgtgccatcaagcagcagatggagaagggccccattgatgccatcaccggggaggcccgctacagcctgtctgaggacaagctgatccggcagcagattgactacaagaccctggtgctgagctgtgtgtccccagacaatgccaacagccctgaggtgcctgtgaagatcctgaactgtgacaccatcacccaggtgaaggagaagatcctggatgccatcttcaagaatgtgccctgcagccaccggcccaaggctgctgacatggacctggagtggaggcagggcagcggggccaggatgatcctgcaggatgaggacatcaccaccaagattgaaaatgactggaagaggctgaacaccctggcccactaccaggtgcctgatggctctgtggtggccctggtgtccaagcaggtgacagcctacaatgctgtgaacaacagcacagtgtccaggaccagcgccagcaaatatgagaacatgatccgctacacaggcagcccagacagcctgcggagcaggacccccatgatcaccccagacctggagagcggcgtgaagatgtggcacctggtgaagaaccacgagcacggggaccagaaggagggggaccggggcagcaagatggtgtctgagatctacctgacccggctgctggccaccaagggcaccctgcagaagtttgtggatgacctgtttgagaccatcttcagcacagcccaccggggcagcgccctgcccctggccatcaagtacatgtttgacttcctggatgagcaggccgacaagcacggcatccatgacccccacgtgcgccacacctggaagagcaactgcctgcccctgcgcttctgggtgaacatgatcaagaacccccagtttgtgtttgacatccacaagaacagcatcacagatgcctgcctgtctgtggtggcccagaccttcatggacagctgcagcaccagcgagcaccggctgggcaaggacagccccagcaacaagctgctgtatgccaaggacatccccagctacaagaactgggtggagcgctactacagcgacatcggcaagatgcctgccatcagtgaccaggacatgaatgcctacctggccgagcagagcaggatgcacatgaatgagttcaacaccatgtctgccctgtctgagatcttctcctatgtgggcaagtacagcgaggagatcctgggccccctggaccatgatgaccagtgtgggaagcagaagctggcctacaagctggagcaggtgatcaccctgatgagcctggacagctag

SEQ ID NO: 164443 - DNA, 5685 bp, synthetic construct; identical to SEQ ID NO: 164442
  misc_feature 1..5685: note = Description of Artificial Sequence: Synthetic coding sequence
  source 1..5685: mol_type = other DNA

SEQ ID NO: 164444 - DNA, 1569 bp, synthetic construct
  misc_feature 1..1569: note = Description of Artificial Sequence: Synthetic coding sequence
  source 1..1569: mol_type = other DNA
atgaaggccatgccctggaactggacctgcctgctgagccacctgctgatggtgggcatgggcagcagcaccctgctgacccggcagcctgcccccctgagccagaagcagaggagctttgtgaccttccggggggagcctgctgagggcttcaaccacctggtggtggatgagaggacaggccacatctacctgggcgctgtgaaccgcatctacaagctgagcagtgacctgaaggtgctggtgacccatgagaccggcccagatgaggacaaccccaagtgctacccaccccgcatcgtgcagacctgcaatgagcccctgaccaccaccaacaacgtgaacaagatgctgctgattgactacaaggagaacagactcatcgcctgtggcagcctgtaccagggcatctgcaagctgctgcggctggaggacctcttcaagctgggggagccctaccacaagaaggagcactacctgtctggagtgaatgaaagtggctctgtgtttggagtgattgtgtcctacagcaacctggatgacaagctgttcatcgccacagctgtggatggcaagccagagtacttccccaccatcagcagcaggaagctgaccaagaacagcgaggctgatggcatgtttgcctacgtgttccatgatgaatttgtggcctccatgatcaagatccccagcgacaccttcaccatcatcccagactttgacatctactacgtgtatggcttcagcagcggcaactttgtgtacttcctgaccctgcagcctgagatggtgagccccccaggcagcaccaccaaggagcaggtgtacaccagcaagctggtgcggctgtgcaaggaggacacagccttcaacagctatgtggaggtgcccatcggctgtgagaggtctggagtggagtaccgcctgctgcaggccgcctacctgagcaaggccggggctgtgctgggccgcaccctgggcgtgcacccagatgatgacctgctcttcaccgtcttcagcaagggccagaagaggaagatgaagagcctggatgaaagtgccctgtgcatcttcatcctgaagcagatcaatgaccgcatcaaggagcggctgcagagctgctacagaggagagggcaccctggacctggcctggctgaaggtgaaggacatcccctgcagcagcgccctgctgaccattgatgacaacttctgtggcctggacatgaatgcccccctgggcgtgtctgacatggtgcggggcatccctgtgttcacagaagatcgggacaggatgaccagcgtcatcgcctacgtgtacaagaaccacagcctggcctttgtgggcaccaagagcggcaagctgaagaagagctttggaacaggcccccagggcggcatcacccaggagtggattggagtggagggggaccccccaggggccaacatcgccagccaggagcagatgctgtgtgtgtacctgcagtgcagcagccacaaggccatcagtgaccagagggtgcagcccctgctgtgctgcttcctgaatgtgcccggcaacagcagctag

SEQ ID NO: 164445 - DNA, 1479 bp, synthetic construct
  misc_feature 1..1479: note = Description of Artificial Sequence: Synthetic coding sequence
  source 1..1479: mol_type = other DNA
atgaaggccatgccctggaactggacctgcctgctgagccacctgctgatggtgggcatgggcagcagcaccctgctgacccggcagcctgcccccctgagccagaagcagaggagctttgtgaccttccggggggagcctgctgagggcttcaaccacctggtggtggatgagaggacaggccacatctacctgggcgctgtgaaccgcatctacaagctgagcagtgacctgaaggtgctggtgacccatgagaccggcccagatgaggacaaccccaagtgctacccaccccgcatcgtgcagacctgcaatgagcccctgaccaccaccaacaacgtgaacaagatgctgctgattgactacaaggagaacagactcatcgcctgtggcagcctgtaccagggcatctgcaagctgctgcggctggaggacctcttcaagctgggggagccctaccacaagaaggagcactacctgtctggagtgaatgaaagtggctctgtgtttggagtgattgtgtcctacagcaacctggatgacaagctgttcatcgccacagctgtggatggcaagccagagtacttccccaccatcagcagcaggaagctgaccaagaacagcgaggctgatggcatgtttgcctacgtgttccatgatgaatttgtggcctccatgatcaagatccccagcgacaccttcaccatcatcccagactttgacatctactacgtgtatggcttcagcagcggcaactttgtgtacttcctgaccctgcagcctgagatggtgagccccccaggcagcaccaccaaggagcaggtgtacaccagcaagctggtgcggctgtgcaaggaggacacagccttcaacagctatgtggaggtgcccatcggctgtgagaggtctggagtggagtaccgcctgctgcaggccgcctacctgagcaaggccggggctgtgctgggccgcaccctgggcgtgcacccagatgatgacctgctcttcaccgtcttcagcaagggccagaagaggaagatgaagagcctggatgaaagtgccctgtgcatcttcatcctgaagcagatcaatgaccgcatcaaggagcggctgcagagctgctacagaggagagggcaccctggacctggcctggctgaaggtgaaggacatcccctgcagcagcgccctgctgaccattgatgacaacttctgtggcctggacatgaatgcccccctgggcgtgtctgacatggtgcggggcatccctgtgttcacagaagatcgggacaggatgaccagcgtcatcgcctacgtgtacaagaaccacagcctggcctttgtgggcaccaagagcggcaagctgaagaagatgcctggcaccagcctgtgccccaccctggagctgcagacaggccccaggagccaccgggccaccgtgaccctggagctgctcttcagcagctgcagcagcaactag

SEQ ID NO: 164446 - DNA, 5517 bp, synthetic construct
  misc_feature 1..5517: note = Description of Artificial Sequence: Synthetic coding sequence
  source 1..5517: mol_type = other DNA
atggccctgcagctgtgggccctgaccctgctgggcctgctgggcgctggggccagcctgcggcccaggaagctggacttcttccgctctgagaaggagctgaaccacctggccgtggatgaggccagcggcgtggtgtacctgggcgctgtgaatgccctgtaccagctggatgccaagctgcagctggagcagcaggtggccactggacctgccctggacaacaagaagtgcaccccacccatcgaggccagccagtgccacgaggccgagatgacagacaacgtgaaccagctgctgctgctggacccccccaggaagaggctggtggagtgtggcagcctcttcaagggcatctgtgccctgcgggccctgagcaacatcagcctgcggctcttctatgaagatggcagcggggagaagagctttgtggccagcaatgatgagggcgtggccaccgtgggcctggtgagcagcacaggccctggaggagacagagtgctgtttgtgggcaaaggaaatggcccccatgacaatggcatcatcgtgtccacccggctgctggacagaacagacagccgggaggcctttgaggcctacacagaccacgccacctacaaggccggctacctgagcaccaacacccagcagtttgtggccgcctttgaagatggcccctacgtgttctttgtgttcaaccagcaggacaagcacccagccaggaacagaaccctgctggccaggatgtgccgggaggaccccaactactacagctacctggagatggacctgcagtgccgggaccctgacatccatgctgctgccttcggcacctgcctggccgcctctgtggccgcccctggcagcggccgggtgctgtatgctgtgttcagccgggacagccgcagcagcggcggccctggagctggcctgtgcctcttccccctggacaaggtgcacgccaagatggaggccaacagaaatgcctgctacacaggcacccgggaggcccgggacatcttctacaagcccttccacggggacatccagtgtggcggccacgcccctggcagcagcaagagcttcccctgtggcagcgagcacctgccctaccccctgggcagcagagatggcctgcggggcacagctgtgctgcagaggggcggcctgaacctgacagctgtgacagtggccgctgagaacaaccacacagtggccttcctgggcaccagtgatggccgcatcctgaaggtgtacctgaccccagatggcaccagcagtgaatatgacagcatcctggtggagatcaacaagagggtgaagagggacctggtgctgagcggggacctgggcagcctgtatgccatgacccaggacaaggtgttccggctgcctgtgcaggagtgcctgagctaccccacctgcacccagtgccgggacagccaggacccctactgcggctggtgtgtggtggagggccgctgcaccaggaaggccgagtgccccagggctgaggaggccagccactggctgtggagccgcagcaagagctgtgtggccgtgaccagcgcccagccccagaacatgagcagaagagcccagggcgaggtgcagctgactgtgagccccctgcctgccctgtctgaggaggatgagctgctgtgcctgtttggagagagccccccccacccagcccgggtggagggggaggccgtcatctgcaacagccccagcagcatccctgtgaccccacctggccaggaccacgtggccgtgaccatccagctgctgctgcggcggggcaacatcttcctgaccagctaccagtaccccttctatgactgccggcaggccatgagcctggaggagaacctgccctgcatcagctgtgtgagcaaccgctggacctgccagtgggacctgcgctaccatgaatgtcgggaggccagccccaacccagaagatggcatcgtgcgggcccacatggaggacagctgcccccagttcctgggccccagccccctggtgatccccatgaaccatgaaacagatgtgaacttccagggcaagaacctggacacagtgaagggcagcagcctgcacgtgggcagtgacctgctgaagttcatggagcctgtgaccatgcaggagagcggcacctttgccttccgcacccccaagctgagccatgatgccaatgagaccctgcccctgcacctgtatgtgaagagctatggcaagaacatcgacagcaagctgcacgtgaccctgtacaactgcagctttggccgcagtgactgcagcctgtgccgggccgccaacccagactaccgctgtgcctggtgtggcggccagagccgctgtgtgtatgaggccctgtgcaacaccaccagtgaatgtcctcctcctgtgatcacccgcatccagcctgagaccggccccctgggcggcggcatccgcatcaccatcctgggcagcaacctgggcgtgcaggccggggacatccagaggatctctgtggccggcaggaactgcagcttccagcctgagcgctacagcgtgtccacccgcatcgtgtgtgtgattgaggccgctgagacccccttcaccggcggcgtggaggtggatgtgtttgggaagctgggccgcagccccccaaatgtgcagttcaccttccagcagcccaagcccctgtctgtggagccccagcagggcccccaggccggcggcaccaccctgaccatccacggcacccacctggacaccggcagccaggaggatgtgcgggtgaccctgaatggagtgccctgcaaggtgaccaagtttggagcccagctgcagtgtgtgacaggcccccaggccacccggggccagatgctgctggaggtgtcctatggaggcagccctgtgcccaaccctggcatcttcttcacctacagagaaaatcctgtgctgcgggcctttgagcccctgcggagctttgccagcggcggccgcagcatcaacgtgacaggccagggcttcagcctcatccagagatttgccatggtggtgattgctgagcccctgcagagctggcagcccccccgggaggccgagagcctgcagcccatgacagtggtgggcacagattatgtgttccacaatgacaccaaggtggtgttcctgagccctgctgtgcctgaggagcctgaggcctacaacctgactgtgctgattgagatggatggccaccgggccctgctgaggacagaggccggggcctttgaatatgtgcctgaccccacctttgagaacttcaccggaggagtgaagaagcaggtgaacaagctgattcatgcccggggcaccaacctgaacaaggccatgaccctgcaggaggccgaggcctttgtgggcgctgagcgctgcaccatgaagaccctgacagaaacagacctgtactgtgagcccccagaggtgcagcccccacccaagaggcggcagaagagggacaccacccacaacctgcctgagttcatcgtgaagtttggcagccgggagtgggtgctgggccgggtggagtatgacaccagggtgtctgatgtgcccctgagcctcatcctgcccctggtgattgtgcccatggtggtggtgattgctgtgtctgtgtactgctactggaggaagagccagcaggccgagcgggagtatgagaagatcaagagccagctggagggcctggaggagagcgtgcgggaccgctgcaagaaggagttcacagacctgatgattgagatggaggaccagaccaatgatgtgcatgaggccggcatccctgtgctggactacaagacctacacagacagagtcttcttcctgcccagcaaggatggagacaaggatgtgatgatcaccgggaagctggacatccctgagccccggcggcctgtggtggagcaggccctgtaccagttcagcaacctgctgaacagcaagagcttcctgatcaacttcatccacaccctggagaaccagcgggagttcagcgcccgggccaaggtgtactttgccagcctgctgactgtggccctgcacggcaagctggagtactacacagacatcatgcacaccctcttcctggagctgctggagcagtatgtggtggccaagaaccccaagctgatgctgcggcggagtgaaacagtggtggagaggatgctgagcaactggatgagcatctgcctgtaccagtacctgaaggacagcgctggggagcccctgtacaagctgttcaaggccatcaagcaccaggtggagaagggccctgtggatgctgtgcagaagaaggccaagtacaccctgaatgacaccggcctgctgggagatgatgtggagtatgcccccctgactgtgtctgtcatcgtgcaggatgaaggagtggatgccatccctgtgaaggtgctgaactgtgacaccatcagccaggtgaaggagaagatcatcgaccaggtgtaccggggccagccctgcagctgctggcccaggccagacagcgtggtgctggagtggaggcctggcagcacagcccagatcctgagtgacctggacctgaccagccagcgggagggccgctggaagagggtgaacaccctgatgcactacaacgtgagagatggagccaccctcatcctgagcaaggtgggcgtgtcccagcagcctgaggacagccagcaggacctgcctggagagagacatgccctgctggaggaggagaacagagtgtggcacctggtgcggcccacagatgaggtggatgagggcaagagcaagaggggctctgtgaaggagaaggagaggaccaaggccatcacagagatctacctgacccggctgctgtctgtgaagggcaccctgcagcagtttgtggacaacttcttccagagcgtgctggcccctggccatgctgtgcccccagctgtgaagtacttctttgacttcctggatgagcaggccgagaagcacaacatccaggatgaggacaccatccacatctggaagaccaacagcctgcccctgcgcttctgggtgaacatcctgaagaacccccacttcatctttgatgtgcacgtgcatgaggtggtggatgccagcctgtctgtgattgcccagaccttcatggatgcctgcaccaggacagagcacaagctgagccgggacagccccagcaacaagctgctgtatgccaaggagatcagcacctacaagaagatggtggaggactactacaagggcatccggcagatggtgcaggtgtctgaccaggacatgaacacccacctggccgagatcagccgggcccacacagacagcctgaacaccctggtggccctgcaccagctgtaccagtacacccagaagtactatgatgagatcatcaatgccctggaggaggaccctgctgcccagaagatgcagctggccttccggctgcagcagattgctgctgccctggagaacaaggtgacagacctgtag

SEQ ID NO: 164447 - DNA, 1044 bp, synthetic construct
  misc_feature 1..1044: note = Description of Artificial Sequence: Synthetic coding sequence
  source 1..1044: mol_type = other DNA
atgcacaccctcttcctggagctgctggagcagtatgtggtggccaagaaccccaagctgatgctgcggcggagtgaaacagtggtggagaggatgctgagcaactggatgagcatctgcctgtaccagtacctgaaggacagcgctggggagcccctgtacaagctgttcaaggccatcaagcaccaggtggagaagggccctgtggatgctgtgcagaagaaggccaagtacaccctgaatgacaccggcctgctgggagatgatgtggagtatgcccccctgactgtgtctgtcatcgtgcaggatgaaggagtggatgccatccctgtgaaggtgctgaactgtgacaccatcagccaggtgaaggagaagatcatcgaccaggtgtaccggggccagccctgcagctgtggccctggccagacagcctggagctggagcggcgtgcgggccccccagaggagatctgtgggccctggcccagatgtgacagctgggggccctgtggaggcccggcagcacccctatgccctgcagtgccccggctggagccacccccaccctgtgcagggcggcggcctgcctgctgctgggggccagcctgctggccctgcctggagcgccatgcctcctgggggcggggagcccggggtggcccctggagctgctgaccggcggggcggccggggccaggtgcaggagcggcagcgggagcgggagggcgcagatgagggccaccaccgggacctgcctgatgctgctgccctgagccagggccacacagctgctgtgtgtggccagctgctgcctgagcgggccggggcctggcatgctgtgcccccagctgtgaagtacttctttgacttcctggatgagcaggccgagaagcacaacatccaggatgaggacaccatccacatctggaagaccaacagcctgcccctgcgcttctgggtgaacatcctgaagaacccccacttcatctttgatgtgcacgtgacccgctggtggaccccccgctgccagagcagcagaagatag

SEQ ID NO: 164448 - DNA, 483 bp, synthetic construct
  misc_feature 1..483: note = Description of Artificial Sequence: Synthetic coding sequence
  source 1..483: mol_type = other DNA
ggcccagatgtgacagctgggggccctgtggaggcccggcagcacccctatgccctgcagtgccccggctggagccacccccaccctgtgcagggcggcggcctgcctgctgctgggggccagcctgctggccctgcctggggcgccccctgccccccaggcggcggggagcccggggtggcccctggagctgctgacagaagaggaggccggggccaggtgcaggagcggcagcgggagcgggagggcgcagatgagggccaccaccgggacctgcctgatgctgctgccctgagccagggccacacagctgctgtgtgtggccagctgctgcctgagagagctggcctgggcacccgctgccacctgcagagcagcaccagcagcacctcctggaccagccggcagaggagcaccaccagcaggatgaagacccccagcaccagcggcagaagaacagcctacagaagtggcagcggctag

SEQ ID NO: 164449 - DNA, 1569 bp, synthetic construct
  misc_feature 1..1569: note = Description of Artificial Sequence: Synthetic coding sequence
  source 1..1569: mol_type = other DNA
atggccctgcagctgtgggccctgaccctgctgggcctgctgggcgctggggccagcctgcggcccaggaagctggacttcttccgctctgagaaggagctgaaccacctggccgtggatgaggccagcggcgtggtgtacctgggcgctgtgaatgccctgtaccagctggatgccaagctgcagctggagcagcaggtggccactggacctgccctggacaacaagaagtgcaccccacccatcgaggccagccagtgccacgaggccgagatgacagacaacgtgaaccagctgctgctgctggacccccccaggaagaggctggtggagtgtggcagcctcttcaagggcatctgtgccctgcgggccctgagcaacatcagcctgcggctcttctatgaagatggcagcggggagaagagctttgtggccagcaatgatgagggcgtggccaccgtgggcctggtgagcagcacaggccctggaggagacagagtgctgtttgtgggcaaaggaaatggcccccatgacaatggcatcatcgtgtccacccggctgctggacagaacagacagccgggaggcctttgaggcctacacagaccacgccacctacaaggccggctacctgagcaccaacacccagcagtttgtggccgcctttgaagatggcccctacgtgttctttgtgttcaaccagcaggacaagcacccagccaggaacagaaccctgctggccaggatgtgccgggaggaccccaactactacagctacctggagatggacctgcagtgccgggaccctgacatccatgctgctgccttcggcacctgcctggccgcctctgtggccgcccctggcagcggccgggtgctgtatgctgtgttcagccgggacagccgcagcagcggcggccctggagctggcctgtgcctcttccccctggacaaggtgcacgccaagatggaggccaacagaaatgcctgctacacaggcacccgggaggcccgggacatcttctacaagcccttccacggggacatccagtgtggcggccacgcccctggcagcagcaagagcttcccctgtggcagcgagcacctgccctaccccctgggcagcagagatggcctgcggggcacagctgtgctgcagaggggcggcctgaacctgacagctgtgacagtggccgctgagaacaaccacacagtggccttcctgggcaccagtgatggccgcatcctgaaggtgtacctgaccccagatggcaccagcagtgaatatgacagcatcctggtggagatcaacaagagggtgaagagggacctggtgctgagcggggacctgggcagcctgtatgccatgacccaggacaaggtgttccggctgcctgtgcaggagtgcctgagctaccccacctgcacccagctgcccccagctgctgagcccgccagcggcgtgcactgccgggtgtccagtgacctgaagatgtgcctgaccctgccccgctggggccagctggccagcgccagcgcccacgccccagctgctgcctccatgccctag

SEQ ID NO: 164450 - DNA, 489 bp, synthetic construct
  misc_feature 1..489: note = Description of Artificial Sequence: Synthetic coding sequence
  source 1..489: mol_type = other DNA
atggccctgcagctgtgggccctgaccctgctgggcctgctgggcgctggggccagcctgcggcccaggaagctggacttcttccgctctgagaaggagctgaaccacctggccgtggatgaggccagcggcgtggtgtacctgggcgctgtgaatgccctgtaccagctggatgccaagctgcagctggagcagcaggtggccactggacctgccctggacaacaagaagtgcaccccacccatcgaggccagccagtgccacgaggccgagatgacagacaacgtgaaccagctgctgctgctggacccccccaggaagaggctggtggagtgtggcagcctcttcaagggcatctgtgccctgcgggccctgagcaacatcagcctgcggctcttctatgaagatggcagcggggagaagagctttgtggccagcaatgatgagggcgtggccaccgtgggcctggtgagcagcacaggcccctag

SEQ ID NO: 164451 - DNA, 1434 bp, synthetic construct
  misc_feature 1..1434: note = Description of Artificial Sequence: Synthetic coding sequence
  source 1..1434: mol_type = other DNA
atggccctgcagctgtgggccctgaccctgctgggcctgctgggcgctggggccagcctgcggcccaggaagctggacttcttccgctctgagaaggagctgaaccacctggccgtggatgaggccagcggcgtggtgtacctgggcgctgtgaatgccctgtaccagctggatgccaagctgcagctggagcagcaggtggccactggacctgccctggacaacaagaagtgcaccccacccatcgaggccagccagtgccacgaggccgagatgacagacaacgtgaaccagctgctgctgctggacccccccaggaagaggctggtggagtgtggcagcctcttcaagggcatctgtgccctgcgggccctgagcaacatcagcctgcggctcttctatgaagatggcagcggggagaagagctttgtggccagcaatgatgagggcgtggccaccgtgggcctggtgagcagcacaggccctggaggagacagagtgctgtttgtgggcaaaggaaatggcccccatgacaatggcatcatcgtgtccacccggctgctggacagaacagacagccgggaggcctttgaggcctacacagaccacgccacctacaaggccggctacctgagcaccaacacccagcagtttgtggccgcctttgaagatggcccctacgtgttctttgtgttcaaccagcaggacaagcacccagccaggaacagaaccctgctggccaggatgtgccgggaggaccccaactactacagctacctggagatggacctgcagtgccgggaccctgacatccatgctgctgccttcggcacctgcctggccgcctctgtggccgcccctggcagcggccgggtgctgtatgctgtgttcagccgggacagccgcagcagcggcggccctggagctggcctgtgcctcttccccctggacaaggtgcacgccaagatggaggccaacagaaatgcctgctacacaggcacccgggaggcccgggacatcttctacaagcccttccacggggacatccagtgtggcggccacgcccctggcagcagcaagagcttcccctgtggcagcgagcacctgccctaccccctgggcagcagagatggcctgcggggcacagctgtgctgcagaggggcggcctgaacctgacagctgtgacagtggccgctgagaacaaccacacagtggccttcctgggcaccagtgatggccgcatcctgaaggtgtacctgaccccagatggcaccagcagtgaatatgacagcatcctggtggagatcaacaagagggtgaagagggacctggtgctgagcggggacctgggcagcctgtatgccatgacccaggacaaggtgttccggctgcctgtgcaggagtgcctgagctaccccacctgcacccagtag

SEQ ID NO: 164452 - DNA, 5517 bp, synthetic construct; identical to SEQ ID NO: 164446
  misc_feature 1..5517: note = Description of Artificial Sequence: Synthetic coding sequence
  source 1..5517: mol_type = other DNA

SEQ ID NO: 164453 - DNA, 5730 bp, synthetic construct
  misc_feature 1..5730: note = Description of Artificial Sequence: Synthetic coding sequence
  source 1..5730: mol_type = other DNA
atgtgccacgccgcccaggagacccccctgctgcaccacttcatggcccctgtgatggcccgctggcccccatttggcctgtgcctgctgctgctgctgctgagccccccacccctgcccctgaccggggcccaccgcttcagcgcccccaacaccaccctgaaccacctggccctggcccctggccggggcaccctgtatgtgggcgctgtgaacagactcttccagctgagccctgagctgcagctggaggccgtggccgtgactggacctgtgattgacagcccagactgtgtgcccttccgggaccctgctgagtgcccccaggcccagctgacagacaatgccaaccagctgctgctggtgagcagccgggcccaggagctggtggcctgtggccaggtgcggcagggcgtgtgtgagacccggcggctgggagatgtggccgaggtgctgtaccaggccgaggaccctggagatggccagtttgtggccgccaacaccccaggagtggccaccgtgggcctggtggtgcccctgcccggccgggacctgctgctggtggcccggggcctggccggcaagctgtctgctggggtgccccccctggccatccggcagctggccggcagccagcccttcagcagcgagggcctgggccgcctggtggtgggggacttcagtgactacaacaacagctatgtgggcgcctttgctgatgcccggagcgcctactttgtgttcagaagaagaggagcccgggcccaggccgagtaccgctcctatgtggcccgggtgtgcctgggggacaccaacctgtacagctatgtggaggtgcccctggcctgccagggccagggcctcatccaggccgccttcctggcccctggcaccctgctgggcgtgtttgctgctggcccccggggcacccaggccgccctgtgtgccttccccatggtggagctgggcgcctccatggagcaggcccggcggctgtgctacacagctgggggccggggccccagcggggctgaggaggccaccgtggagtatggagtgaccagccgctgtgtgaccctgcccctggacagccctgagagctacccctgtggagatgagcacacccccagccccatcgccggccggcagcccctggaggtgcagcccctgctgaagctgggccagcctgtgtctgctgtggccgccctgcaggctgatggccacatgattgccttcctgggggacacccagggccagctgtacaaggtgttcctgcacggcagccagggccaggtgtaccacagccagcaggtgggccccccaggcagcgccatcagcccagacctgctgctggacagcagcggcagccacctgtatgtgctgacagcccaccaggtggaccgcatccctgtggccgcctgcccccagttcccagactgtgccagctgcctgcaggcccaggaccccctgtgtggctggtgtgtgctgcagggccgctgcaccaggaagggccagtgtggccgggccggccagctgaaccagtggctgtggagctatgaggaggacagccactgcctgcacatccagagcctgctgcccggccaccacccccggcaggagcagggccaggtgaccctgtctgtgccccggctgcccatcctggatgctgatgagtacttccactgtgccttcggggactatgacagcctggcccacgtggagggcccccacgtggcctgtgtgaccccaccccaggaccaggtgcccctgaaccccccaggcacagaccacgtgacagtgcccctggccctgatgtttgaagatgtgacagtggccgccaccaacttctccttctatgactgcagcgctgtgcaggccctggaggccgccgccccctgccgggcctgtgtgggcagcatctggcgctgccactggtgcccccagagcagccactgtgtgtatggagagcactgcccagagggggagaggaccatctacagcgcccaggaggtggacatccaggtgcggggccctggggcctgcccccaggtggagggcctggccggcccccacctggtgcctgtgggctgggagagccacctggccctgcgggtgaggaacctgcagcacttccggggcctgcctgccagcttccactgctggctggagctgcctggagagctgcggggcctgcctgccaccctggaggagacagctggggacagcggcctcatccactgccaggcccaccagttctaccccagcatgagccagcgggagctgcctgtgcccatctacgtgacccagggcgaggcccagaggctggacaacacccacgccctgtatgtgatcctgtatgactgtgccatgggccacccagactgcagccactgccaggccgccaacagaagcctgggctgcctgtggtgtgctgatggccagcctgcctgccgctatggccccctgtgccccccaggagctgtggagctgctgtgcccagcccccagcattgatgctgtggagcccctgaccggccccccagagggcggcctggccctgaccatcctgggcagcaacctgggccgggcctttgctgatgtgcagtatgctgtgtctgtggccagccggccctgcaaccctgagcccagcctgtaccgcaccagcgccagaattgtgtgtgtgaccagccctgcccccaacggcaccactggacctgtgcgggtggccatcaagagccagcccccaggcatcagcagccagcacttcacctaccaggaccctgtgctgctgagcctgagcccccgctggggcccccaggccggcggcacccagctgaccatccggggccagcacctgcagacaggaggcaacaccagcgcctttgtgggcggccagccctgccccatcctggagcctgtgtgcccagaggccatcgtgtgcaggacccggccccaggccgcccctggagaggccgctgtgctggtggtgtttggacatgcccagaggaccctgctggccagccccttccgctacacagccaacccccagctggtggccgctgagcccagcgccagcttccggggcggcggccgcctcatccgggtgcggggcaccggcctggatgtggtgcagaggcccctgctgtctgtgtggctggaggctgatgctgaggtgcaggccagccgggcccagccccaggacccccagcccaggaggagctgtggggccccagctgctgacccccaggcctgcatccagctgggcggcggcctgctgcagtgcagcacagtgtgcagcgtgaacagcagcagcctgctgctgtgccgcagccctgctgtgcctgaccgggcccacccccagagggtcttcttcaccctggacaacgtgcaggtggactttgccagcgccagcggcggccagggcttcctgtaccagcccaacccccggctggcccccctgagccgggagggccctgcccggccctaccgcctgaagccaggccacgtgctggatgtggagggggagggcctgaacctgggcatcagcaaggaggaggtgcgggtgcacatcggccgcggggagtgcctggtgaagaccctgaccaggacccacctgtactgtgagcccccagcccacgccccccagcctgccaacggcagcggcctgccccagtttgtggtgcagatgggaaatgtgcagctggccctgggccctgtgcagtatgaagctgagccccccctgagcgccttccctgtggaggcccaggccggcgtgggcatgggcgctgctgtgctgattgctgctgtgctgctgctgaccctgatgtaccgccacaagagcaagcaggccctgcgggactaccagaaggtgctggtgcagctggagagcctggagactggagtgggggaccagtgcaggaaggagttcacagacctgatgacagagatgacagacctgagcagtgacctggagggcagcggcatccccttcctggactaccgcacctatgcagagcgggccttcttccctggccatggaggctgccccctgcagcccaagccagagggccctggagaagatggccactgtgccaccgtgcggcagggcctgacccagctgagcaacctgctgaacagcaagctgttcctgctgaccctcatccacaccctggaggagcagcccagcttcagccagagggaccgctgccacgtggccagcctgctgagcctggccctgcacggcaagctggagtacctgacagacatcatgaggaccctgctgggggacctggccgcccactacgtgcacaggaaccccaagctgatgctgcggaggacagagaccatggtggagaagctgctgaccaactggctgagcatctgcctgtatgccttcctgcgggaggtggccggggagcccctgtacatgctgttccgggccatccagtaccaggtggacaagggccctgtggatgctgtgacaggcaaggccaagaggaccctgaatgacagccggctgctgagagaagatgtggagttccagcccctgaccctgatggtgctggtgggccctggggccggcggggccgccggcagcagcgagatgcagagggtgcctgcccgggtgctggacacagacaccatcacccaggtgaaggagaaggtgctggaccaggtgtacaagggcacccccttcagccagaggcccagcgtgcacgccctggacctggagtggaggagcggcctggccggccacctgaccctgagtgatgaggacctgacctctgtgacccagaaccactggaagaggctgaacaccctgcagcactacaaggtgcctgatggagccaccgtgggcctggtgccccagctgcaccggggcagcaccatcagccagagcctggcccagcgctgccccctgggggagaacatccccaccctggaggatggagaggagggcggcgtgtgcctgtggcacctggtgaaggccacagaggagcctgagggcgccaaggtgcgctgcagcagcctgcgggagcgggagcccgcccgggccaaggccatccctgagatctacctgacccggctgctgtccatgaagggcaccctgcagaagtttgtggatgacaccttccaggccatcctgtctgtgaaccggcccatccccatcgctgtgaagtacctgtttgacctgctggatgagctggccgagaagcatggaattgaggaccccggcaccctgcacatctggaagaccaacagcctgctgctgcgcttctgggtgaatgccctgaagaacccccagctgatctttgatgtgcgggtgtctgacaacgtggatgccatcctggccgtcatcgcccagaccttcatcgacagctgcaccaccagcgagcacaaggtgggccgggacagccctgtgaacaagctgctgtatgcccgggagatcccccgctacaagcagatggtggagcgctactatgctgacatccggcagagcagccctgccagctaccaggagatgaacagcgccctggccgagctgagcggcaactacaccagcgccccccactgcctggaggccctgcaggagctgtacaaccacatccaccgctactatgaccagatcatcagcgccctggaggaggaccctgtgggccagaagctgcagctggcctgccgcctgcagcaggtggccgccctggtggagaacaaggtgacagacctgtag

SEQ ID NO: 164454 - DNA, 777 bp, synthetic construct
  misc_feature 1..777: note = Description of Artificial Sequence: Synthetic coding sequence
  source 1..777: mol_type = other DNA
tgaagcctggagactggagtgggggaccagtgcaggaaggagttcacagacctgatgacagagatgacagacctgagcagtgacctggagggcagcggcatccccttcctggactaccgcacctatgcagagcgggccttcttccctggccatggaggctgccccctgcagcccaagccagagggccctggagaagatggccactgtgccaccgtgcggcagggcctgacccagctgagcaacctgctgaacagcaagctgttcctgctgaccctcatccacaccctggaggagcagcccagcttcagccagagggaccgctgccacgtggccagcctgctgagcctggccctgcacggcaagctggagtacctgacagacatcatgaggaccctgctgggggacctggccgcccactacgtgcacaggaaccccaagctgatgctgcggaggacagagaccatggtggagaagctgctgaccaactggctgagcatctgcctgtatgccttcctgcgggaggtggccggggagcccctgtacatgctgttccgggccatccagtaccaggtggacaagggccctgtggatgctgtgacagagtggaggagcggcctggccggccacctgaccctgagtgatgaggacctgacctctgtgacccagaaccactggaagaggctgaacaccctgcagcactacaaggtgcctgatggagccaccgtgggcctggtgccccagctgcaccggggcagcaccatcagccagagcctgtag

SEQ ID NO: 164455 - DNA, 531 bp, synthetic construct
  misc_feature 1..531: note = Description of Artificial Sequence: Synthetic coding sequence
  source 1..531: mol_type = other DNA
tgagccagccagggcaccctgcagaagtttgtggatgacaccttccaggccatcctgtctgtgaaccggcccatccccatcgctgtgaagtacctgtttgacctgctggatgagctggccgagaagcatggaattgaggaccccggcaccctgcacatctggaagaccaacagcctgctgctgcgcttctgggtgaatgccctgaagaacccccagctgatctttgatgtgcgggtgtctgacaacgtggatgccatcctggccgtcatcgcccagaccttcatcgacagctgcaccaccagcgagcacaaggtgggccgggtgcgggctgtgcctgctgctgctgctggccggggcctgcggaggaagggcctgtggggcaagccccggggcctgtgcacagagctgtgggtgggcagcggcagcatcatgggcgcccccagcccccccagcagctgcctggccccacccctgcccccagagcaggacagccctgtgaacaagctgctgtatgcccgggagatcccctag

SEQ ID NO: 164456 - DNA, 492 bp, synthetic construct
  misc_feature 1..492: note = Description of Artificial Sequence: Synthetic coding sequence
  source 1..492: mol_type = other DNA
tgaaaaagaaccctgaatgacagccggctgctgagagaagatgtggagttccagcccctgaccctgatggtgctggtgggccctggggccggcggggccgccggcagcagcgagatgcagagggtgcctgcccgggtgctggacacagacaccatcacccaggtgaaggagaaggtgctggaccaggtgtacaagggcacccccttcagccagaggcccagcgtgcacgccctggacctggagtggaggagcggcctggccggccacctgaccctgagtgatgaggacctgacctctgtgacccagaaccactggaagaggctgaacaccctgcagcactacaaggtgcctgatggagccaccgtgggcctggtgccccagctgcaccggggcagcaccatcagccagagcctggcccagcgctgccccctgggggagagcgagagcctgggccctgacctgggccccctggagagccggctgggccgctag

SEQ ID NO: 164457 - DNA, 2967 bp, synthetic construct
  misc_feature 1..2967: note = Description of Artificial Sequence: Synthetic coding sequence
  source 1..2967: mol_type = other DNA
atgtgccacgccgcccaggagacccccctgctgcaccacttcatggacagccctgagagctacccctgtggagatgagcacacccccagccccatcgccggccggcagcccctggaggtgcagcccctgctgaagctgggccagcctgtgtctgctgtggccgccctgcaggctgatggccacatgattgccttcctgggggacacccagggccagctgtacaaggtggaccgcatccctgtggccgcctgcccccagttcccagactgtgccagctgcctgcaggcccaggaccccctgtgtggctggtgtgtgctgcagggccgctgcaccaggaagggccagtgtggccgggccggccagctgaaccagtggctgtggagctatgaggaggacagccactgcctgcacatccagagcctgctgcccggccaccacccccggcaggagcagggccaggtgaccctgtctgtgccccggctgcccatcctggatgctgatgagtacttccactgtgccttcggggactatgacagcctggcccacgtggagggcccccacgtggcctgtgtgaccccaccccaggaccaggtgcccctgaaccccccaggcacagaccacgtgacagtgcccctggccctgatgtttgaagatgtgacagtggccgccaccaacttctccttctatgactgcagcgctgtgcaggccctggaggccgccgccccctgccgggcctgtgtgggcagcatctggcgctgccactggtgcccccagagcagccactgtgtgtatggagagcactgcccagagggggagaggaccatctacagcgcccaggaggtggacatccaggtgcggggccctggggcctgcccccaggtggagggcctggccggcccccacctggtgcctgtgggctgggagagccacctggccctgcgggtgaggaacctgcagcacttccggggcctgcctgccagcttccactgctggctggagctgcctggagagctgcggggcctgcctgccaccctggaggagacagctggggacagcggcctcatccactgccaggcccaccagttctaccccagcatgagccagcgggagctgcctgtgcccatctacgtgacccagggcgaggcccagaggctggacaacacccacgccctgtatgtgatcctgtatgactgtgccatgggccacccagactgcagccactgccaggccgccaacagaagcctgggctgcctgtggtgtgctgatggccagcctgcctgccgctatggccccctgtgccccccaggagctgtggagctgctgtgcccagcccccagcattgatgctgtggagcccctgaccggccccccagagggcggcctggccctgaccatcctgggcagcaacctgggccgggcctttgctgatgtgcagtatgctgtgtctgtggccagccggccctgcaaccctgagcccagcctgtaccgcaccagcgccagaattgtgtgtgtgaccagccctgcccccaacggcaccactggacctgtgcgggtggccatcaagagccagcccccaggcatcagcagccagcacttcacctaccaggaccctgtgctgctgagcctgagcccccgctggggcccccaggccggcggcacccagctgaccatccggggccagcacctgcagacaggaggcaacaccagcgcctttgtgggcggccagccctgccccatcctggagcctgtgtgcccagaggccatcgtgtgcaggacccggccccaggccgcccctggagaggccgctgtgctggtggtgtttggacatgcccagaggaccctgctggccagccccttccgctacacagccaacccccagctggtggccgctgagcccagcgccagcttccggggcggcggccgcctcatccgggtgcggggcaccggcctggatgtggtgcagaggcccctgctgtctgtgtggctggaggctgatgctgaggtgcaggccagccgggcccagccccaggacccccagcccaggaggagctgtggggccccagctgctgacccccaggcctgcatccagctgggcggcggcctgctgcagtgcagcacagtgtgcagcgtgaacagcagcagcctgctgctgtgccgcagccctgctgtgcctgaccgggcccacccccagagggtcttcttcaccctggacaacgtgcaggtggactttgccagcgccagcggcggccagggcttcctgtaccagcccaacccccggctggcccccctgagccgggagggccctgcccggccctaccgcctgaagccaggccacgtgctggatgtggagggggagggcctgaacctgggcatcagcaaggaggaggtgcgggtgcacatcggccgcggggagtgcctggtgaagaccctgaccaggacccacctgtactgtgagcccccagcccacgccccccagcctgccaacggcagcggcctgccccagtttgtggtgcagatgggaaatgtgcagctggccctgggccctgtgcagtatgaagctgagccccccctgagcgccttccctgtggaggcccaggccggcgtgggcatgggcgctgctgtgctgattgctgctgtgctgctgctgaccctgatgtaccgccacaagagcaagcaggccctgcgggactaccagaaggtgctggtgcagctggagagcctggagactggagtgggggaccagtgcaggaaggagttcaccggcggctgcggcggcggcggcaccggctacccccggggcctgaacagccacctgggcgcctcctggccccggcggccccatgatggagatgaccggccccagcagaggcctgggggccagagggaccccctgcccggcctgccccacctgcggcgggcccggctgctgccctggccctggaggctgcctgctgctgcccaggcctag

SEQ ID NO: 164458 - DNA, 675 bp, synthetic construct
  misc_feature 1..675: note = Description of Artificial Sequence: Synthetic coding sequence
  source 1..675: mol_type = other DNA
atgtgccacgccgcccaggagacccccctgctgcaccacttcatggtggaccgcatccctgtggccgcctgcccccagttcccagactgtgccagctgcctgcaggcccaggaccccctgtgtggctggtgtgtgctgcagggccgctgcaccaggaagggccagtgtggccgggccggccagctgaaccagtggctgtggagctatgaggaggacagccactgcctgcacatccagagcctgctgcccggccaccacccccggcaggagcagggccaggtgaccctgtctgtgccccggctgcccatcctggatgctgatgagtacttccactgtgccttcggggactatgacagcctggcccacgtggagggcccccacgtggcctgtgtgaccccaccccaggaccaggtgcccctgaaccccccaggcacagaccacgtgacagtgcccctggccctgatgtttgaagatgtgacagtggccgccaccaacttctccttctatgactgcagcgctgtgcaggccctggaggccgccgccccagcctgcctgccccccagcacagctggctggagctgcctggagaactttggagactgcaggcctccctggaggcggcagcagggcatccaggccagcagcacagcccggcccaccaggagcagcccctag

SEQ ID NO: 164459 - DNA, 4689 bp, synthetic construct
  misc_feature 1..4689: note = Description of Artificial Sequence: Synthetic coding sequence
  source 1..4689: mol_type = other DNA
atgtgccacgccgcccaggagacccccctgctgcaccacttcatggacagccctgagagctacccctgtggagatgagcacacccccagccccatcgccggccggcagcccctggaggtgcagcccctgctgaagctgggccagcctgtgtctgctgtggccgccctgcaggctgatggccacatgattgccttcctgggggacacccagggccagctgtacaaggtgttcctgcacggcagccagggccaggtgtaccacagccagcaggtgggccccccaggcagcgccatcagcccagacctgctgctggacagcagcggcagccacctgtatgtgctgacagcccaccaggtggaccgcatccctgtggccgcctgcccccagttcccagactgtgccagctgcctgcaggcccaggaccccctgtgtggctggtgtgtgctgcagggccgctgcaccaggaagggccagtgtggccgggccggccagctgaaccagtggctgtggagctatgaggaggacagccactgcctgcacatccagagcctgctgcccggccaccacccccggcaggagcagggccaggtgaccctgtctgtgccccggctgcccatcctggatgctgatgagtacttccactgtgcctttggagactatgacagcctggcccacgtggagggcccccacgtggcctgtgtgaccccaccccaggaccaggtgcccctgaaccccccaggcacagaccacgtgacagtgcccctggccctgatgtttgaagatgtgacagtggccgccaccaacttctccttctatgactgcagcgctgtgcaggccctggaggccgccgccccctgccgggcctgtgtgggcagcatctggcgctgccactggtgcccccagagcagccactgtgtgtatggagagcactgcccagagggggagaggaccatctacagcgcccaggaggtggacatccaggtgcggggccctggggcctgcccccaggtggagggcctggccggcccccacctggtgcctgtgggctgggagagccacctggccctgcgggtgaggaacctgcagcacttccggggcctgcctgccagcttccactgctggctggagctgcccggggagctgcggggcctgcctgccaccctggaggagacagctggggacagcggcctcatccactgccaggcccaccagttctaccccagcatgagccagcgggagctgcctgtgcccatctacgtgacccagggcgaggcccagaggctggacaacacccacgccctgtatgtgatcctgtatgactgtgccatgggccacccagactgcagccactgccaggccgccaacagaagcctgggctgcctgtggtgtgctgatggccagcctgcctgccgctatggccccctgtgccccccaggagctgtggagctgctgtgcccagcccccagcattgatgctgtggagcccctgactggacctcctgagggcggcctggccctgaccatcctgggcagcaacctgggccgggcctttgctgatgtgcagtatgctgtgtctgtggccagccggccctgcaaccctgagcccagcctgtaccgcaccagcgcccgcatcgtgtgtgtgaccagccctgccccaaatggcaccaccggccctgtgcgggtggccatcaagagccagcccccaggcatcagcagccagcacttcacctaccaggaccctgtgctgctgagcctgagcccccgctggggcccccaggccggcggcacccagctgaccatccggggccagcacctgcagacaggaggcaacaccagcgcctttgtgggcggccagccctgccccatcctggagcctgtgtgcccagaggccatcgtgtgcaggacccggccccaggccgcccctggagaggccgctgtgctggtggtgtttggccacgcccagaggaccctgctggccagccccttccgctacacagccaacccccagctggtggccgctgagcccagcgccagcttccggggcggcggccgcctcatccgggtgcggggcaccggcctggatgtggtgcagaggcccctgctgtctgtgtggctggaggctgatgctgaggtgcaggccagccgggcccagccccaggacccccagccccggcgcagctgtggggccccagctgctgacccccaggcctgcatccagctgggcggcggcctgctgcagtgcagcacagtgtgcagcgtgaacagcagcagcctgctgctgtgccgcagccctgctgtgcctgaccgggcccacccccagagggtcttcttcaccctggacaacgtgcaggtggactttgccagcgccagcggcggccagggcttcctgtaccagcccaacccccggctggcccccctgagccgggagggccctgcccggccctaccgcctgaagccaggccacgtgctggatgtggagggggagggcctgaacctgggcatcagcaaggaggaggtgcgggtgcacatcggcagaggagaatgtctggtgaagaccctgaccaggacccacctgtactgtgagcccccagcccacgccccccagcctgccaatggaagtggcctgccccagtttgtggtgcagatgggaaatgtgcagctggccctgggccctgtgcagtatgaggccgagccccccctgagcgccttccctgtggaggcccaggccggcgtgggcatgggcgctgctgtgctgattgctgctgtgctgctgctgaccctgatgtaccgccacaagagcaagcaggccctgcgggactaccagaaggtgctggtgcagctggagagcctggagaccggggtgggggaccagtgcaggaaggagttcacagacctgatgacagagatgacagacctgagcagtgacctggagggcagcggcatccccttcctggactaccgcacctacgccgagcgggccttcttccctggccacggcggctgccccctgcagcccaagccagagggccctggagaagatggccactgtgccaccgtgcggcagggcctgacccagctgagcaacctgctgaacagcaagctgttcctgctgaccctcatccacaccctggaggagcagcccagcttcagccagagggaccgctgccacgtggccagcctgctgagcctggccctgcacggcaagctggagtacctgacagacatcatgaggaccctgctgggggacctggccgcccactacgtgcacaggaaccccaagctgatgctgcggaggacagagaccatggtggagaagctgctgaccaactggctgagcatctgcctgtatgccttcctgcgggaggtggccggggagcccctgtacatgctgttccgggccatccagtaccaggtggacaagggccctgtggatgctgtgacaggcaaggccaagaggaccctgaatgacagccggctgctgcgggaggatgtggagttccagcccctgaccctgatggtgctggtgggccctggagctggaggagctgctggcagcagcgagatgcagagggtgcctgcccgggtgctggacacagacaccatcacccaggtgaaggagaaggtgctggaccaggtgtacaagggcacccccttcagccagaggccttctgtgcacgccctggacctggagtggaggagcggcctggccggccacctgaccctgagtgatgaggacctgacctctgtgacccagaaccactggaagaggctgaacaccctgcagcactacaaggtgcctgatggagccaccgtgggcctggtgccccagctgcaccggggcagcaccatcagccagagcctggcccagcgctgccccctgggggagaacatccccaccctggaggatggagaggagggcggcgtgtgcctgtggcacctggtgaaggccacagaggagcctgagggcgccaaggtgcgctgcagcagcctgcgggagcgggagcccgcccgggccaaggccatccctgagatctacctgacccggctgctgtccatgaagggcaccctgcagaagtttgtggatgacaccttccaggccatcctgtctgtgaaccggcccatccccatcgctgtgaagtacctgtttgacctgctggatgagctggccgagaagcacggcattgaagatcctggcaccctgcacatctggaagaccaacagcctgctgctgcgcttctgggtgaatgccctgaagaacccccagctgatctttgatgtgcgggtgtctgacaacgtggatgccatcctggccgtgattgcccagaccttcatcgacagctgcaccaccagcgagcacaaggtgggccgggacagccctgtgaacaagctgctgtatgcccgggagatcccccgctacaagcagatggtggagcgctactatgctgacatccggcagagcagccctgccagctaccaggagatgaacagcgccctggccgagctgagcggcaactacaccagcgccccccactgcctggaggccctgcaggagctgtacaaccacatccaccgctactatgaccagatcatcagcgccctggaggaggaccctgtgggccagaagctgcagctggcctgccgcctgcagcaggtggccgccctggtggagaacaaggtgacagacctgtag

SEQ ID NO: 164460 - DNA, 5799 bp, synthetic construct
  misc_feature 1..5799: note = Description of Artificial Sequence: Synthetic coding sequence
  source 1..5799: mol_type = other DNA
atggagctgaccccagccagcagcctgacctgcagcctgctgagcccccggctgcccggcagcttcccccagctgcggcgggtgcccccctgcagccggccctggctgcccaaggcccctgtgatggcccgctggccacccttcggcctgtgcctgctgctgctgctgctgagccccccacccctgcccctgactggagcccaccgcttcagcgcccccaacaccaccctgaaccacctggccctggcccctggccggggcaccctgtatgtgggcgctgtgaacagactcttccagctgagccctgagctgcagctggaggccgtggccgtgacaggccctgtgattgacagcccagactgtgtgcccttccgggaccctgcagaatgtccccaggcccagctgacagacaatgccaaccagctgctgctggtgagcagccgggcccaggagctggtggcctgtggccaggtgcggcagggcgtgtgtgagacccggcggctgggagatgtggccgaggtgctgtaccaggctgaagatcctggagatggccagtttgtggccgccaacaccccaggagtggccaccgtgggcctggtggtgcccctgcccggccgggacctgctgctggtggcccggggcctggccggcaagctgtctgctggggtgccccccctggccatccggcagctggccggcagccagcccttcagcagcgagggcctgggccgcctggtggtgggggacttcagtgactacaacaacagctatgtgggcgcctttgctgatgcccggagcgcctactttgtgttcagaagaagaggagcccgggcccaggccgagtaccgctcctatgtggcccgggtgtgcctgggggacaccaacctgtacagctatgtggaggtgcccctggcctgccagggccagggcctcatccaggccgccttcctggcccctggcaccctgctgggcgtgtttgctgctggcccccggggcacccaggccgccctgtgtgccttccccatggtggagctgggcgcctccatggagcaggcccggcggctgtgctacacagctgggggccggggccccagcggggctgaggaggccaccgtggagtatggagtgaccagccgctgtgtgaccctgcccctggacagccctgagagctacccctgtggagatgagcacacccccagccccatcgccggccggcagcccctggaggtgcagcccctgctgaagctgggccagcctgtgtctgctgtggccgccctgcaggctgatggccacatgattgccttcctgggggacacccagggccagctgtacaaggtgttcctgcacggcagccagggccaggtgtaccacagccagcaggtgggccccccaggcagcgccatcagcccagacctgctgctggacagcagcggcagccacctgtatgtgctgacagcccaccaggtggaccgcatccctgtggccgcctgcccccagttcccagactgtgccagctgcctgcaggcccaggaccccctgtgtggctggtgtgtgctgcagggccgctgcaccaggaagggccagtgtggccgggccggccagctgaaccagtggctgtggagctatgaggaggacagccactgcctgcacatccagagcctgctgcccggccaccacccccggcaggagcagggccaggtgaccctgtctgtgccccggctgcccatcctggatgctgatgagtacttccactgtgcctttggagactatgacagcctggcccacgtggagggcccccacgtggcctgtgtgaccccaccccaggaccaggtgcccctgaaccccccaggcacagaccacgtgacagtgcccctggccctgatgtttgaagatgtgacagtggccgccaccaacttctccttctatgactgcagcgctgtgcaggccctggaggccgccgccccctgccgggcctgtgtgggcagcatctggcgctgccactggtgcccccagagcagccactgtgtgtatggagagcactgcccagagggggagaggaccatctacagcgcccaggaggtggacatccaggtgcggggccctggggcctgcccccaggtggagggcctggccggcccccacctggtgcctgtgggctgggagagccacctggccctgcgggtgaggaacctgcagcacttccggggcctgcctgccagcttccactgctggctggagctgcccggggagctgcggggcctgcctgccaccctggaggagacagctggggacagcggcctcatccactgccaggcccaccagttctaccccagcatgagccagcgggagctgcctgtgcccatctacgtgacccagggcgaggcccagaggctggacaacacccacgccctgtatgtgatcctgtatgactgtgccatgggccacccagactgcagccactgccaggccgccaacagaagcctgggctgcctgtggtgtgctgatggccagcctgcctgccgctatggccccctgtgccccccaggagctgtggagctgctgtgcccagcccccagcattgatgctgtggagcccctgactggacctcctgagggcggcctggccctgaccatcctgggcagcaacctgggccgggcctttgctgatgtgcagtatgctgtgtctgtggccagccggccctgcaaccctgagcccagcctgtaccgcaccagcgcccgcatcgtgtgtgtgaccagccctgccccaaatggcaccaccggccctgtgcgggtggccatcaagagccagcccccaggcatcagcagccagcacttcacctaccaggaccctgtgctgctgagcctgagcccccgctggggcccccaggccggcggcacccagctgaccatccggggccagcacctgcagacaggaggcaacaccagcgcctttgtgggcggccagccctgccccatcctggagcctgtgtgcccagaggccatcgtgtgcaggacccggccccaggccgcccctggagaggccgctgtgctggtggtgtttggccacgcccagaggaccctgctggccagccccttccgctacacagccaacccccagctggtggccgctgagcccagcgccagcttccggggcggcggccgcctcatccgggtgcggggcaccggcctggatgtggtgcagaggcccctgctgtctgtgtggctggaggctgatgctgaggtgcaggccagccgggcccagccccaggacccccagccccggcgcagctgtggggccccagctgctgacccccaggcctgcatccagctgggcggcggcctgctgcagtgcagcacagtgtgcagcgtgaacagcagcagcctgctgctgtgccgcagccctgctgtgcctgaccgggcccacccccagagggtcttcttcaccctggacaacgtgcaggtggactttgccagcgccagcggcggccagggcttcctgtaccagcccaacccccggctggcccccctgagccgggagggccctgcccggccctaccgcctgaagccaggccacgtgctggatgtggagggggagggcctgaacctgggcatcagcaaggaggaggtgcgggtgcacatcggcagaggagaatgtctggtgaagaccctgaccaggacccacctgtactgtgagcccccagcccacgccccccagcctgccaatggaagtggcctgccccagtttgtggtgcagatgggaaatgtgcagctggccctgggccctgtgcagtatgaggccgagccccccctgagcgccttccctgtggaggcccaggccggcgtgggcatgggcgctgctgtgctgattgctgctgtgctgctgctgaccctgatgtaccgccacaagagcaagcaggccctgcgggactaccagaaggtgctggtgcagctggagagcctggagaccggggtgggggaccagtgcaggaaggagttcacagacctgatgacagagatgacagacctgagcagtgacctggagggcagcggcatccccttcctggactaccgcacctacgccgagcgggccttcttccctggccacggcggctgccccctgcagcccaagccagagggccctggagaagatggccactgtgccaccgtgcggcagggcctgacccagctgagcaacctgctgaacagcaagctgttcctgctgaccctcatccacaccctggaggagcagcccagcttcagccagagggaccgctgccacgtggccagcctgctgagcctggccctgcacggcaagctggagtacctgacagacatcatgaggaccctgctgggggacctggccgcccactacgtgcacaggaaccccaagctgatgctgcggaggacagagaccatggtggagaagctgctgaccaactggctgagcatctgcctgtatgccttcctgcgggaggtggccggggagcccctgtacatgctgttccgggccatccagtaccaggtggacaagggccctgtggatgctgtgacaggcaaggccaagaggaccctgaatgacagccggctgctgcgggaggatgtggagttccagcccctgaccctgatggtgctggtgggccctggagctggaggagctgctggcagcagcgagatgcagagggtgcctgcccgggtgctggacacagacaccatcacccaggtgaaggagaaggtgctggaccaggtgtacaagggcacccccttcagccagaggccttctgtgcacgccctggacctggagtggaggagcggcctggccggccacctgaccctgagtgatgaggacctgacctctgtgacccagaaccactggaagaggctgaacaccctgcagcactacaaggtgcctgatggagccaccgtgggcctggtgccccagctgcaccggggcagcaccatcagccagagcctggcccagcgctgccccctgggggagaacatccccaccctggaggatggagaggagggcggcgtgtgcctgtggcacctggtgaaggccacagaggagcctgagggcgccaaggtgcgctgcagcagcctgcgggagcgggagcccgcccgggccaaggccatccctgagatctacctgacccggctgctgtccatgaagggcaccctgcagaagtttgtggatgacaccttccaggccatcctgtctgtgaaccggcccatccccatcgctgtgaagtacctgtttgacctgctggatgagctggccgagaagcacggcattgaagatcctggcaccctgcacatctggaagaccaacagcctgctgctgcgcttctgggtgaatgccctgaagaacccccagctgatctttgatgtgcgggtgtctgacaacgtggatgccatcctggccgtgattgcccagaccttcatcgacagctgcaccaccagcgagcacaaggtgggccgggacagccctgtgaacaagctgctgtatgcccgggagatcccccgctacaagcagatggtggagcgctactatgctgacatccggcagagcagccctgccagctaccaggagatgaacagcgccctggccgagctgagcggcaactacaccagcgccccccactgcctggaggccctgcaggagctgtacaaccacatccaccgctactatgaccagatcatcagcgccctggaggaggaccctgtgggccagaagctgcagctggcctgccgcctgcagcaggtggccgccctggtggagaacaaggtgacagacctgtag

SEQ ID NO: 164461 - DNA, 5778 bp, synthetic construct
  misc_feature 1..5778: note = Description of Artificial Sequence: Synthetic coding sequence
  source 1..5778: mol_type = other DNA
atggcccccagggctgctgggggcgcccccctgagcgcccgggctgctgctgccagccccccacccttccagaccccaccccgctgccctgtgcccctgctgctgctgctgctgctgggcgccgcccgggccggggccctggagatccagaggcgcttccccagccccacccccaccaacaactttgccctggatggagctgctggcaccgtgtacctggccgctgtgaacagactctaccagctgagcggggccaacctgagcctggaggccgaggccgctgtgggccctgtgcctgacagccccctgtgccacgccccccagctgccccaggccagctgtgagcacccccggcggctgacagacaactacaacaagatcctgcagctggaccccggccagggcctggtggtggtgtgtggcagcatctaccagggcttctgccagctgcggcggcggggcaacatctctgctgtggccgtgcgcttccccccagctgcccccccagctgagcctgtgaccgtcttccccagcatgctgaatgtggccgccaaccaccccaatgccagcacagtgggcctggtgctgcccccagctgctggggccggcggcagccggctgctggtgggcgccacctacacaggctacggcagcagcttcttccccaggaacagaagcctggaggaccacagatttgagaacaccccagagatcgccatccgcagcctggacaccaggggggacctggccaagctgttcacctttgacctgaaccccagtgatgacaacatcctgaagatcaagcagggcgccaaggagcagcacaagctgggctttgtgtctgccttcctgcaccccagcgaccccccacctggggcccagagctatgcctacctggccctgaacagcgaggcccgggccggggacaaggagagccaggcccggagcctgctggcccgcatctgcctgccccatggagctggaggagatgccaagaagctgacagagagctacatccagctgggcctgcagtgtgccggcggggccggccgcggggacctgtacagccggctggtgtctgtgtttcctgcccgggagcggctgtttgctgtgtttgagcggccccagggcagccctgctgcccgggccgccccagctgccctgtgtgccttccgctttgctgatgtgcgggccgccatccgggccgccaggacagcctgctttgtggagcccgccccagatgtggtggccgtgctggacagcgtggtgcagggcaccggccctgcctgtgagaggaagctgaacatccagctgcagcctgagcagctggactgtggggccgcccacctgcagcaccccctgagcatcctgcagcccctgaaggccacccctgtgttccgggcccctggcctgacctctgtggccgtggcctctgtgaacaactacacagctgtgttcctgggcaccgtgaatggccgcctgctgaagatcaacctgaatgaatccatgcaggtggtgtcccggcgggtggtgacagtggcctatggagagcctgtgcaccacgtgatgcagtttgatcctgctgacagcggctacctgtacctgatgaccagccaccagatggcccgggtgaaggtggccgcctgcaatgtgcacagcacctgtggggactgtgtgggcgctgctgatgcctactgcggctggtgtgccctggagacccgctgcaccctgcagcaggactgcaccaacagcagccagcagcacttctggaccagcgccagcgagggccccagccgctgcccagccatgacagtgctgcccagcgagattgatgtgcggcaggagtacccaggcatgatcctgcagatcagcggcagcctgcccagcctgagcggcatggagatggcctgtgactatggcaacaacatcagaacagtggcccgggtgcccggccctgccttcggccaccagatcgcctactgcaacctgctgccccgggaccagttcccccccttcccccccaaccaggaccacgtgacagtggagatgtctgtgcgggtgaatggaagaaacatcgtgaaggccaacttcaccatctatgactgcagcaggacagcccaggtgtacccccacacagcctgcaccagctgcctgagcgcccagtggccctgcttctggtgcagccagcagcacagctgtgtgagcaaccagagccgctgtgaggccagccccaaccccaccagcccccaggactgccccaggaccctgctgagccccctggcccctgtgcccactggaggcagccagaacatcctggtgcccctggccaacacagccttcttccagggcgccgccctggagtgcagctttggcctggaggagatctttgaggccgtgtgggtgaatgaatctgtggtgcgctgtgaccaggtggtgctgcacaccaccaggaagagccaggtgttccccctgagcctgcagctgaagggccggcctgcccgcttcctggacagccctgagcccatgacagtgatggtgtacaactgtgccatgggcagcccagactgcagccagtgcctgggccgggaggacctgggccacctgtgcatgtggagcgatggctgccgcctgcggggccccctgcagcccatggccggcacctgcccagcccctgagatccacgccatcgagcccctgagcggccccctggatggcggcaccctgctgaccatccggggcaggaacctgggccggcggctgagtgatgtggcccatggagtgtggattggaggagtggcctgtgagcccctgcctgaccgctacacagtgtctgaggagatcgtgtgtgtgactggacctgcccctggccccctgtctggagtggtgacagtgaatgccagcaaggagggcaagagccgggaccgcttctcctatgtgctgcccctggtgcacagcctggagcccaccatgggccccaaggccggcggcacccgcatcaccatccacggcaatgacctgcacgtgggcagcgagctgcaggtgctggtgaatgacacagacccctgcacagagctgatgaggacagacaccagcatcgcctgcaccatgcctgagggcgccctgcctgcccctgtgcctgtgtgtgtgcgctttgaaagaagaggctgtgtgcacggcaacctgaccttctggtacatgcagaaccctgtgatcacagccatcagccccaggaggagccctgtgtctgggggccgcaccatcaccgtggccggggagcgcttccacatggtgcagaatgtgtccatggctgtgcaccacatcggccgggagcccaccctgtgcaaggtgctgaacagcaccctcatcacctgccccagccctggggccctgagcaatgccagcgcccctgtggacttcttcatcaatggccgggcctatgcagatgaggtggccgtggccgaggagctgctggaccctgaggaggcccagaggggcagccgcttccggctggactacctgcccaacccccagttcagcacagccaagcgggagaagtggatcaagcaccaccctggagagcccctgaccctggtgatccacaaggagcaggacagcctgggcctgcagagccatgagtacagagtgaagattggccaggtgtcctgtgacatccagatcgtgtctgaccgcatcatccactgcagcgtgaatgaaagcctgggcgctgctgtgggccagctgcccatcaccatccaggtgggcaacttcaaccagaccatcgccaccctgcagctgggcggcagcgagacagccatcatcgtgtccatcgtcatctgcagcgtgctgctgctgctgtctgtggtggccctgtttgtgttctgcaccaagagccggcgggcagagcgctactggcagaagaccctgctgcagatggaggagatggagagccagatccgggaggagatcaggaagggctttgctgagctgcagacagacatgacagacctgaccaaggagctgaacagaagccagggcatccccttcctggagtacaagcactttgtgaccaggaccttcttccccaagtgcagcagcctgtatgaggagagatatgtgctgcccagccagaccctgaacagccagggcagcagccaggcccaggagacccaccccctgctgggggagtggaagatccctgagagctgccggcccaacatggaggagggcatcagcctcttcagcagcctgctgaacaacaagcacttcctgattgtgtttgtgcacgccctggagcagcagaaggactttgctgtgcgggaccgctgcagcctggccagcctgctgaccatcgccctgcacggcaagctggagtactacaccagcatcatgaaggagctgctggtggacctgattgatgccagcgctgccaagaaccccaagctgatgctgcggaggacagagagcgtggtggagaagatgctgaccaactggatgagcatctgcatgtacagctgcctgcgggagaccgtgggggagcccttcttcctgctgctgtgtgccatcaagcagcagatcaacaagggcagcattgatgccatcaccgggaaggcccgctacaccctgtctgaggagtggctgctgagagaaaatattgaggccaagcccaggaacctgaatgtgtccttccagggctgcggcatggacagcctgtctgtgcgggccatggacacagacaccctgacccaggtgaaggagaagatcctggaggccttctgcaagaatgtgccctacagccagtggcccagggcagaagatgtggacctggagtggtttgccagcagcacccagagctacatcctgcgggacctggatgacacctctgtggtggaggatggcaggaagaagctgaacaccctggcccactacaagatccctgagggcgccagcctggccatgagcctgattgacaagaaggacaacaccctgggccgggtgaaggacctggacacagagaagtacttccacctggtgctgcccacagatgagctggccgagcccaagaagagccaccggcagagccacaggaagaaggtgctgcctgagatctacctgacccggctgctgagcaccaagggcaccctgcagaagttcctggatgacctcttcaaggccatcctgagcatccgggaggacaagccacccctggccgtgaagtacttctttgacttcctggaggagcaggccgagaagaggggcatcagtgaccctgacaccctgcacatctggaagaccaacagcctgcccctgcgcttctgggtgaacatcctgaagaacccccagtttgtgtttgatattgacaagacagaccacattgatgcctgcctgagcgtcatcgcccaggccttcattgatgcctgcagcatcagtgacctgcagctgggcaaggacagccccaccaacaagctgctgtatgccaaggagatccctgagtacaggaagatcgtgcagcgctactacaagcagatccaggacatgacccccctgtctgagcaggagatgaatgcccacctggccgaggagagcaggaagtaccagaatgagttcaacaccaacgtggccatggccgagatctacaagtatgccaagcgctaccggccccagatcatggccgccctggaggccaaccccacagcccggaggacccagctgcagcacaagtttgagcaggtggtggccctgatggaggacaacatctatgagtgctacagcgaggcctag

SEQ ID NO: 164462 - DNA, 5358 bp, synthetic construct
  misc_feature 1..5358: note = Description of Artificial Sequence: Synthetic coding sequence
  source 1..5358: mol_type = other DNA
atggcccccagggctgctgggggcgcccccctgagcgcccgggctgctgctgccagccccccacccttccagaccccaccccgctgccctgtgcccctgctgctgctgctgctgctgggcgccgcccgggccggggccctggagatccagaggcgcttccccagccccacccccaccaacaactttgccctggatggagctgctggcaccgtgtacctggccgctgtgaacagactctaccagctgagcggggccaacctgagcctggaggccgaggccgctgtgggccctgtgcctgacagccccctgtgccacgccccccagctgccccaggccagctgtgagcacccccggcggctgacagacaactacaacaagatcctgcagctggaccccggccagggcctggtggtggtgtgtggcagcatctaccagggcttctgccagctgcggcggcggggcaacatctctgctgtggccgtgcgcttccccccagctgcccccccagctgagcctgtgaccgtcttccccagcatgctgaatgtggccgccaaccaccccaatgccagcacagtgggcctggtgctgcccccagctgctggggccggcggcagccggctgctggtgggcgccacctacacaggctacggcagcagcttcttccccaggaacagaagcctggaggaccacagatttgagaacaccccagagatcgccatccgcagcctggacaccaggggggacctggccaagctgttcacctttgacctgaaccccagtgatgacaacatcctgaagatcaagcagggcgccaaggagcagcacaagctgggctttgtgtctgccttcctgcaccccagcgaccccccacctggggcccagagctatgcctacctggccctgaacagcgaggcccgggccggggacaaggagagccaggcccggagcctgctggcccgcatctgcctgccccatggagctggaggagatgccaagaagctgacagagagctacatccagctgggcctgcagtgtgccggcggggccggccgcggggacctgtacagccggctggtgtctgtgtttcctgcccgggagcggctgtttgctgtgtttgagcggccccagggcagccctgctgcccgggccgccccagctgccctgtgtgccttccgctttgctgatgtgcgggccgccatccgggccgccaggacagcctgctttgtggagcccgccccagatgtggtggccgtgctggacagcgtggtgcagggcaccggccctgcctgtgagaggaagctgaacatccagctgcagcctgagcagctggactgtggggccgcccacctgcagcaccccctgagcatcctgcagcccctgaaggccacccctgtgttccgggcccctggcctgacctctgtggccgtggcctctgtgaacaactacacagctgtgttcctgggcaccgtgaatggccgcctgctgaagatcaacctgaatgaatccatgcaggtggtgtcccggcgggtggtgacagtggcctatggagagcctgtgcaccacgtgatgcagtttgatcctgctgacagcggctacctgtacctgatgaccagccaccagatggcccgggtgaaggtggccgcctgcaatgtgcacagcacctgtggggactgtgtgggcgctgctgatgcctactgcggctggtgtgccctggagacccgctgcaccctgcagcaggactgcaccaacagcagccagcagcacttctggaccagcgccagcgagggccccagccgctgcccagccatgacagtgctgcccagcgagattgatgtgcggcaggagtacccaggcatgatcctgcagatcagcggcagcctgcccagcctgagcggcatggagatggcctgtgactatggcaacaacatcagaacagtggcccgggtgcccggccctgccttcggccaccagatcgcctactgcaacctgctgccccgggaccagttcccccccttcccccccaaccaggaccacgtgacagtggagatgtctgtgcgggtgaatggaagaaacatcgtgaaggccaacttcaccatctatgactgcagcaggacagcccaggtgtacccccacacagcctgcaccagctgcctgagcgcccagtggccctgcttctggtgcagccagcagcacagctgtgtgagcaaccagagccgctgtgaggccagccccaaccccaccagcccccaggactgccccaggaccctgctgagccccctggcccctgtgcccactggaggcagccagaacatcctggtgcccctggccaacacagccttcttccagggcgccgccctggagtgcagctttggcctggaggagatctttgaggccgtgtgggtgaatgaatctgtggtgcgctgtgaccaggtggtgctgcacaccaccaggaagagccaggtgttccccctgagcctgcagctgaagggccggcctgcccgcttcctggacagccctgagcccatgacagtgatggtgtacaactgtgccatgggcagcccagactgcagccagtgcctgggccgggaggacctgggccacctgtgcatgtggagcgatggctgccgcctgcggggccccctgcagcccatggccggcacctgcccagcccctgagatccacgccatcgagcccctgagcggccccctggatggcggcaccctgctgaccatccggggcaggaacctgggccggcggctgagtgatgtggcccatggagtgtggattggaggagtggcctgtgagcccctgcctgaccgctacacagtgtctgaggagatcgtgtgtgtgactggacctgcccctggccccctgtctggagtggtgacagtgaatgccagcaaggagggcaagagccgggaccgcttctcctatgtgctgcccctggtgcacagcctggagcccaccatgggccccaaggccggcggcacccgcatcaccatccacggcaatgacctgcacgtgggcagcgagctgcaggtgctggtgaatgacacagacccctgcacagagctgatgaggacagacaccagcatcgcctgcaccatgcctgagggcgccctgcctgcccctgtgcctgtgtgtgtgcgctttgaaagaagaggctgtgtgcacggcaacctgaccttctggtacatgcagaaccctgtgatcacagccatcagccccaggaggagccctgtgtctgggggccgcaccatcaccgtggccggggagcgcttccacatggtgcagaatgtgtccatggctgtgcaccacatcggccgggagcccaccctgtgcaaggtgctgaacagcaccctcatcacctgccccagccctggggccctgagcaatgccagcgcccctgtggacttcttcatcaatggccgggcctatgcagatgaggtggccgtggccgaggagctgctggaccctgaggaggcccagaggggcagccgcttccggctggactacctgcccaacccccagttcagcacagccaagcgggagaagtggatcaagcaccaccctggagagcccctgaccctggtgatccacaaggagcaggacagcctgggcctgcagagccatgagtacagagtgaagattggccaggtgtcctgtgacatccagatcgtgtctgaccgcatcatccactgcagcgtgaatgaaagcctgggcgctgctgtgggccagctgcccatcaccatccaggtgggcaacttcaaccagaccatcgccaccctgcagctgggcggcagcgagacagccatcatcgtgtccatcgtcatctgcagcgtgctgctgctgctgtctgtggtggccctgtttgtgttctgcaccaagagccggcgggcagagcgctactggcagaagaccctgctgcagatggaggagatggagagccagatccgggaggagatcaggaagggctttgctgagctgcagacagacatgacagacctgaccaaggagctgaacagaagccagggcatccccttcctggagtacaagcactttgtgaccaggaccttcttccccaagtgcagcagcctgtatgaggagagatatgtgctgcccagccagaccctgaacagccagggcagcagccaggcccaggagacccaccccctgctgggggagtggaagatccctgagagctgccggcccaacatggaggagggcatcagcctcttcagcagcctgctgaacaacaagcacttcctgattgtgtttgtgcacgccctggagcagcagaaggactttgctgtgcgggaccgctgcagcctggccagcctgctgaccatcgccctgcacggcaagctggagtactacaccagcatcatgaaggagctgctggtggacctgattgatgccagcgctgccaagaaccccaagctgatgctgcggaggacagagagcgtggtggagaagatgctgaccaactggatgagcatctgcatgtacagctgcctgcgggagaccgtgggggagcccttcttcctgctgctgtgtgccatcaagcagcagatcaacaagggcagcattgatgccatcaccgggaaggcccgctacaccctgtctgaggagtggctgctgagagaaaatattgaggccaagcccaggaacctgaatgtgtccttccagggctgcggcatggacagcctgtctgtgcgggccatggacacagacaccctgacccaggtgaaggagaagatcctggaggccttctgcaagaatgtgccctacagccagtggcccagggcagaagatgtggacctggagtggtttgccagcagcacccagagctacatcctgcgggacctggatgacacctctgtggtggaggatggcaggaagaagctgaacaccctggcccactacaagatccctgagggcgccagcctggccatgagcctgattgacaagaaggacaacaccctgggccgggtgaaggacctggacacagagaagtacttccacctggtgctgcccacagatgagctggccgagcccaagaagagccaccggcagagccacaggaagaaggtgctgcctgagatctacctgacccggctgctgagcaccaagggcaccctgcagaagttcctggatgacctcttcaaggccatcctgagcatccgggaggacaagccacccctggccgtgaagtacttctttgacttcctggaggagcaggccgagaagaggggcatcagtgaccctgacaccctgcacatctggaagaccaaccgctggaggcccagcagccctgtgctgggggagcaccctgaggagccccctgtgtgcctgtag

SEQ ID NO: 164463 - DNA, 1503 bp, synthetic construct
  misc_feature 1..1503: note = Description of Artificial Sequence: Synthetic coding sequence
  source 1..1503: mol_type = other DNA
atgagaggagagctgtggctgctggtgctggtgctgcgggaggccgcccgggccctgagcccccagcctggagctggccatgatgagggccctggcagcggctgggccgccaagggcaccgtgcggggctggaacagaagagcccgggagagccctggccacgtgtctgagccagacaggacccagctgagccaggacctgggcggcggcaccctggccatggacaccctgcctgacaacagaaccagggtggtggaggacaaccacagctactacgtgtcccggctgtatggccccagcgagccccacagccgggagctgtgggtggatgtggccgaggccaacagaagccaggtgaagatccacaccatcctgagcaacacccaccggcaggccagccgggtggtgctgagctttgacttccccttctacggccaccccctgcggcagatcaccatcgccactggaggcttcatcttcatgggagatgtgatccacaggatgctgacagccacccagtatgtggcccccctgatggccaacttcaaccctggctacagcgacaacagcacagtggtgtactttgacaatggaacagtgtttgtggtgcagtgggaccacgtgtacctgcagggctgggaggacaagggcagcttcaccttccaggccgccctgcaccatgatggaagaattgtgtttgcctacaaggagatccccatgtctgtgcctgagatcagcagcagccagcaccctgtgaagacaggcctgagtgatgccttcatgatcctgaaccccagcccagatgtgcctgagagcagaagaagaagcatctttgagtaccacagaattgagctggaccccagcaaggtgacctccatgtctgctgtggagttcacccccctgcccacctgcctgcagcacaggagctgtgatgcctgcatgagcagtgacctgaccttcaactgctcctggtgccacgtgctgcagcgctgcagcagcggctttgaccgctaccggcaggagtggatggactatggctgtgcccaggaggccgagggccgcatgtgtgaggacttccaggatgaggaccatgacagcgccagcccagacaccagcttcagcccctatgatggagacctgaccaccaccagcagcagcctcttcatcgacagcctgaccacagaagatgacaccaagctgaacccctatgctggaggagatggcctgcagaacaacctgagccccaagaccaagggcacccctgtgcacctgggcaccatcgtgggcatcgtgctggccgtgctgctggtggccgccatcatcctggccggcatctacatcaatggccaccccaccagcaatgctgccctcttcttcatcgagcggcggccccaccactggccagccatgaagttccgcagccacccagaccacagcacctacgccgaggtggagcccagcggccacgagaaggagggcttcatggaggccgagcagtgctag

SEQ ID NO: 164464 - DNA, 1014 bp, synthetic construct
  misc_feature 1..1014: note = Description of Artificial Sequence: Synthetic coding sequence
  source 1..1014: mol_type = other DNA
atgagaggagagctgtggctgctggtgctggtgctgcgggaggccgcccgggccctgagcccccagcctggagctggccatgatgagggccctggcagcggctgggccgccaagggcaccgtgcggggctggaacagaagagcccgggagagccctggccacgtgtctgagccagacaggacccagctgagccaggacctgggcggcggcaccctggccatggacaccctgcctgacaacagaaccagggtggtggaggacaaccacagctactacgtgtcccggctgtatggccccagcgagccccacagccgggagctgtgggtggatgtggccgaggccaacagaagccaggtgaagatccacaccatcctgagcaacacccaccggcaggccagccgggtggtgctgagctttgacttccccttctacggccaccccctgcggcagatcaccatcgccactggaggcttcatcttcatgggagatgtgatccacaggatgctgacagccacccagtatgtggcccccctgatggccaacttcaaccctggctacagcgacaacagcacagtggtgtactttgacaatggaacagtgtttgtggtgcagtgggaccacgtgtacctgcagggctgggaggacaagggcagcttcaccttccaggccgccctgcaccatgatggaagaattgtgtttgcctacaaggagatccccatgtctgtgcctgagatcagcagcagccagcaccctgtgaagacaggcctgagtgatgccttcatgatcctgaaccccagcccagatgtgcctgagagcagaagaagaagcatctttgagtaccacagaattgagctggaccccagcaaggtgacctccatgtctgctgtggagttcacccccctgcccacctgcctgcagcacaggagctgtgatgcctgcatgagcagtgacctgaccttcaactgctcctggtgccacgtgctgcagagcagagatgaggtgagcccctgctag

SEQ ID NO: 164465 - DNA, 1284 bp, synthetic construct
  misc_feature 1..1284: note = Description of Artificial Sequence: Synthetic coding sequence
  source 1..1284: mol_type = other DNA
atggacaccctgcctgacaacagaaccagggtggtggaggacaaccacagctactacgtgtcccggctgtatggccccagcgagccccacagccgggagctgtgggtggatgtggccgaggccaacagaagccaggtgaagatccacaccatcctgagcaacacccaccggcaggccagccgggtggtgctgagctttgacttccccttctacggccaccccctgcggcagatcaccatcgccaccggcggcttcatcttcatgggagatgtgatccacaggatgctgacagccacccagtatgtggcccccctgatggccaacttcaaccctggctacagcgacaacagcacagtggtgtactttgacaatggcaccgtgtttgtggtgcagtgggaccacgtgtacctgcagggctgggaggacaagggcagcttcaccttccaggccgccctgcaccatgatggccgcatcgtgtttgcctacaaggagatccccatgtctgtgcctgagatcagcagcagccagcaccctgtgaagacaggcctgagtgatgccttcatgatcctgaaccccagcccagatgtgcctgagagcagaagaagaagcatctttgagtaccaccgcatcgagctggaccccagcaaggtgacctccatgtctgctgtggagttcacccccctgcccacctgcctgcagcacaggagctgtgatgcctgcatgagcagtgacctgaccttcaactgctcctggtgccacgtgctgcagaggagcctgaacaaccaggatgagaacacctacgtgaactgcctggacagccagcagtgccacggcagcagcgagagcagaagacccttccaggatgaagatcatgattctgccagcccagacaccagcttcagcccctatgatggagacctgaccaccaccagcagcagcctcttcatcgacagcctgaccacagaagatgacaccaagctgaacccctatgctggaggagatggcctgcagaacaacctgagccccaagaccaagggcacccctgtgcacctgggcaccatcgtgggcatcgtgctggccgtgctgctggtggccgccatcatcctggccggcatctacatcaatggccaccccaccagcaatgctgccctcttcttcattgaaagaagaccccaccactggccagccatgaagttccgcagccacccagaccacagcacctatgcagaggtggagcccagcggccacgagaaggagggcttcatggaggccgagcagtgctag

SEQ ID NO: 164466 - DNA, 375 bp, synthetic construct
  misc_feature 1..375: note = Description of Artificial Sequence: Synthetic coding sequence
  source 1..375: mol_type = other DNA
atggacaccctgcctgacaacagaaccagggtggtggaggacaaccacagctactacgtgtcccggctgtatggccccagcgagccccacagccgggagctgtgggtggatgtggccgaggccaacagaagccaggtgaagatccacaccatcctgagcaacacccaccggcaggccagccgggtggtgctgagctttgacttccccttctacggccaccccctgcggcagatcaccatcgccaccggcggcttcatcttcatgggagatgtgatccacaggatgctgacagccacccagtatgtggcccccctgatggccaacttcaaccctggctacagcgacaacagcacagtggtgtactttgacaactag

SEQ ID NO: 164467 - DNA, 669 bp, synthetic construct
  misc_feature 1..669: note = Description of Artificial Sequence: Synthetic coding sequence
  source 1..669: mol_type = other DNA
atggacaccctgcctgacaacagaaccagggtggtggaggacaaccacagctactacgtgtcccggctgtatggccccagcgagccccacagccgggagctgtgggtggatgtggccgaggccaacagaagccaggtgaagatccacaccatcctgagcaacacccaccggcaggccagccgggtggtgctgagctttgacttccccttctacggccaccccctgcggcagatcaccatcgccaccggcggcttcatcttcatgggagatgtgatccacaggatgctgacagccacccagtatgtggcccccctgatggccaacttcaaccctggctacagcgacaacagcacagtggtgtactttgacaatggcaccgtgtttgtggtgcagtgggaccacgtgtacctgcagggctgggaggacaagggcagcttcaccttccaggccgccctgcaccatgatggccgcatcgtgtttgcctacaaggagatccccatgtctgtgcctgagatcagcagcagccagcaccctgtgaagacaggcctgagtgatgccttcatgatcctgaaccccagcccagatgtgcctgagagcagaagaagaagcatctttgagtaccaccgcatcgagctggaccccagcaaggtgacctccatgtctgcctag

SEQ ID NO: 164468 - DNA, 198 bp, synthetic construct
  misc_feature 1..198: note = Description of Artificial Sequence: Synthetic coding sequence
  source 1..198: mol_type = other DNA
tgaagcttcaccttccaggccgccctgcaccatgatggaagaattgtgtttgcctacaaggagatccccatgtctgtgcctgagatcagcagcagccagcaccctgtgaagacaggcctgagtgatgccttcatgatcctgaaccccagcccagatgtgcccggcttctctgctgagagcgccaagcacctgtggtag

SEQ ID NO: 164469 - DNA, 1383 bp, synthetic construct
  misc_feature 1..1383: note = Description of Artificial Sequence: Synthetic coding sequence
  source 1..1383: mol_type = other DNA
atggccctgtctgtgaggaccctgcccctgcggggcttcctggtgccccggccccagcccaccaggagccaggatgcccccagcccccggctgcccctgagcagcgccccagccccctgccgccacaagaatgaggaggacaaccacagctactacgtgtcccggctgtatggccccagcgagccccacagccgggagctgtgggtggatgtggccgaggccaacagaagccaggtgaagatccacaccatcctgagcaacacccaccggcaggccagccgggtggtgctgagctttgacttccccttctacggccaccccctgcggcagatcaccatcgccactggaggcttcatcttcatgggagatgtgatccacaggatgctgacagccacccagtatgtggcccccctgatggccaacttcaaccctggctacagcgacaacagcacagtggtgtactttgacaatggaacagtgtttgtggtgcagtgggaccacgtgtacctgcagggctgggaggacaagggcagcttcaccttccaggccgccctgcaccatgatggaagaattgtgtttgcctacaaggagatccccatgtctgtgcctgagatcagcagcagccagcaccctgtgaagacaggcctgagtgatgccttcatgatcctgaaccccagcccagatgtgcctgagagcagaagaagaagcatctttgagtaccacagaattgagctggaccccagcaaggtgacctccatgtctgctgtggagttcacccccctgcccacctgcctgcagcacaggagctgtgatgcctgcatgagcagtgacctgaccttcaactgctcctggtgccacgtgctgcagcgctgcagcagcggctttgaccgctaccggcaggagtggatggactatggctgtgcccaggaggccgagggccgcatgtgtgaggacttccaggatgaggaccatgacagcgccagcccagacaccagcttcagcccctatgatggagacctgaccaccaccagcagcagcctcttcatcgacagcctgaccacagaagatgacaccaagctgaacccctatgctggaggagatggcctgcagaacaacctgagccccaagaccaagggcacccctgtgcacctgggcaccatcgtgggcatcgtgctggccgtgctgctggtggccgccatcatcctggccggcatctacatcaatggccaccccaccagcaatgctgccctcttcttcatcgagcggcggccccaccactggccagccatgaagttccgcagccacccagaccacagcacctacgccgaggtggagcccagcggccacgagaaggagggcttcatggaggccgagcagtgctag

SEQ ID NO: 164470 - DNA, 723 bp, synthetic construct
  misc_feature 1..723: note = Description of Artificial Sequence: Synthetic coding sequence
  source 1..723: mol_type = other DNA
atggacaccctgcctgacaacagaaccagggtggtggaggacaaccacagctactacgtgtcccggctgtatggccccagcgagccccacagccgggagctgtgggtggatgtggccgaggccaacagaagccaggtgaagatccacaccatcctgagcaacacccaccggcaggccagccgggtggtgctgagctttgacttccccttctacggccaccccctgcggcagatcaccatcgccaccggcggcttcatcttcatgggagatgtgatccacaggatgctgacagccacccagtatgtggcccccctgatggccaacttcaaccctggctacagcgacaacagcacagtggtgtactttgacaatggcaccgtgtttgtggtgcagtgggaccacgtgtacctgcagggctgggaggacaagggcagcttcaccttccaggccgccctgcaccatgatggccgcatcgtgtttgcctacaaggagatccccatgtctgtgcctgagatcagcagcagccagcaccctgtgaagacaggcctgagtgatgccttcatgatcctgaaccccagcccagatgtgcctgagagcagaagaagaagcatctttgagtaccaccgcatcgagctggaccccagcaaggtgacctccatgtctgctgtggagttcacccccctgcccagccccagcaccaccaggatgaagaccaggatgtag

SEQ ID NO: 164471 - DNA, 1179 bp, synthetic construct
  misc_feature 1..1179: note = Description of Artificial Sequence: Synthetic coding sequence
  source 1..1179: mol_type = other DNA
atggagaaggacaaggtgaagatccacggcatcctgagcaacacccaccggcaggccgcccgggtgaacctgagctttgacttccccttctacggccacttcctgcgggagatcaccgtggccaccggcggcttcatctacaccggggaggtggtgcacaggatgctgacagccacccagtacatcgcccccctgatggccaactttgaccccagcgtgtccaggaacagcacagtgcgctactttgacaatggaacagccctggtggtgcagtgggaccacgtgcacctgcaggacaactacaacctgggcagcttcaccttccaggccaccctgctgatggatggccgcatcatcttcggctacaaggagatccctgtgctggtgacccagatcagcagcaccaaccaccctgtgaaggtgggcctgagtgatgcctttgtggtggtgcaccgcatccagcagatccccaacgtgagaagaaggaccatctatgagtaccaccgggtggagctgcagatgagcaagatcaccaacatctctgctgtggagatgacccccctgcccacctgcctgcagttcaacagatgtggcccctgtgtgagcagccagatcggcttcaactgctcctggtgcagcaagctgcagcgctgcagcagcggctttgacagacaccggcaggactgggtggacagcggctgcccagaggagagcaaggagaagatgtgtgagaacacagagcctgtggagaccagcagcaggaccaccaccaccgtgggcgccaccaccacccagttccgggtgctgaccaccaccaggagagctgtgaccagccagttccccaccagcctgcccacagaagatgacaccaagatcgccctgcacctgaaggacaatggagccagcacagatgacagcgctgctgagaagaagggcggcaccctgcatgctggcctcatcatcggcatcctgatcctggtgctgattgtggccacagccatcctggtgacagtgtacatgtaccaccaccccaccagcgctgccagcatcttcttcattgaaagaagacccagccgctggccagccatgaagttccggcggggcagcggccacccagcctatgcagaggtggagcctgtgggggagaaggagggcttcatcgtgtctgagcagtgctag

SEQ ID NO: 164472 - DNA, 1443 bp, synthetic construct
  misc_feature 1..1443: note = Description of Artificial Sequence: Synthetic coding sequence
  source 1..1443: mol_type = other DNA
atggcccgcttccccaaggctgacctggccgccgccggcgtgatgctgctgtgccacttcttcacagaccagttccagtttgctgatggcaagccaggggaccagatcctggactggcagtatggagtgacccaggccttcccccacacagaggaggaggtggaggtggacagccacgcctacagccaccgctggaagaggaacctggacttcctgaaggctgtggacaccaacagagcctctgtgggccaggacagccctgagcccaggagcttcacagacctgctgctggatgatggccaggacaacaacacccagatcgagcgggtgaacctgagctttgacttccccttctacggccacttcctgcgggagatcaccgtggccaccggcggcttcatctacaccggggaggtggtgcacaggatgctgacagccacccagtacatcgcccccctgatggccaactttgaccccagcgtgtccaggaacagcacagtgcgctactttgacaatggaacagccctggtggtgcagtgggaccacgtgcacctgcaggacaactacaacctgggcagcttcaccttccaggccaccctgctgatggatggccgcatcatcttcggctacaaggagatccctgtgctggtgacccagatcagcagcaccaaccaccctgtgaaggtgggcctgagtgatgcctttgtggtggtgcaccgcatccagcagatccccaacgtgagaagaaggaccatctatgagtaccaccgggtggagctgcagatgagcaagatcaccaacatctctgctgtggagatgacccccctgcccacctgcctgcagttcaacagatgtggcccctgtgtgagcagccagatcggcttcaactgctcctggtgcagcaagctgcagcgctgcagcagcggctttgacagacaccggcaggactgggtggacagcggctgcccagaggagagcaaggagaagatgtgtgagaacacagagcctgtggagaccagcagcaggaccaccaccaccgtgggcgccaccaccacccagttccgggtgctgaccaccaccaggagagctgtgaccagccagttccccaccagcctgcccacagaagatgacaccaagatcgccctgcacctgaaggacaatggagccagcacagatgacagcgctgctgagaagaagggcggcaccctgcatgctggcctcatcatcggcatcctgatcctggtgctgattgtggccacagccatcctggtgacagtgtacatgtaccaccaccccaccagcgctgccagcatcttcttcattgaaagaagacccagccgctggccagccatgaagttccggcggggcagcggccacccagcctatgcagaggtggagcctgtgggggagaaggagggcttcatcgtgtctgagcagtgctag

SEQ ID NO: 164473 - DNA, 1590 bp, synthetic construct
  misc_feature 1..1590: note = Description of Artificial Sequence: Synthetic coding sequence
  source 1..1590: mol_type = other DNA
atggcccgcttccccaaggctgacctggccgccgccggcgtgatgctgctgtgccacttcttcacagaccagttccagtttgctgatggcaagccaggggaccagatcctggactggcagtatggagtgacccaggccttcccccacacagaggaggaggtggaggtggacagccacgcctacagccaccgctggaagaggaacctggacttcctgaaggctgtggacaccaacagagcctctgtgggccaggacagccctgagcccaggagcttcacagacctgctgctggatgatggccaggacaacaacacccagatcgaggaggacacagaccacaactactacatcagccgcatctacggccccagcgacagcgccagccgggacctgtgggtgaacatcgaccagatggagaaggacaaggtgaagatccacggcatcctgagcaacacccaccggcaggccgcccgggtgaacctgagctttgacttccccttctacggccacttcctgcgggagatcaccgtggccactggaggcttcatctacacaggagaggtggtgcacaggatgctgacagccacccagtacatcgcccccctgatggccaactttgaccccagcgtgtccaggaacagcacagtgcgctactttgacaatggaacagccctggtggtgcagtgggaccacgtgcacctgcaggacaactacaacctgggcagcttcaccttccaggccaccctgctgatggatggccgcatcatcttcggctacaaggagatccctgtgctggtgacccagatcagcagcaccaaccaccctgtgaaggtgggcctgagtgatgcctttgtggtggtgcaccgcatccagcagatccccaacgtgagaagaaggaccatctatgagtaccaccgggtggagctgcagatgagcaagatcaccaacatctctgctgtggagatgacccccctgcccacctgcctgcagttcaacagatgtggcccctgtgtgagcagccagatcggcttcaactgctcctggtgcagcaagctgcagcgctgcagcagcggctttgacagacaccggcaggactgggtggacagcggctgcccagaggagagcaaggagaagatgtgtgaaaatacagagcctgtggagaccagcagcaggaccaccaccaccgtgggcgccaccaccacccagttccgggtgctgaccaccacccggcgggctgtgaccagccagttccccaccagcctgcccacagaagatgacaccaagatcgccctgcacctgaaggacaacggggccagcacagatgattctgctgctgagaagaagggcggcaccctgcacgccggcctcatcatcggcatcctgatcctggtgctgattgtggccacagccatcctggtgacagtgtacatgtaccaccaccccaccagcgctgccagcatcttcttcatcgagcggcggcccagccgctggccagccatgaagttcagaagaggcagcggccacccagcctatgcagaggtggagcctgtgggggagaaggagggcttcatcgtgtctgagcagtgctag

SEQ ID NO: 164474 - DNA, 1548 bp, synthetic construct
  misc_feature 1..1548: note = Description of Artificial Sequence: Synthetic coding sequence
  source 1..1548: mol_type = other DNA
atgctgctgtgccacttcttcacagaccagttccagtttgctgatggcaagccaggggaccagatcctggactggcagtatggagtgacccaggccttcccccacacagaggaggaggtggaggtggacagccacgcctacagccaccgctggaagaggaacctggacttcctgaaggctgtggacaccaacagagcctctgtgggccaggacagccctgagcccaggagcttcacagacctgctgctggatgatggccaggacaacaacacccagatcgaggaggacacagaccacaactactacatcagccgcatctacggccccagcgacagcgccagccgggacctgtgggtgaacatcgaccagatggagaaggacaaggtgaagatccacggcatcctgagcaacacccaccggcaggccgcccgggtgaacctgagctttgacttccccttctacggccacttcctgcgggagatcaccgtggccactggaggcttcatctacacaggagaggtggtgcacaggatgctgacagccacccagtacatcgcccccctgatggccaactttgaccccagcgtgtccaggaacagcacagtgcgctactttgacaatggaacagccctggtggtgcagtgggaccacgtgcacctgcaggacaactacaacctgggcagcttcaccttccaggccaccctgctgatggatggccgcatcatcttcggctacaaggagatccctgtgctggtgacccagatcagcagcaccaaccaccctgtgaaggtgggcctgagtgatgcctttgtggtggtgcaccgcatccagcagatccccaacgtgagaagaaggaccatctatgagtaccaccgggtggagctgcagatgagcaagatcaccaacatctctgctgtggagatgacccccctgcccacctgcctgcagttcaacagatgtggcccctgtgtgagcagccagatcggcttcaactgctcctggtgcagcaagctgcagcgctgcagcagcggctttgacagacaccggcaggactgggtggacagcggctgcccagaggagagcaaggagaagatgtgtgaaaatacagagcctgtggagaccagcagcaggaccaccaccaccgtgggcgccaccaccacccagttccgggtgctgaccaccacccggcgggctgtgaccagccagttccccaccagcctgcccacagaagatgacaccaagatcgccctgcacctgaaggacaacggggccagcacagatgattctgctgctgagaagaagggcggcaccctgcacgccggcctcatcatcggcatcctgatcctggtgctgattgtggccacagccatcctggtgacagtgtacatgtaccaccaccccaccagcgctgccagcatcttcttcatcgagcggcggcccagccgctggccagccatgaagttcagaagaggcagcggccacccagcctatgcagaggtggagcctgtgggggagaaggagggcttcatcgtgtctgagcagtgctag

SEQ ID NO: 164475 - DNA, 1581 bp, synthetic construct
  misc_feature 1..1581: note = Description of Artificial Sequence: Synthetic coding sequence
  source 1..1581: mol_type = other DNA
atgagatgtgccctggccctgagcgccctgctgctgctgctgagcaccccacccctgctgcccagcagccccagccccagccccagccccagccagaatgccacccagaccaccacagacagcagcaacaagacagcccccaccccagccagctctgtgaccatcatggccacagacacagcccagcagagcacagtgcccaccagcaaggccaatgagatcctggcctctgtgaaggccaccaccctgggcgtgtccagtgacagccctggcaccaccaccctggcccagcaggtgtctggccctgtgaacaccaccgtggcccggggcggcggcagcggcaaccccaccaccaccatcgagagccccaagagcaccaagtctgctgacaccaccaccgtggccaccagcacagccacagccaagcccaacaccaccagcagccagaatggagctgaggacaccaccaacagcggcggcaagagcagccacagcgtgaccacagacctgaccagcaccaaggccgagcacctgaccaccccccaccccaccagccccctgagcccccggcagcccaccagcacccaccctgtggccacccccaccagcagcggccatgaccacctgatgaagatcagcagcagcagcagcacagtggccatccctggctacaccttcaccagccctggcatgaccaccaccctgcccagcagcgtcatcagccagaggacccagcagaccagcagccagatgcctgccagcagcacagcccccagcagccaggagaccgtgcagcccaccagccctgccacagccctgcggacccccaccctgcctgagaccatgagcagcagccccacagctgccagcaccacccaccgctaccccaagacccccagccccaccgtggcccacgagagcaactgggccaagtgtgaggacctggagacccagacccagagcgagaagcagctggtgctgaacctgaccggcaacaccctgtgtgccggcggggccagtgatgagaagctgatcagcctcatctgcagagctgtgaaggccaccttcaacccagcccaggacaagtgtggcatccggctggcctctgtgcccggcagccagacagtggtggtgaaggagatcaccatccacaccaagctgcctgccaaggatgtgtatgagcggctgaaggacaagtgggatgagctgaaggaggccggcgtgtctgacatgaagctgggggaccagggccccccagaggaggctgaagatcgcttctccatgcccctcatcatcaccatcgtgtgcatggccagcttcctgctgctggtggccgccctgtatggctgctgccaccagaggctgagccagaggaaggaccagcagaggctgacagaggagctgcagacagtggagaatggctaccatgacaaccccaccctggaggtgatggagaccagcagcgagatgcaggagaagaaggtggtgtccctgaatggagagctgggggacagctggatcgtgcccctggacaacctgaccaaggatgacctggatgaggaggaggacacccacctgtag

SEQ ID NO: 164476 - DNA, 1677 bp, synthetic construct
  misc_feature 1..1677: note = Description of Artificial Sequence: Synthetic coding sequence
  source 1..1677: mol_type = other DNA
atgagatgtgccctggccctgagcgccctgctgctgctgctgagcaccccacccctgctgcccagcagccccagccccagccccagccccagccagaatgccacccagaccaccacagacagcagcaacaagacagcccccaccccagccagctctgtgaccatcatggccacagacacagcccagcagagcacagtgcccaccagcaaggccaatgagatcctggcctctgtgaaggccaccaccctgggcgtgtccagtgacagccctggcaccaccaccctggcccagcaggtgtctggccctgtgaacaccaccgtggcccggggcggcggcagcggcaaccccaccaccaccatcgagagccccaagagcaccaagtctgctgacaccaccaccgtggccaccagcacagccacagccaagcccaacaccaccagcagccagaatggagctgaggacaccaccaacagcggcggcaagagcagccacagcgtgaccacagacctgaccagcaccaaggccgagcacctgaccaccccccaccccaccagccccctgagcccccggcagcccaccagcacccaccctgtggccacccccaccagcagcggccatgaccacctgatgaagatcagcagcagcagcagcacagtggccatccctggctacaccttcaccagccctggcatgaccaccaccctgctggagaccgtcttccaccacgtgtcccaggccggcctggagctgctgaccagcggggacctgcccaccctggccagccagagcgctggcatcacagccagcagcgtcatcagccagaggacccagcagaccagcagccagatgcctgccagcagcacagcccccagcagccaggagaccgtgcagcccaccagccctgccacagccctgcggacccccaccctgcctgagaccatgagcagcagccccacagctgccagcaccacccaccgctaccccaagacccccagccccaccgtggcccacgagagcaactgggccaagtgtgaggacctggagacccagacccagagcgagaagcagctggtgctgaacctgaccggcaacaccctgtgtgccggcggggccagtgatgagaagctgatcagcctcatctgcagagctgtgaaggccaccttcaacccagcccaggacaagtgtggcatccggctggcctctgtgcccggcagccagacagtggtggtgaaggagatcaccatccacaccaagctgcctgccaaggatgtgtatgagcggctgaaggacaagtgggatgagctgaaggaggccggcgtgtctgacatgaagctgggggaccagggccccccagaggaggctgaagatcgcttctccatgcccctcatcatcaccatcgtgtgcatggccagcttcctgctgctggtggccgccctgtatggctgctgccaccagaggctgagccagaggaaggaccagcagaggctgacagaggagctgcagacagtggagaatggctaccatgacaaccccaccctggaggtgatggagaccagcagcgagatgcaggagaagaaggtggtgtccctgaatggagagctgggggacagctggatcgtgcccctggacaacctgaccaaggatgacctggatgaggaggaggacacccacctgtag

SEQ ID NO: 164477 - DNA, 1581 bp, synthetic construct
  misc_feature 1..1581: note = Description of Artificial Sequence: Synthetic coding sequence
  source 1..1581: mol_type = other DNA
atgagatgtgccctggccctgagcgccctgctgctgctgctgagcaccccacccctgctgcccagcagccccagccccagccccagccccagccagaatgccacccagaccaccacagacagcagcaacaagacagcccccaccccagccagctctgtgaccatcatggccacagacacagcccagcagagcacagtgcccaccagcaaggccaatgagatcctggcctctgtgaaggccaccaccctgggcgtgtccagtgacagccctggcaccaccaccctggcccagcaggtgtctggccctgtgaacaccaccgtggcccggggcggcggcagcggcaaccccaccaccaccatcgagagccccaagagcaccaagtctgctgacaccaccaccgtggccaccagcacagccacagccaagcccaacaccaccagcagccagaatggagctgaggacaccaccaacagcggcggcaagagcagccacagcgtgaccacagacctgaccagcaccaaggccgagcacctgaccaccccccaccccaccagccccctgagcccccggcagcccaccagcacccaccctgtggccacccccaccagcagcggccatgaccacctgatgaagatcagcagcagcagcagcacagtggccatccctggctacaccttcaccagccctggcatgaccaccaccctgcccagcagcgtcatcagccagaggacccagcagaccagcagccagatgcctgccagcagcacagcccccagcagccaggagaccgtgcagcccaccagccctgccacagccctgcggacccccaccctgcctgagaccatgagcagcagccccacagctgccagcaccacccaccgctaccccaagacccccagccccaccgtggcccacgagagcaactgggtgaccccagctggggtgggcacccagaccagggtggaggaggccctgcggcaggccctgacccacagcctgctgcctgctgggggcgccagtgatgagaagctgatcagcctcatctgcagagctgtgaaggccaccttcaacccagcccaggacaagtgtggcatccggctggcctctgtgcccggcagccagacagtggtggtgaaggagatcaccatccacaccaagctgcctgccaaggatgtgtatgagcggctgaaggacaagtgggatgagctgaaggaggccggcgtgtctgacatgaagctgggggaccagggccccccagaggaggctgaagatcgcttctccatgcccctcatcatcaccatcgtgtgcatggccagcttcctgctgctggtggccgccctgtatggctgctgccaccagaggctgagccagaggaaggaccagcagaggctgacagaggagctgcagacagtggagaatggctaccatgacaaccccaccctggaggtgatggagaccagcagcgagatgcaggagaagaaggtggtgtccctgaatggagagctgggggacagctggatcgtgcccctggacaacctgaccaaggatgacctggatgaggaggaggacacccacctgtag

SEQ ID NO: 164478 - DNA, 1683 bp, synthetic construct
  misc_feature 1..1683: note = Description of Artificial Sequence: Synthetic coding sequence
  source 1..1683: mol_type = other DNA
atgagatgtgccctggccctgagcgccctgctgctgctgctgagcaccccacccctgctgcccagcagccccagccccagccccagccccagccagaatgaaacagccacccagaccaccacagacagcagcaacaagacagcccccaccccagccagctctgtgaccatcatggccacagacacagcccagcagagcacagtgcccaccagcaaggccaatgagatcctggcctctgtgaaggccaccaccctgggcgtgtccagtgacagccctggcaccaccaccctggcccagcaggtgtctggccctgtgaacaccaccgtggcccggggcggcggcagcggcaaccccaccaccaccatcgagagccccaagagcaccaagtctgctgacaccaccaccgtggccaccagcacagccacagccaagcccaacaccaccagcagccagaatggagctgaggacaccaccaacagcggcggcaagagcagccacagcgtgaccacagacctgaccagcaccaaggccgagcacctgaccaccccccaccccaccagccccctgagcccccggcagcccaccagcacccaccctgtggccacccccaccagcagcggccatgaccacctgatgaagatcagcagcagcagcagcacagtggccatccctggctacaccttcaccagccctggcatgaccaccaccctgctggagaccgtcttccaccacgtgtcccaggccggcctggagctgctgaccagcggggacctgcccaccctggccagccagagcgctggcatcacagccagcagcgtcatcagccagaggacccagcagaccagcagccagatgcctgccagcagcacagcccccagcagccaggagaccgtgcagcccaccagccctgccacagccctgcggacccccaccctgcctgagaccatgagcagcagccccacagctgccagcaccacccaccgctaccccaagacccccagccccaccgtggcccacgagagcaactgggccaagtgtgaggacctggagacccagacccagagcgagaagcagctggtgctgaacctgaccggcaacaccctgtgtgccggcggggccagtgatgagaagctgatcagcctcatctgcagagctgtgaaggccaccttcaacccagcccaggacaagtgtggcatccggctggcctctgtgcccggcagccagacagtggtggtgaaggagatcaccatccacaccaagctgcctgccaaggatgtgtatgagcggctgaaggacaagtgggatgagctgaaggaggccggcgtgtctgacatgaagctgggggaccagggccccccagaggaggctgaagatcgcttctccatgcccctcatcatcaccatcgtgtgcatggccagcttcctgctgctggtggccgccctgtatggctgctgccaccagaggctgagccagaggaaggaccagcagaggctgacagaggagctgcagacagtggagaatggctaccatgacaaccccaccctggaggtgatggagaccagcagcgagatgcaggagaagaaggtggtgtccctgaatggagagctgggggacagctggatcgtgcccctggacaacctgaccaaggatgacctggatgaggaggaggacacccacctgtag

SEQ ID NO: 164479 - DNA, 1551 bp, synthetic construct
  misc_feature 1..1551: note = Description of Artificial Sequence: Synthetic coding sequence
  source 1..1551: mol_type = other DNA
atgagatgtgccctggccctgagcgccctgctgctgctgctgagcaccagccccagccccagccagaatgccacccagaccaccacagacagcagcaacaagacagcccccaccccagccagctctgtgaccatcatggccacagacacagcccagcagagcacagtgcccaccagcaaggccaatgagatcctggcctctgtgaaggccaccaccctgggcgtgtccagtgacagccctggcaccaccaccctggcccagcaggtgtctggccctgtgaacaccaccgtggcccggggcggcggcagcggcaaccccaccaccaccatcgagagccccaagagcaccaagtctgctgacaccaccaccgtggccaccagcacagccacagccaagcccaacaccaccagcagccagaatggagctgaggacaccaccaacagcggcggcaagagcagccacagcgtgaccacagacctgaccagcaccaaggccgagcacctgaccaccccccaccccaccagccccctgagcccccggcagcccaccagcacccaccctgtggccacccccaccagcagcggccatgaccacctgatgaagatcagcagcagcagcagcacagtggccatccctggctacaccttcaccagccctggcatgaccaccaccctgcccagcagcgtcatcagccagaggacccagcagaccagcagccagatgcctgccagcagcacagcccccagcagccaggagaccgtgcagcccaccagccctgccacagccctgcggacccccaccctgcctgagaccatgagcagcagccccacagctgccagcaccacccaccgctaccccaagacccccagccccaccgtggcccacgagagcaactgggccaagtgtgaggacctggagacccagacccagagcgagaagcagctggtgctgaacctgaccggcaacaccctgtgtgccggcggggccagtgatgagaagctgatcagcctcatctgcagagctgtgaaggccaccttcaacccagcccaggacaagtgtggcatccggctggcctctgtgcccggcagccagacagtggtggtgaaggagatcaccatccacaccaagctgcctgccaaggatgtgtatgagcggctgaaggacaagtgggatgagctgaaggaggccggcgtgtctgacatgaagctgggggaccagggccccccagaggaggctgaagatcgcttctccatgcccctcatcatcaccatcgtgtgcatggccagcttcctgctgctggtggccgccctgtatggctgctgccaccagaggctgagccagaggaaggaccagcagaggctgacagaggagctgcagacagtggagaatggctaccatgacaaccccaccctggaggtgatggagaccagcagcgagatgcaggagaagaaggtggtgtccctgaatggagagctgggggacagctggatcgtgcccctggacaacctgaccaaggatgacctggatgaggaggaggacacccacctgtag

SEQ ID NO: 164480 - DNA, 1986 bp, synthetic construct
  misc_feature 1..1986: note = Description of Artificial Sequence: Synthetic coding sequence
  source 1..1986: mol_type = other DNA
atggagggcgcccgggcccggggggcccagctgcggctgggggagcgggtgcggcctgtgggccgccgcagcgcccctggccgcagccgcttccggcagccctggaggcctggggccagtgacagcgcccccccagctggcaccatggcccagagccgggtgctgctgctgctgctgctgctgcccccccagctgcacctgggccctgtgctggccgtgcgggcccctggcttcggccgcagcggcggccacagcctgagccctgaggagaatgaatttgctgaggaggagcctgtgctggtgctgagccctgaggagcccggccctggccctgctgctgtgtcctgcccccgggactgtgcctgcagccaggagggcgtggtggactgtggcggcatcgacctgcgggagttccctggggacctgcctgagcacaccaaccacctgagcctgcagaacaaccagctggagaagatctacccagaggagctgagccggctgcaccggctggagaccctgaacctgcagaacaaccggctgaccagccggggcctgcctgagaaggcctttgagcacctgaccaacctgaactacctgtacctggccaacaacaagctgaccctggccccccgcttcctgcccaatgccctgatctctgtggactttgctgccaactacctgaccaagatctacggcctgaccttcggccagaagcccaacctgcggtctgtgtacctgcacaacaacaagctggctgatgctggcctgcctgacaacatgttcaacggcagcagcaatgtggaggtgctgatcctgagcagcaacttcctgcggcacgtgcccaagcacctgcccccagccctgtacaagctgcacctgaagaacaacaagctggagaagatccccccaggggccttcagcgagctgagcagcctgcgggagctgtacctgcagaacaactacctgacagatgagggcctggacaatgagaccttctggaagctgagcagcctggagtacctggacctgagcagcaacaacctgagccgggtgcctgctggcctgcccaggagcctggtgctgctgcacctggagaagaatgccatccgctctgtggatgccaacgtgctgacccccatccgcagcctggagtacctgctgctgcacagcaaccagctgcgggagcagggcatccaccccctggccttccagggcctgaagaggctgcacacagtgcacctgtacaacaatgccctggagcgggtgcccagcggcctgccccggcgggtgaggaccctgatgatcctgcacaaccagatcactggaattggccgggaggactttgccaccacctacttcctggaggagctgaacctgagctacaaccgcatcaccagcccccaggtgcacagagatgccttcaggaagctgcggctgctgcggagcctggacctgagcggcaaccggctgcacaccctgcccccaggcctgcccagaaatgtgcacgtgctgaaggtgaagagaaatgagctggccgccctggcccggggggccctggtgggcatggcccagctgcgggagctgtacctgaccagcaaccggctgcggagccgggccctgggcccccgggcctgggtggacctggcccacctgcagctgctggacattgctggcaaccagctgacagagatccctgagggcctgcctgagagcctggagtacctgtacctgcagaacaacaagatctctgctgtgcctgccaatgcctttgacagcacccccaacctgaagggcatcttcctgcgcttcaacaagctggccgtgggctctgtggtggacagcgccttccggcggctgaagcacctgcaggtgctggacatcgagggcaacctggagtttggagacatcagcaaggaccggggccgcctgggcaaggagaaggaggaggaggaggaggaggaggaggaggaggaggagaccaggtag

SEQ ID NO: 164481 - DNA, 1929 bp, synthetic construct
  misc_feature 1..1929: note = Description of Artificial Sequence: Synthetic coding sequence
  source 1..1929: mol_type = other DNA
atggagggggaggaggccgagcagcctgcctggttccggcagccctggaggcctggggccagtgacagcgcccctcctgctggcaccatggcccagagccgggtgctgctgctgctgctgctgctgcccccccagctgcacctgggccctgtgctggccgtgcgggcccctggcttcggccgcagcggcggccacagcctgagcccagaagaaaatgaatttgctgaggaggagcctgtgctggtgctgagccctgaggagcccggccctggccctgctgctgtgtcctgcccccgggactgtgcctgcagccaggagggcgtggtggactgtggcggcatcgacctgcgggagttccctggggacctgcctgagcacaccaaccacctgagcctgcagaacaaccagctggagaagatctacccagaggagctgagccggctgcaccggctggagaccctgaacctgcagaacaaccggctgaccagccggggcctgcctgagaaggcctttgagcacctgaccaacctgaactacctgtacctggccaacaacaagctgaccctggccccccgcttcctgcccaatgccctgatctctgtggactttgctgccaactacctgaccaagatctacggcctgaccttcggccagaagcccaacctgcggtctgtgtacctgcacaacaacaagctggctgatgctggcctgcctgacaacatgtttaatggcagcagcaatgtggaggtgctgatcctgagcagcaacttcctgcggcacgtgcccaagcacctgcccccagccctgtacaagctgcacctgaagaacaacaagctggagaagatccccccaggggccttcagcgagctgagcagcctgcgggagctgtacctgcagaacaactacctgacagatgagggcctggacaatgagaccttctggaagctgagcagcctggagtacctggacctgagcagcaacaacctgagccgggtgcctgctggcctgcccaggagcctggtgctgctgcacctggagaagaatgccatccgctctgtggatgccaacgtgctgacccccatccgcagcctggagtacctgctgctgcacagcaaccagctgcgggagcagggcatccaccccctggccttccagggcctgaagaggctgcacacagtgcacctgtacaacaatgccctggagcgggtgcccagcggcctgcccaggagagtgaggaccctgatgatcctgcacaaccagatcaccggcatcggcagagaagattttgccaccacctacttcctggaggagctgaacctgagctacaaccgcatcaccagcccccaggtgcacagagatgccttcaggaagctgcggctgctgcggagcctggacctgagcggcaaccggctgcacaccctgcccccaggcctgcccagaaatgtgcacgtgctgaaggtgaagagaaatgagctggccgccctggcccggggggccctggtgggcatggcccagctgcgggagctgtacctgaccagcaaccggctgcggagccgggccctgggcccccgggcctgggtggacctggcccacctgcagctgctggacattgctggcaaccagctgacagagatccctgagggcctgcctgagagcctggagtacctgtacctgcagaacaacaagatctctgctgtgcctgccaatgcctttgacagcacccccaacctgaagggcatcttcctgcgcttcaacaagctggccgtgggctctgtggtggacagcgccttccggcggctgaagcacctgcaggtgctggacatcgagggcaacctggagtttggagacatcagcaaggaccggggccgcctgggcaaggagaaggaggaggaggaggaggaggaggaggaggaggaggagaccaggtag

SEQ ID NO: 164482 - DNA, 1560 bp, synthetic construct
  misc_feature 1..1560: note = Description of Artificial Sequence: Synthetic coding sequence
  source 1..1560: mol_type = other DNA
atggagggcgcccgggcccggggggcccagctgcggctgggggagcgggtgcggcctgtgggccgccgcagcgcccctggccgcagccgcttccggcagccctggaggcctggggccagtgacagcgcccccccagctggcaccatggcccagagccgggtgctgctgctgctgctgctgctgcccccccagctgcacctgggccctgtgctggccgtgcgggcccctggcttcggccgcagcggcggccacagcctgagccctgaggagaatgaatttgctgaggaggagcctgtgctggtgctgagccctgaggagcccggccctggccctgctgctgtgtcctgcccccgggactgtgcctgcagccaggagggcgtggtggactgtggcggcatcgacctgcgggagttccctggggacctgcctgagcacaccaaccacctgagcctgcagaacaacaagctggagaagatccccccaggggccttcagcgagctgagcagcctgcgggagctgtacctgcagaacaactacctgacagatgagggcctggacaatgagaccttctggaagctgagcagcctggagtacctggacctgagcagcaacaacctgagccgggtgcctgctggcctgcccaggagcctggtgctgctgcacctggagaagaatgccatccgctctgtggatgccaacgtgctgacccccatccgcagcctggagtacctgctgctgcacagcaaccagctgcgggagcagggcatccaccccctggccttccagggcctgaagaggctgcacacagtgcacctgtacaacaatgccctggagcgggtgcccagcggcctgccccggcgggtgaggaccctgatgatcctgcacaaccagatcactggaattggccgggaggactttgccaccacctacttcctggaggagctgaacctgagctacaaccgcatcaccagcccccaggtgcacagagatgccttcaggaagctgcggctgctgcggagcctggacctgagcggcaaccggctgcacaccctgcccccaggcctgcccagaaatgtgcacgtgctgaaggtgaagagaaatgagctggccgccctggcccggggggccctggtgggcatggcccagctgcgggagctgtacctgaccagcaaccggctgcggagccgggccctgggcccccgggcctgggtggacctggcccacctgcagctgctggacattgctggcaaccagctgacagagatccctgagggcctgcctgagagcctggagtacctgtacctgcagaacaacaagatctctgctgtgcctgccaatgcctttgacagcacccccaacctgaagggcatcttcctgcgcttcaacaagctggccgtgggctctgtggtggacagcgccttccggcggctgaagcacctgcaggtgctggacatcgagggcaacctggagtttggagacatcagcaaggaccggggccgcctgggcaaggagaaggaggaggaggaggaggaggaggaggaggaggaggagaccaggtag

SEQ ID NO: 164483 - DNA, 1095 bp, synthetic construct
  misc_feature 1..1095: note = Description of Artificial Sequence: Synthetic coding sequence
  source 1..1095: mol_type = other DNA
atggcccgggccatggctgctgcctggcccctgctgctggtggccctgctggtgctgtcctggcccccacctggcactggagatgtggtggtgcaggcccccacccaggtgcccggcttcctgggggacagcgtgaccctgccctgctacctgcaggtgcccaacatggaggtgacccacgtgtcccagctgacctgggcccggcatggagagagcggctccatggctgtgttccaccagacccagggccccagctacagcgagagcaagaggctggagtttgtggccgcccggctgggcgctgagctgagaaatgccagcctgaggatgtttggcctgcgggtggaggatgagggcaactacacctgcctgtttgtgaccttcccccagggcagccgctctgtggacatctggctgcgggtgctggccaagccccagaacacagctgaggtgcagaaggtgcagctgactggagagcctgtgcccatggcccgctgtgtgtccactggaggccggcccccagcccagatcacctggcacagcgacctgggcggcatgcccaacaccagccaggtgcccggcttcctgtctggaacagtgacagtgaccagcctgtggatcctggtgcccagcagccaggtggatggcaagaatgtgacctgcaaggtggagcacgagagctttgagaagccccagctgctgactgtgaacctgactgtgtactacccacctgaggtgtccatcagcggctatgacaacaactggtacctgggccagaatgaggccaccctgacctgtgatgcccggagcaaccctgagcccaccggctacaactggagcaccaccatgggccccctgcccccatttgctgtggcccagggcgcccagctgctgatccggcctgtggacaagcccatcaacaccaccctcatctgcaatgtgaccaatgccctgggcgcccggcaggccgagctgactgtgcaggtgaagggcacagagcacgccagcgccagcgccaacggccacgtgtcctacagcgctgtgtcccgggagaacagcagcagccaggacccccagacagagggcaccaggtag

SEQ ID NO: 164484 - DNA, 1119 bp, synthetic construct
  misc_feature 1..1119: note = Description of Artificial Sequence: Synthetic coding sequence
  source 1..1119: mol_type = other DNA
atggcccgggccatggctgctgcctggcccctgctgctggtggccctgctggtgctgtcctggcccccacctggcactggagatgtggtggtgcaggcccccacccaggtgcccggcttcctgggggacagcgtgaccctgccctgctacctgcaggtgcccaacatggaggtgacccacgtgtcccagctgacctgggcccggcatggagagagcggctccatggctgtgttccaccagacccagggccccagctacagcgagagcaagaggctggagtttgtggccgcccggctgggcgctgagctgagaaatgccagcctgaggatgtttggcctgcgggtggaggatgagggcaactacacctgcctgtttgtgaccttcccccagggcagccgctctgtggacatctggctgcgggtgctggccaagccccagaacacagctgaggtgcagaaggtgcagctgactggagagcctgtgcccatggcccgctgtgtgtccactggaggccggcccccagcccagatcacctggcacagcgacctgggcggcatgcccaacaccagccaggtgcccggcttcctgtctggaacagtgacagtgaccagcctgtggatcctggtgcccagcagccaggtggatggcaagaatgtgacctgcaaggtggagcacgagagctttgagaagccccagctgctgactgtgaacctgactgtgtactacccacctgaggtgtccatcagcggctatgacaacaactggtacctgggccagaatgaggccaccctgacctgtgatgcccggagcaaccctgagcccaccggctacaactggagcaccaccatgggccccctgcccccatttgctgtggcccagggcgcccagctgctgatccggcctgtggacaagcccatcaacaccaccctcatctgcaatgtgaccaatgccctgggcgcccggcaggccgagctgactgtgcaggtgaaggagggccccccatctgagcacagcggcacagagcacgccagcgccagcgccaacggccacgtgtcctacagcgctgtgtcccgggagaacagcagcagccaggacccccagacagagggcaccaggtag

SEQ ID NO: 164485 - DNA, 1179 bp, synthetic construct
  misc_feature 1..1179: note = Description of Artificial Sequence: Synthetic coding sequence
  source 1..1179: mol_type = other DNA
atggcccgggccatggctgctgcctggcccctgctgctggtggccctgctggtgctgtcctggcccccacctggcactggagatgtggtggtgcaggcccccacccaggtgcccggcttcctgggggacagcgtgaccctgccctgctacctgcaggtgcccaacatggaggtgacccacgtgtcccagctgacctgggcccggcatggagagagcggctccatggctgtgttccaccagacccagggccccagctacagcgagagcaagaggctggagtttgtggccgcccggctgggcgctgagctgagaaatgccagcctgaggatgtttggcctgcgggtggaggatgagggcaactacacctgcctgtttgtgaccttcccccagggcagccgctctgtggacatctggctgcgggtgctggccaagccccagaacacagctgaggtgcagaaggtgcagctgactggagagcctgtgcccatggcccgctgtgtgtccactggaggccggcccccagcccagatcacctggcacagcgacctgggcggcatgcccaacaccagccaggtgcccggcttcctgtctggaacagtgacagtgaccagcctgtggatcctggtgcccagcagccaggtggatggcaagaatgtgacctgcaaggtggagcacgagagctttgagaagccccagctgctgactgtgaacctgactgtgtactacccacctgaggtgtccatcagcggctatgacaacaactggtacctgggccagaatgaggccaccctgacctgtgatgcccggagcaaccctgagcccaccggctacaactggagcaccaccatgggccccctgcccccatttgctgtggcccagggcgcccagctgctgatccggcctgtggacaagcccatcaacaccaccctcatctgcaatgtgaccaatgccctgggcgcccggcaggccgagctgactgtgcaggtgaaggagggccccccatctgagcacagcggcatcagcagaaatgccatcatcttcctggtgctgggcatcctggtgttcctgatcctgctgggcatcggcatctacttctactggagcaagtgcagccgggaggtgctgtggcactgccacctgtgccccagcagcgagcaccaccagagctgcagaaattag

SEQ ID NO: 164486 - DNA, 1254 bp, synthetic construct
  misc_feature 1..1254: note = Description of Artificial Sequence: Synthetic coding sequence
  source 1..1254: mol_type = other DNA
atggcccgggccatggctgctgcctggcccctgctgctggtggccctgctggtgctgtcctggcccccacctggcactggagatgtggtggtgcaggcccccacccaggtgcccggcttcctgggggacagcgtgaccctgccctgctacctgcaggtgcccaacatggaggtgacccacgtgtcccagctgacctgggcccggcatggagagagcggctccatggctgtgttccaccagacccagggccccagctacagcgagagcaagaggctggagtttgtggccgcccggctgggcgctgagctgagaaatgccagcctgaggatgtttggcctgcgggtggaggatgagggcaactacacctgcctgtttgtgaccttcccccagggcagccgctctgtggacatctggctgcgggtgctggccaagccccagaacacagctgaggtgcagaaggtgcagctgactggagagcctgtgcccatggcccgctgtgtgtccactggaggccggcccccagcccagatcacctggcacagcgacctgggcggcatgcccaacaccagccaggtgcccggcttcctgtctggaacagtgacagtgaccagcctgtggatcctggtgcccagcagccaggtggatggcaagaatgtgacctgcaaggtggagcacgagagctttgagaagccccagctgctgactgtgaacctgactgtgtactacccacctgaggtgtccatcagcggctatgacaacaactggtacctgggccagaatgaggccaccctgacctgtgatgcccggagcaaccctgagcccaccggctacaactggagcaccaccatgggccccctgcccccatttgctgtggcccagggcgcccagctgctgatccggcctgtggacaagcccatcaacaccaccctcatctgcaatgtgaccaatgccctgggcgcccggcaggccgagctgactgtgcaggtgaaggagggccccccatctgagcacagcggcatcagcagaaatgccatcatcttcctggtgctgggcatcctggtgttcctgatcctgctgggcatcggcatctacttctactggagcaagtgcagccgggaggtgctgtggcactgccacctgtgccccagcagcacagaacatgccagcgccagcgccaatggacatgtgtcctacagcgctgtgtcccgggagaacagcagcagccaggacccccagacagagggcaccaggtag

SEQ ID NO: 164487 - DNA, 1554 bp, synthetic construct
  misc_feature 1..1554: note = Description of Artificial Sequence: Synthetic coding sequence
  source 1..1554: mol_type = other DNA
atggccaggatgggcctggccggggccgccggccgctggtggggcctggccctgggcctgacagccttcttcctgcccggggtgcacagccaggtggtgcaggtgaatgacagcatgtatggcttcatcggcacagatgtggtgctgcactgcagctttgccaaccccctgcccagcgtgaagatcacccaggtgacctggcagaagagcaccaacggcagcaagcagaatgtggccatctacaaccccagcatgggcgtgtctgtgctggccccctaccgggagcgggtggagttcctgcggcccagcttcacagatggcaccatccggctgagccggctggagctggaggatgagggcgtgtacatctgtgaatttgccaccttccccactggaaaccgggagagccagctgaacctgactgtgatggccaagcccaccaactggattgagggcacccaggccgtgctgcgggccaagaagggccaggatgacaaggtgctggtggccacctgcaccagcgccaacgggaagcccccatctgtggtgtcctgggagacccggctgaagggggaggccgagtaccaggagatccggaaccccaacggcaccgtgaccgtcatcagccgctaccgcctggtgcccagccgggaggcccaccagcagagcctggcctgcatcgtgaactaccacatggaccgcttcaaggagagcctgaccctgaatgtgcagtatgagcctgaggtgaccatcgagggctttgatggcaactggtacctgcagaggatggatgtgaagctgacctgcaaggcagatgccaaccccccagccacagagtaccactggaccaccctgaatggcagcctgcccaagggcgtggaggcccagaacagaaccctcttcttcaagggccccatcaactacagcctggccggcacctacatctgtgaggccaccaaccccatcggcaccaggagcggccaggtggaggtgaacatcacagagttcccctacacccccagccccccagagcacggcagaagagctggccctgtgcccacagccatcattggaggagtggccggcagcatcctgctggtgctgattgtggtgggcggcatcgtggtggccctgcggaggagaagacacaccttcaagggggactacagcaccaagaagcacgtgtatggaaatggctacagcaaggccggcatcccccagcaccacccccccatggcccagaacctgcagtacccagatgacagtgatgatgagaagaaggccggccccctgggcggcagcagctatgaggaggaggaggaggaggaggagggcggcggcggcggggagaggaaggtgggcggcccccaccccaagtatgatgaagatgccaagaggccctacttcaccgtggatgaggccgaggcccggcaggacggctatggagacaggaccctgggctaccagtatgaccctgagcagctggacctggccgagaacatggtgtcccagaatgatggcagcttcatcagcaagaaggagtggtacgtgtag

SEQ ID NO: 164488 - DNA, 1059 bp, synthetic construct
  misc_feature 1..1059: note = Description of Artificial Sequence: Synthetic coding sequence
  source 1..1059: mol_type = other DNA
atggccaggatgggcctggccggggccgccggccgctggtggggcctggccctgggcctgacagccttcttcctgcccggggtgcacagccaggtggtgcaggtgaatgacagcatgtatggcttcatcggcacagatgtggtgctgcactgcagctttgccaaccccctgcccagcgtgaagatcacccaggtgacctggcagaagagcaccaacggcagcaagcagaatgtggccatctacaaccccagcatgggcgtgtctgtgctggccccctaccgggagcgggtggagttcctgcggcccagcttcacagatggcaccatccggctgagccggctggagctggaggatgagggcgtgtacatctgtgaatttgccaccttccccactggaaaccgggagagccagctgaacctgactgtgatggccaagcccaccaactggattgagggcacccaggccgtgctgcgggccaagaagggccaggatgacaaggtgctggtggccacctgcaccagcgccaacgggaagcccccatctgtggtgtcctgggagacccggctgaagggggaggccgagtaccaggagatccggaaccccaacggcaccgtgaccgtcatcagccgctaccgcctggtgcccagccgggaggcccaccagcagagcctggcctgcatcgtgaactaccacatggaccgcttcaaggagagcctgaccctgaatgtgcagtatgagcctgaggtgaccatcgagggctttgatggcaactggtacctgcagaggatggatgtgaagctgacctgcaaggcagatgccaaccccccagccacagagtaccactggaccaccctgaatggcagcctgcccaagggcgtggaggcccagaacagaaccctcttcttcaagggccccatcaactacagcctggccggcacctacatctgtgaggccaccaaccccatcggcaccaggagcggccaggtggaggtgaacatcacagccttctgccagctgatctacccaggcaagggccgcacccgggccaggatgttttag

SEQ ID NO: 164489 - DNA, 1377 bp, synthetic construct
  misc_feature 1..1377: note = Description of Artificial Sequence: Synthetic coding sequence
  source 1..1377: mol_type = other DNA
atggccaggatgggcctggccggggccgccggccgctggtggggcctggccctgggcctgacagccttcttcctgcccggggtgcacagccaggtggtgcaggtgaatgacagcatgtatggcttcatcggcacagatgtggtgctgcactgcagctttgccaaccccctgcccagcgtgaagatcacccaggtgacctggcagaagagcaccaacggcagcaagcagaatgtggccatctacaaccccagcatgggcgtgtctgtgctggccccctaccgggagcgggtggagttcctgcggcccagcttcacagatggcaccatccggctgagccggctggagctggaggatgagggcgtgtacatctgtgaatttgccaccttccccactggaaaccgggagagccagctgaacctgactgtgatggccaagcccaccaactggattgagggcacccaggccgtgctgcgggccaagaagggccaggatgacaaggtgctggtggccacctgcaccagcgccaacgggaagcccccatctgtggtgtcctgggagacccggctgaagggggaggccgagtaccaggagatccggaaccccaacggcaccgtgaccgtcatcagccgctaccgcctggtgcccagccgggaggcccaccagcagagcctggcctgcatcgtgaactaccacatggaccgcttcaaggagagcctgaccctgaatgtgcagtatgagcctgaggtgaccatcgagggctttgatggcaactggtacctgcagaggatggatgtgaagctgacctgcaaggcagatgccaaccccccagccacagagtaccactggaccaccctgaatggcagcctgcccaagggcgtggaggcccagaacagaaccctcttcttcaagggccccatcaactacagcctggccggcacctacatctgtgaggccaccaaccccatcggcaccaggagcggccaggtggaggtgaacatcacagagaagccccggccccagaggggcctgggcagcgctgcccggctgctggccggcaccgtggccgtgttcctgatcctggtggccgtgctgactgtgttcttcctgtacaaccggcagcagaagagccccccagagacagatggagctggaacagaccagcccctgagccagaagccagagcccagccccagccggcagagcagcctggtgcctgaggacatccaggtggtgcacctggaccccggccggcagcagcagcaggaggaggaggacctgcagaagctgagcctgcagcccccctactatgacctgggcgtgagccccagctaccaccccagcgtgaggaccacagagcccagaggagagtgcccctag

SEQ ID NO: 164490 - DNA, 1617 bp, synthetic construct
  misc_feature 1..1617: note = Description of Artificial Sequence: Synthetic coding sequence
  source 1..1617: mol_type = other DNA
atggcccgggctgctgccctgctgcccagccgcagcccccccacccccctgctgtggcccctgctgctgctgctgctgctggagactggagcccaggatgtgcgggtgcaggtgctgcctgaggtgcggggccagctgggcggcaccgtggagctgccctgccacctgctgccccctgtgcccggcctgtacatcagcctggtgacctggcagaggccagatgccccagccaaccaccagaatgtggccgccttccaccccaagatgggccccagcttccccagccccaagccaggcagcgagcggctgagctttgtgtctgccaagcagagcacaggccaggacacagaggccgagctgcaggatgccaccctggccctgcacggcctgactgtggaggatgagggcaactacacctgtgaatttgccaccttccccaagggctctgtgcggggcatgacctggctgcgggtgattgccaagcccaagaaccaggccgaggcccagaaggtgaccttcagccaggaccccaccaccgtggccctgtgcatcagcaaggagggccggcccccagcccgcatctcctggctgagcagcctggactgggaggccaaggagacccaggtgtctggcaccctggccggcaccgtgacagtgaccagccgcttcaccctggtgcccagcggccgggcagatggagtgacagtgacctgcaaggtggagcacgagagctttgaggagcccgccctgatccctgtgaccctgtctgtgcgctacccacctgaggtgtccatcagcggctatgatgacaactggtacctgggccgcacagatgccaccctgagctgtgatgtgcgcagcaaccctgagcccaccggctatgactggagcaccaccagcggcaccttccccaccagcgctgtggcccagggcagccagctggtgattcatgctgtggacagcctcttcaacaccacctttgtgtgcaccgtgaccaatgctgtgggcatgggccgggcagagcaggtgatctttgtgcgggagacccccaacacagctggagctggggccaccggcggcatcatcggcggcatcatcgccgccatcatcgccacagctgtggccgccaccggcatcctgatctgccggcagcagaggaaggagcagaccctgcagggcgctgaggaggatgaggacctggagggccccccatcctacaagccacccacccccaaggccaagctggaggcccaggagatgcccagccagctgttcaccctgggcgccagcgagcacagccccctgaagaccccctactttgatgctggggccagctgcacagagcaggagatgccccgctaccacgagctgcccaccctggaggagaggagcggccccctgcaccctggggccaccagcctgggcagccccatccctgtgcccccaggccccccagctgtggaggatgtgtccctggacctggaggatgaggagggggaggaggaggaggagtacctggacaagatcaaccccatctatgatgccctgagctacagcagccccagcgacagctaccagggcaagggctttgtgatgagccgggccatgtatgtgtag

SEQ ID NO: 164491 - DNA, 1440 bp, synthetic construct
  misc_feature 1..1440: note = Description of Artificial Sequence: Synthetic coding sequence
  source 1..1440: mol_type = other DNA
atggcccgggctgctgccctgctgcccagccgcagcccccccacccccctgctgtggcccctgctgctgctgctgctgctggagactggagcccaggatgtgcgggtgcaggtgctgcctgaggtgcggggccagctgggcggcaccgtggagctgccctgccacctgctgccccctgtgcccggcctgtacatcagcctggtgacctggcagaggccagatgccccagccaaccaccagaatgtggccgccttccaccccaagatgggccccagcttccccagccccaagccaggcagcgagcggctgagctttgtgtctgccaagcagagcacaggccaggacacagaggccgagctgcaggatgccaccctggccctgcacggcctgactgtggaggatgagggcaactacacctgtgaatttgccaccttccccaagggctctgtgcggggcatgacctggctgcgggtgattgccaagcccaagaaccaggccgaggcccagaaggtgaccttcagccaggaccccaccaccgtggccctgtgcatcagcaaggagggccggcccccagcccgcatctcctggctgagcagcctggactgggaggccaaggagacccaggtgtctggcaccctggccggcaccgtgacagtgaccagccgcttcaccctggtgcccagcggccgggcagatggagtgacagtgacctgcaaggtggagcacgagagctttgaggagcccgccctgatccctgtgaccctgtctgtgcgctacccacctgaggtgtccatcagcggctatgatgacaactggtacctgggccgcacagatgccaccctgagctgtgatgtgcgcagcaaccctgagcccaccggctatgactggagcaccaccagcggcaccttccccaccagcgctgtggcccagggcagccagctggtgattcatgctgtggacagcctcttcaacaccacctttgtgtgcaccgtgaccaatgctgtgggcatgggccgggcagagcaggtgatctttgtgcgggagaccccccgggccagccccagagatgtgggccccctggtgtggggcgctgtgggcggcaccctgctggtgctgctgctgctggccggcggcagcctggccttcatcctgctgcgggtgagaagaagaaggaagagccctgggggcgccggcggcggggccagcggagatggcggcttctatgaccccaaggcccaggtgctgggcaatggagaccccgtcttctggacccctgtggtgcccggccccatggagccagatggcaaggatgaggaggaggaggaggaggaggagaaggccgagaagggcctgatgctgcccccacctccagccctggaggatgacatggagagccagctggatggcagcctcatcagccggcgggctgtgtatgtgtag

SEQ ID NO: 164492 - DNA, 1101 bp, synthetic construct
  misc_feature 1..1101: note = Description of Artificial Sequence: Synthetic coding sequence
  source 1..1101: mol_type = other DNA
atggcccggaccctgcggcccagccccctgtgccctgggggcggcaaggcccagctgagcagcgccagcctgctgggcgccggcctgctgctgcagccccccaccccaccacccctgctgctgctgctcttccccctgctgctcttcagccggctgtgtggggccctggccggccccatcatcgtggagccccacgtgacagctgtgtggggcaagaatgtgtccctgaagtgcctgattgaggtgaatgagaccatcacccagatctcctgggagaagatccacggcaagagcagccagacagtggccgtgcaccacccccagtatggcttctctgtgcagggcgagtaccagggccgggtgctcttcaagaactacagcctgaatgatgccaccatcaccctgcacaacatcggcttcagtgacagcggcaagtacatctgcaaggctgtgaccttccccctgggcaatgcccagagcagcaccaccgtgacagtgctggtggagcccaccgtgtccctcatcaagggccctgacagcctgattgatggcggcaatgagaccgtggccgccatctgcatcgccgccaccgggaagcctgtggcccacatcgactgggagggggacctgggggagatggagagcaccaccaccagcttccccaatgaaacagccaccatcatcagccagtacaagctgttccccaccaggtttgcccggggccgccgcatcacctgtgtggtgaagcacccagccctggagaaggacatccgctacagcttcatcctggacatccagtatgcccctgaggtgtctgtgacaggctatgatggcaactggtttgtgggcaggaaaggagtgaacctgaagtgcaatgctgatgccaaccccccacccttcaagtctgtgtggagccggctggatggccagtggccagatggcctgctggccagtgacaacaccctgcactttgtgcaccccctgaccttcaactacagcggcgtgtacatctgcaaggtgaccaacagcctgggccagaggagtgaccagaaggtgatctacatcagcgcctacaacagcgtggccagcctgaactgctag

SEQ ID NO: 164493 - DNA, 1650 bp, synthetic construct
  misc_feature 1..1650: note = Description of Artificial Sequence: Synthetic coding sequence
  source 1..1650: mol_type = other DNA
atggcccggaccctgcggcccagccccctgtgccctgggggcggcaaggcccagctgagcagcgccagcctgctgggcgccggcctgctgctgcagccccccaccccaccacccctgctgctgctgctcttccccctgctgctcttcagccggctgtgtggggccctggccggccccatcatcgtggagccccacgtgacagctgtgtggggcaagaatgtgtccctgaagtgcctgattgaggtgaatgagaccatcacccagatctcctgggagaagatccacggcaagagcagccagacagtggccgtgcaccacccccagtatggcttctctgtgcagggcgagtaccagggccgggtgctcttcaagaactacagcctgaatgatgccaccatcaccctgcacaacatcggcttcagtgacagcggcaagtacatctgcaaggctgtgaccttccccctgggcaatgcccagagcagcaccaccgtgacagtgctggtggagcccaccgtgtccctcatcaagggccctgacagcctgattgatggcggcaatgagaccgtggccgccatctgcatcgccgccaccgggaagcctgtggcccacatcgactgggagggggacctgggggagatggagagcaccaccaccagcttccccaatgaaacagccaccatcatcagccagtacaagctgttccccaccaggtttgcccggggccgccgcatcacctgtgtggtgaagcacccagccctggagaaggacatccgctacagcttcatcctggacatccagtatgcccctgaggtgtctgtgacaggctatgatggcaactggtttgtgggcaggaaaggagtgaacctgaagtgcaatgctgatgccaaccccccacccttcaagtctgtgtggagccggctggatggccagtggccagatggcctgctggccagtgacaacaccctgcactttgtgcaccccctgaccttcaactacagcggcgtgtacatctgcaaggtgaccaacagcctgggccagaggagtgaccagaaggtgatctacatcagtgacccccccaccaccaccaccctgcagcccaccatccagtggcaccccagcacagctgacatcgaggacctggccacagagcccaagaagctgcccttccccctgagcaccctggccaccatcaaggatgacaccatcgccaccatcatcgcctctgtggtgggcggggccctcttcatcgtgctggtgtctgtgctggccggcatcttctgctacagaagaagaaggaccttccggggggactactttgccaagaactacatccccccaagtgacatgcagaaggagagccagattgatgtgctgcagcaggatgagctggacagctacccagattctgtgaagaaggagaacaagaaccctgtgaacaacctgatcaggaaggactacctggaggagcctgagaagacccagtggaacaacgtggagaacctgaacagatttgagcggcccatggactactatgaggacctgaagatgggcatgaagtttgtgtctgatgagcactatgatgaaaatgaagatgacctggtgagccacgtggatggcagcgtcatcagccggcgggagtggtacgtgtag

SEQ ID NO: 164494 - DNA, 1464 bp, synthetic construct
  misc_feature 1..1464: note = Description of Artificial Sequence: Synthetic coding sequence
  source 1..1464: mol_type = other DNA
atggccgagggctggcgctggtgctttgtgcggaggaccccaggcctgctgcggggccccctgctgcccaggagcttcagcggcaacccccgggccctggccggccccatcatcgtggagccccacgtgacagctgtgtggggcaagaatgtgtccctgaagtgcctgattgaggtgaatgagaccatcacccagatctcctgggagaagatccacggcaagagcagccagacagtggccgtgcaccacccccagtatggcttctctgtgcagggcgagtaccagggccgggtgctcttcaagaactacagcctgaatgatgccaccatcaccctgcacaacatcggcttcagtgacagcggcaagtacatctgcaaggctgtgaccttccccctgggcaatgcccagagcagcaccaccgtgacagtgctggtggagcccaccgtgtccctcatcaagggccctgacagcctgattgatggcggcaatgaaacagtggccgccatctgcatcgccgccaccgggaagcctgtggcccacatcgactgggagggggacctgggggagatggagagcaccaccaccagcttccccaatgaaacagccaccatcatcagccagtacaagctgttccccaccaggtttgcccggggccgccgcatcacctgtgtggtgaagcacccagccctggagaaggacatccgctacagcttcatcctggacatccagtatgcccctgaggtgtctgtgacaggctatgatggcaactggtttgtgggcaggaagggcgtgaacctgaagtgcaatgctgatgccaaccccccacccttcaagtctgtgtggagccggctggatggccagtggccagatggcctgctggccagtgacaacaccctgcactttgtgcaccccctgaccttcaactacagcggcgtgtacatctgcaaggtgaccaacagcctgggccagaggagtgaccagaaggtgatctacatcagtgatgtgcccttcaagcagaccagcagcattgctgtggccggggccgtcatcggggctgtgctggccctcttcatcatcgccatctttgtgacagtgctgctgacccccaggaagaagaggcccagctacctggacaaggtgattgacctgccccccacccacaagcccccacccctgtatgaggagaggagcccccccctgccccagaaggacctcttccagcctgagcacctgcccctgcagacccagttcaaggagcgggaggtgggcaacctgcagcacagcaatggcctgaacagccgcagctttgattatgaagatgaaaatcctgtgggggaggatggcatccagcagatgtaccccctgtacaaccagatgtgctaccaggacaggagccctgggaagcaccaccagaacaatgaccccaagagggtgtacatcgacccccgggagcactacgtgtag

SEQ ID NO: 164495 - DNA, 1533 bp, synthetic construct
  misc_feature 1..1533: note = Description of Artificial Sequence: Synthetic coding sequence
  source 1..1533: mol_type = other DNA
atgcccctgagcctgggcgctgagatgtggggccctgaggcctggctgctgctgctgctgctgctggccagcttcaccggccgctgcccagctggggagctggagaccagtgatgtggtgacagtggtgctgggccaggatgccaagctgccctgcttctacagaggagacagcggggagcaggtgggccaggtggcctgggcccgggtggatgctggggagggcgcccaggagctggccctgctgcacagcaaatatggcctgcacgtgtccccagcctatgagggccgggtggagcagcccccacctccaagaaaccccctggatggctctgtgctgctgagaaatgctgtgcaggctgatgaaggagaatatgagtgccgggtgtccaccttccctgctggcagcttccaggcccggctgcggctgcgggtgctggtgccccccctgcccagcctgaaccctggccctgccctggaggagggccagggcctgaccctggccgccagctgcacagctgagggcagccctgcccccagcgtgacctgggacacagaggtgaagggcaccaccagcagccgctccttcaagcacagccgctctgctgctgtgaccagcgagttccacctggtgcccagccgctccatgaatggccagcccctgacctgtgtggtgagccaccctggcctgctgcaggaccagaggatcacccacatcctgcacgtgtccttcctggccgaggcctctgtgcggggcctggaggaccagaacctgtggcacatcggccgggagggcgccatgctgaagtgcctgtctgagggccagcccccacccagctacaactggacccggctggatggccccctgcccagcggcgtgcgggtggatggagacaccctgggcttcccccccctgaccacagagcacagcggcatctacgtgtgccacgtgtccaatgagttcagcagccgggacagccaggtgacagtggatgtgctggacccccaggaggacagcggcaagcaggtggacctggtgtctgcctctgtggtggtggtgggcgtgattgctgccctgctcttctgcctgctggtggtggtggtggtgctgatgagccgctaccacaggaggaaggcccagcagatgacccagaagtatgaggaggagctgaccctgaccagagaaaattccatccggcggctgcacagccaccacacagaccccaggagccagcctgaggagagcgtgggcctgcgggcagagggccacccagacagcctgaaggacaacagcagctgcagcgtgatgtctgaggagcctgagggccgcagctacagcaccctgaccaccgtgcgggagattgagacccagacagagctgctgagccctggcagcggccgggcagaggaggaggaggaccaggatgagggcatcaagcaggccatgaaccactttgtgcaggagaatggcaccctgcgggccaagcccactggaaatggcatctacatcaatggccggggccacctggtgtag

SEQ ID NO: 164496 - DNA, 660 bp, synthetic construct
  misc_feature 1..660: note = Description of Artificial Sequence: Synthetic coding sequence
  source 1..660: mol_type = other DNA
atgctgaagtgcctgtctgagggccagcccccacccagctacaactggacccggctggatggccccctgcccagcggcgtgcgggtggatggagacaccctgggcttcccccccctgaccacagagcacagcggcatctacgtgtgccacgtgtccaatgagttcagcagccgggacagccaggtgacagtggatgtgctggacccccaggaggacagcggcaagcaggtggacctggtgtctgcctctgtggtggtggtgggcgtgattgctgccctgctcttctgcctgctggtggtggtggtggtgctgatgagccgctaccacaggaggaaggcccagcagatgacccagaagtatgaggaggagctgaccctgaccagagaaaattccatccggcggctgcacagccaccacacagaccccaggagccagagcgaggagcctgagggccgcagctacagcaccctgaccaccgtgcgggagattgagacccagacagagctgctgagccctggcagcggccgggcagaggaggaggaggaccaggatgagggcatcaagcaggccatgaaccactttgtgcaggagaatggcaccctgcgggccaagcccactggaaatggcatctacatcaatggccggggccacctggtgtag

SEQ ID NO: 164497 - DNA, 2058 bp, synthetic construct
  misc_feature 1..2058: note = Description of Artificial Sequence: Synthetic coding sequence
  source 1..2058: mol_type = other DNA
atggagctgctgcggaccatcacctaccagcctgctgccagcaccaagatgtgtgagcaggccctgggcaagggctgtggggctgacagcaagaagaagaggcctccccagcccccagaggagagccagcccccccagagccaggcccaggtgcccccagctgccccccaccaccaccaccaccacagccacagcggccctgagatcagccgcatcatcgtggaccccaccaccgggaagcgctactgccggggcaaggtgctgggcaagggcggctttgccaagtgctatgagatgacagacctgaccaacaacaaggtgtatgctgccaagatcatcccccacagccgggtggccaagccccaccagcgggagaagattgacaaggagattgagctgcaccgcatcctgcaccacaagcacgtggtgcagttctaccactactttgaggacaaggagaacatctacatcctgctggagtactgcagccgccgctccatggcccacatcctgaaggccaggaaggtgctgacagagcctgaggtgcgctactacctgcggcagatcgtgtctggcctgaagtacctgcacgagcaggagatcctgcaccgggacctgaagctgggcaacttcttcatcaatgaggccatggagctgaaggtgggggactttggcctggccgcccggctggagcccctggagcacagaagaaggaccatctgtggcacccccaactacctgagccctgaggtgctgaacaagcagggccacggctgtgagagtgacatctgggccctgggctgtgtgatgtacaccatgctgctgggccggcccccatttgagaccaccaacctgaaggagacctaccgctgcatccgggaggcccgctacaccatgcccagcagcctgctggccccagccaagcacctgattgcctccatgctgagcaagaaccctgaggaccggcccagcctggatgacatcatcagacatgacttcttcctgcagggcttcaccccagaccggctgagcagcagctgctgccacacagtgcctgacttccacctgagcagccctgccaagaacttcttcaagaaggctgctgctgccctgtttggaggcaagaaggacaaggcccgctacatcgacacccacaacagagtgtccaaagaagatgaggacatctacaagctgcggcatgacctgaagaagaccagcatcacccagcagcccagcaagcacaggacagatgaggagctgcagccccccaccaccaccgtggcccggagcggcaccccagctgtggagaacaagcagcagattggagatgccatccgcatgattgtgcggggcaccctgggcagctgcagcagcagcagtgaatgtctggaggacagcaccatgggctctgtggccgacacagtggcccgggtgctgcggggctgcctggagaacatgcctgaggccgactgcatccccaaggagcagctgagcaccagcttccagtgggtgaccaagtgggtggactacagcaacaagtatggcttcggctaccagctgagtgaccacacagtgggcgtgctcttcaacaatggagcccacatgagcctgctgcctgacaagaagacagtgcactactatgcagagctgggccagtgcagcgtcttccctgccacagatgcccctgagcagttcatcagccaggtgacagtgctgaagtacttcagccactacatggaggagaacctgatggatggaggagacctgcccagcgtgacagacatccggcggccccggctgtacctgctgcagtggctgaagagtgacaaggccctgatgatgctgttcaatgatggcaccttccaggtgaacttctaccatgaccacaccaagatcatcatctgcagccagaatgaggagtacctgctgacctacatcaatgaagatcgcatcagcaccaccttccggctgaccaccctgctgatgagcggctgcagcagcgagctgaagaacaggatggagtatgccctgaacatgctgctgcagcgctgcaactag

SEQ ID NO: 164498 - DNA, 1164 bp, synthetic construct
  misc_feature 1..1164: note = Description of Artificial Sequence: Synthetic coding sequence
  source 1..1164: mol_type = other DNA
atggagctgctgcggaccatcacctaccagcctgctgccagcaccaagatgtgtgagcaggccctgggcaagggctgtggggctgacagcaagaagaagaggcctccccagcccccagaggagagccagcccccccagagccaggcccaggtgcccccagagatcagccgcatcatcgtggaccccaccaccgggaagcgctactgccggggcaaggtgctgggcaagggcggctttgccaagtgctatgagatgacagacctgaccaacaacaaggtgtatgctgccaagatcatcccccacagccgggtggccaagccccaccagcgggagaagattgacaaggagattgagctgcaccgcatcctgcaccacaagcacgtggtgcagttctaccactactttgaggacaaggagaacatctacatcctgctggagtactgcagccgccgctccatggcccacatcctgaaggccaggaaggtgctgacagagcctgaggtgcgctactacctgcggcagatcgtgtctggcctgaagtacctgcacgagcaggagatcctgcaccgggacctgaagctgggcaacttcttcatcaatgaggccatggagctgaaggtgggggactttggcctggccgcccggctggagcccctggagcacagaagaaggaccatctgtggcacccccaactacctgagccctgaggtgctgaacaagcagggccacggctgtgagagtgacatctgggccctgggctgtgtgatgtacaccatgctgctgggccggcccccatttgagaccaccaacctgaaggagacctaccgctgcatccgggaggcccgctacaccatgcccagcagcctgctggccccagccaagcacctgattgcctccatgctgagcaagaaccctgaggaccggcccagcctggatgacatcatcagacatgacttcttctgccgggccagcctgaggacagactgcctgctggccgtggtgatccagttccagatcagcacctaccaggcccagctgcgcatcagcctgaggaagcagctgctgctcttcctggtggccaagaagaccaagcaggacatcctgacccacatcattgaatgtctgaagaagatgaagaccagcaccagcctgggcatgatctag

SEQ ID NO: 164499 - DNA, 1140 bp, synthetic construct
  misc_feature 1..1140: note = Description of Artificial Sequence: Synthetic coding sequence
  source 1..1140: mol_type = other DNA
atggagctgctgcggaccatcacctaccagcctgctgccagcaccaagatgtgtgagcaggccctgggcaagggctgtggggctgacagcaagaagaagaggcctccccagcccccagaggagagccagcccccccagagccaggcccaggtgcccccagctgccccccaccaccaccaccaccacagccacagcggccctgagatcagccgcatcatcgtggaccccaccaccgggaagcgctactgccggggcaaggtgctgggcaagggcggctttgccaagtgctatgagatgacagacctgaccaacaacaaggtgtatgctgccaagatcatcccccacagccgggtggccaagccccaccagcgggagaagattgacaaggagattgagctgcaccgcatcctgcaccacaagcacgtggtgcagttctaccactactttgaggacaaggagaacatctacatcctgctggagtactgcagccgccgctccatggcccacatcctgaaggccaggaaggtgctgacagagcctgaggtgcgctactacctgcggcagatcgtgtctggcctgaagtacctgcacgagcaggagatcctgcaccgggacctgaagctgggcaacttcttcatcaatgaggccatggagctgaaggtgggggactttggcctggccgcccggctggagcccctggagcacagaagaaggaccatctgtggcacccccaactacctgagccctgaggtgctgaacaagcagggccacggctgtgagagtgacatctgggccctgggctgtgtgatgtacaccatgctgctgggccggcccccatttgagaccaccaacctgaaggagacctaccgctgcatccgggaggcccgctacaccatgcccagcagcctgctggccccagccaagcacctgattgcctccatgctgagcaagaaccctgaggaccggcccagcctggatgacatcatcagacatgacttcttcctgcagggcttcaccccagaccggctgagcagcagctgctgccacacagtgcctgacttccacctgagcagccctgccaagaacttcttcaagagagctgctgagcacatcatctctgtgggccaccagatgggctag

SEQ ID NO: 164500 - DNA, 1476 bp, synthetic construct
  misc_feature 1..1476: note = Description of Artificial Sequence: Synthetic coding sequence
  source 1..1476: mol_type = other DNA
gtggacctgctgcgggccggggaggtgcccaagcccttccccacccactacaaggacctgtgggacaacaagcacgtgaagatgccctgcagcgagcagaacctgtaccctgtggaggatgaaaatggagagaggacagctggcagccgctgggagctgatccagacagccctgctgaacaagttcacccggccccagaacctgaaggatgccatcctgaagtacaacgtggcctacagcaagaagtgggacttcaccgccctgattgacttctgggacaaggtgctggaggaggccgaggcccagcacctgtaccagagcatcctgcctgacatggtgaagatcgccctgtgcctgcccaacatctgcacccagcccatccccctgctgaagcagaagatgaaccacagcatcaccatgagccaggagcagatcgccagcctgctggccaatgccttcttctgcaccttccccaggagaaatgccaagatgaagtctgagtacagcagctacccagacatcaacttcaacagactctttgagggccgcagcagcaggaagccagagaagctgaagaccctcttctgctacttcagaagagtgacagagaagaagcccaccggcctggtgaccttcacccggcagagcctggaggacttccctgagtgggagcgctgtgagaagcccctgacccggctgcacgtgacctatgagggcaccattgaagaaaatggccagggcatgctgcaggtggactttgccaacagatttgtgggcggcggcgtgaccagcgctggcctggtgcaggaggagatccgcttcctgatcaaccctgagctgatcatcagccgcctcttcacagaggtgctggaccacaatgaatgtctcatcatcactggaacagagcagtacagcgagtacacaggctatgcagagacctaccgctggagccgcagccatgaagatggcagcgagagagatgactggcagaggcgctgcacagagatcgtggccattgatgccctgcacttccgccgctacctggaccagtttgtgcctgagaagatgagaagagagctgaacaaggcctactgcggcttcctgcggcctggggtgtcctctgagaacctgtctgctgtggccaccggcaactggggctgtggggcctttggaggagatgcccggctgaaggccctgatccagatcctggccgctgctgctgctgagagagatgtggtgtacttcacctttggagacagcgagctgatgagggacatctacagcatgcacatcttcctgacagagaggaagctgactgtgggagatgtgtacaagctgctgctgcgctactacaatgaggagtgcaggaactgcagcaccccaggccctgacatcaagctgtaccccttcatctaccacgctgtggagagctgtgccgagacagctgaccacagcggccagaggacaggcacctag

SEQ ID NO: 164501 - DNA, 579 bp, synthetic construct
  misc_feature 1..579: note = Description of Artificial Sequence: Synthetic coding sequence
  source 1..579: mol_type = other DNA
tgaacagagcagtacagcgagtacacaggctacgccgagacctaccgctggagccgcagccatgaagatggcagcgagagagatgactggcagaggcgctgcacagaaattgtggccattgatgccctgcacttccgccgctacctggaccagtttgtgcctgagaagatgaggcgggagctgaacaaggcctactgcggcttcctgcggcctggggtgtcctctgagaacctgtctgctgtggccactggaaactggggctgtggggcctttggaggagatgcccggctgaaggccctgatccagatcctggccgctgctgctgctgagagagatgtggtgtacttcaccttcggggacagcgagctgatgagggacatctacagcatgcacatcttcctgacagagaggaagctgactgtgggagatgtgtacaagctgctgctgcgctactacaatgaagaatgtagaaactgcagcaccccaggccctgacatcaagctgtaccccttcatctaccacgctgtggagagctgtgccgagacagctgaccacagcggccagaggacaggcacctag

SEQ ID NO: 164502 - DNA, 468 bp, synthetic construct
  misc_feature 1..468: note = Description of Artificial Sequence: Synthetic coding sequence
  source 1..468: mol_type = other DNA
atggccgagagcagtgacaagctgtacagagtggagtatgccaagagcggccgggccagctgcaagaagtgcagcgagagcatccccaaggacagcctgaggatggccatcatggtgcagagccccatgtttgatggcaaggtgccccactggtaccacttcagctgcttctggaaggtgggccacagcatccgccacccagatgtggaggtggatggcttcagcgagctgcgctgggatgaccagcagaaggtgaagaagacagctgaggccggcggcgtgactggagtgtacatcctgggccagcacggccacagcgcccccaccctgaagctgcccggcggcccccggctgcgggagcagagcaagcccccaccagcctgccccctgccccacgtgcagatcaagaggatggtgcccatgctgttccagcagcacctgctggacagcgccagctctgtggcctag

SEQ ID NO: 164503 - DNA, 327 bp, synthetic construct
  misc_feature 1..327: note = Description of Artificial Sequence: Synthetic coding sequence
  source 1..327: mol_type = other DNA
atggccgagagcagtgacaagctgtacagagtggagtatgccaagagcggccgggccagctgcaagaagtgcagcgagagcatccccaaggacagcctgaggatggccatcatggtgcagagccccatgtttgatggcaaggtgccccactggtaccacttcagctgcttctggaaggtgggccacagcatccgccacccagatgtggaggtggatggcttcagcgagctgcgctgggatgaccagcagaaggtgaagaagacagctgaggccggcggcgtgacagagccccccatcccctgtggcatcgaggtgatgggccgctag

SEQ ID NO: 164504 - DNA, 327 bp, synthetic construct; identical to SEQ ID NO: 164503
  misc_feature 1..327: note = Description of Artificial Sequence: Synthetic coding sequence
  source 1..327: mol_type = other DNA

SEQ ID NO: 164505 - DNA, 3045 bp, synthetic construct
  misc_feature 1..3045: note = Description of Artificial Sequence: Synthetic coding sequence
  source 1..3045: mol_type = other DNA
atggccgagagcagtgacaagctgtacagagtggagtatgccaagagcggccgggccagctgcaagaagtgcagcgagagcatccccaaggacagcctgaggatggccatcatggtgcagagccccatgtttgatggcaaggtgccccactggtaccacttcagctgcttctggaaggtgggccacagcatccgccacccagatgtggaggtggatggcttcagcgagctgcgctgggatgaccagcagaaggtgaagaagacagctgaggccggcggcgtgacaggcaagggccaggacggcatcggcagcaaggccgagaagaccctgggggactttgctgctgaatatgccaagagcaacagaagcacctgcaagggctgcatggagaagattgagaagggccaggtgcggctgagcaagaagatggtggaccctgagaagccccagctgggcatgattgaccgctggtaccaccctggctgctttgtgaagaaccgggaggagctgggcttccggcctgagtacagcgccagccagctgaagggcttcagcctgctggccacagaggacaaggaggccctgaagaagcagctgcccggggtgaagtctgagggcaagaggaaaggagatgaggtggatggagtggatgaggtggccaagaagaagagcaagaaggagaaggacaaggacagcaagctggagaaggccctgaaggcccagaatgacctgatctggaacatcaaggatgagctgaagaaggtgtgcagcaccaatgacctgaaggagctgctgatcttcaacaagcagcaggtgcccagcggggagagcgccatcctggacagagtggctgatggcatggtgtttggagccctgctgccctgtgaagaatgttctggccagctggtgttcaagagtgatgcctactactgcacaggagatgtgacagcctggaccaagtgcatggtgaagacccagacccccaacaggaaggagtgggtgacccccaaggagttccgggagatctcctacctgaagaagctgaaggtgaagaagcaggaccgcatcttccccccagagaccagcgcctctgtggccgccaccccaccacccagcacagccagcgccccagctgctgtgaacagcagcgccagcgctgacaagcccctgagcaacatgaagatcctgaccctgggcaagctgagcaggaacaaggatgaggtgaaggccatgattgagaagctgggcggcaagctgaccggcacagccaacaaggccagcctgtgcatcagcaccaagaaggaggtggagaagatgaacaagaagatggaggaggtgaaggaggccaacatccgggtggtgtctgaggacttcctgcaggatgtgtctgccagcaccaagagcctgcaggagctgttcctggcccacatcctgagcccctggggcgctgaggtgaaggccgagcctgtggaggtggtggccccccggggcaagtctggagctgccctgagcaagaagagcaagggccaggtgaaggaggagggcatcaacaagtctgagaagaggatgaagctgaccctgaagggcggcgctgctgtggaccctgattctggcctggagcacagcgcccacgtgctggagaagggcggcaaggtgttcagcgccaccctgggcctggtggacatcgtgaagggcaccaacagctactacaagctgcagctgctggaggatgacaaggagaaccgctactggatcttccgctcctggggccgggtgggcaccgtcatcggcagcaacaagctggagcagatgcccagcaaggaggatgccatcgagcacttcatgaagctgtatgaggagaagacaggaaatgcctggcacagcaagaacttcaccaagtaccccaagaagttctaccccctggagattgattatggccaggatgaggaggccgtgaagaagctgactgtgaaccctggcaccaagagcaagctgcccaagcctgtgcaggacctgatcaagatgatctttgatgtggagagcatgaagaaggccatggtggagtatgaaattgacctgcagaagatgcccctgggcaagctgagcaagaggcagatccaggccgcctacagcatcctgtctgaggtgcagcaggccgtgtcccagggcagcagtgacagccagatcctggacctgagcaaccgcttctacaccctcatcccccatgactttggcatgaagaagccacccctgctgaacaatgctgacagcgtgcaggccaaggtggagatgctggacaacctgctggacatcgaggtggcctacagcctgctgcggggcggcagtgatgacagcagcaaggaccccattgatgtgaactatgagaagctgaagacagacatcaaggtggtggaccgggacagcgaggaggccgagatcatcagaaaatatgtgaagaacacccacgccaccacccacaatgcctatgacctggaggtgattgacatcttcaagattgagcgggagggggagtgccagcgctacaagcccttcaagcagctgcacaacagaaggctgctgtggcacggcagcaggaccaccaactttgctggcatcctgagccagggcctgagaattgcccctcctgaggcccctgtgacaggctacatgtttgggaagggcatctactttgctgacatggtgtccaagagcgccaactactgccacaccagccagggcgaccccatcggcctcatcctgctgggggaggtggccctgggcaacatgtatgagctgaagcacgccagccacatcagcaagctgcccaagggcaagcacagcgtgaagggcctgggcaagaccaccccagaccccagcgccaacatcagcctggatggagtggatgtgcccctgggcaccggcatcagcagtggagtgaatgacaccagcctgctgtacaatgagtacatcgtgtatgacatcgcccaggtgaacctgaagtacctgctgaagctgaagttcaacttcaagaccagcctgtggtag

SEQ ID NO: 164506 - DNA, 753 bp, synthetic construct
  misc_feature 1..753: note = Description of Artificial Sequence: Synthetic coding sequence
  source 1..753: mol_type = other DNA
atggccgagagcagtgacaagctgtacagagtggagtatgccaagagcggccgggccagctgcaagaagtgcagcgagagcatccccaaggacagcctgaggatggccatcatggtgcagagccccatgtttgatggcaaggtgccccactggtaccacttcagctgcttctggaaggtgggccacagcatccgccacccagatgtggaggtggatggcttcagcgagctgcgctgggatgaccagcagaaggtgaagaagacagctgaggccggcggcgtgacaggcaagggccaggacggcatcggcagcaaggccgagaagaccctgggggactttgctgctgaatatgccaagagcaacagaagcacctgcaagggctgcatggagaagattgagaagggccaggtgcggctgagcaagaagatggtggaccctgagaagccccagctgggcatgattgaccgctggtaccaccctggctgctttgtgaagaaccgggaggagctgggcttccggcctgagtacagcgccagccagctgaagggcttcagcctgctggccacagaggacaaggaggccctgaagaagcagctgcccggggtgaagtctgagggcaagaggaaaggagatgaggtggatggagtggatgaggtggccaagaagaagagcaagaaggagaaggacaagaagaagaagaagaagaagaagaaggagaggaagaagaagaagaagaagaggaagaagaagtag

SEQ ID NO: 164507 - DNA, 2133 bp, synthetic construct
  misc_feature 1..2133: note = Description of Artificial Sequence: Synthetic coding sequence
  source 1..2133: mol_type = other DNA
atggacttctccatggtggccggggccgccgcctacaatgagaagtctgagaccggggccctgggggagaactacagctggcagatccccatcaaccacaatgacttcaagatcctgaagaacaatgaaaggcagctgtgtgaggtgctgcagaacaagtttggctgcatcagcaccctggtgtcccctgtgcaggagggcaacagcaagagcctgcaggtgttcaggaagatgctgaccccaagaattgagctgtctgtgtggaaggatgacctgaccacccatgctgtggatgctgtggtgaatgctgccaatgaagacctgctgcacggcggcggcctggccctggccctggtgaaggccggcggctttgagatccaggaggagagcaagcagtttgtggcccgctatggcaaggtgtctgctggggagattgctgtgactggagctggccgcctgccctgcaagcagatcatccatgctgtgggcccccgctggatggagtgggacaagcagggctgcaccgggaagctgcagagggccatcgtgtccatcctgaactacgtgatctacaagaacacccacatcaagacagtggccatcccagccctgagcagcggcatcttccagttccccctgaacctgtgcaccaagaccatcgtggagaccatccgggtgtccctgcagggcaagcccatgatgagcaacctgaaggagatccacctggtgtccaatgaagaccccaccgtggccgccttcaaggccgccagcgagttcatcctgggcaagtctgagctgggccaggagaccacccccagcttcaatgccatggtggtgaacaacctgaccctgcagatcgtgcagggccacatcgagtggcagacagcagatgtgattgtgaacagcgtgaacccccatgacatcaccgtgggccctgtggccaagagcatcctgcagcaggccggcgtggagatgaagtctgagttcctggccaccaaggccaagcagttccagaggagccagctggtgctggtgaccaagggcttcaacctcttctgcaagtacatctaccacgtgctgtggcacagcgagttccccaagccccagatcctgaagcacgccatgaaggaatgtctggagaagtgcatcgagcagaacatcaccagcatctccttccctgccctgggcactggaaacatggagatcaagaaggagacagctgctgagatcctgtttgatgaggtgctgacctttgccaaggaccacgtgaagcaccagctgactgtgaagtttgtgatcttccccacagacctggagatctacaaggccttcagcagcgagatggccaagaggagcaagatgctgagcctgaacaactacagcgtgccccagagcacccgggaggagaagcgggagaatggcctggaggcccggagccctgccatcaacctgatgggcttcaacgtggaggagatgtatgaggcccacgcctggatccagaggatcctgagcctgcagaaccaccacatcatcgagaacaaccacatcctgtacctgggcaggaaggagcatgacatcctgagccagctgcagaagaccagctctgtgtccatcacagagatcatcagccctggccgcacagagctggagattgaaggagcccgggctgacctgattgaggtggtgatgaacatcgaggacatgctgtgcaaggtgcaggaggagatggccaggaagaaggagcggggcctgtggaggagcctgggccagtggaccatccagcagcagaagacccaggatgagatgaaggagaacatcatcttcctgaagtgccctgtgccccccacccaggagctgctggaccagaagaagcagtttgagaagtgtggcctgcaggtgctgaaggtggagaagattgacaatgaggtgctgatggccgccttccagaggaagaagaagatgatggaggagaagctgcaccggcagcctgtgagccacaggctcttccagcaggtgccctaccagttctgcaatgtggtgtgccgggtgggcttccagaggatgtacagcaccccctgtggccgctgccagtgcctgatcattggagccaccctgtggaacctggtgtcctag

SEQ ID NO: 164508 - DNA, 2460 bp, synthetic construct
  misc_feature 1..2460: note = Description of Artificial Sequence: Synthetic coding sequence
  source 1..2460: mol_type = other DNA
atggacttctccatggtggccggggccgccgcctacaatgagaagtctgagaccggggccctgggggagaactacagctggcagatccccatcaaccacaatgacttcaagatcctgaagaacaatgaaaggcagctgtgtgaggtgctgcagaacaagtttggctgcatcagcaccctggtgtcccctgtgcaggagggcaacagcaagagcctgcaggtgttcaggaagatgctgaccccaagaattgagctgtctgtgtggaaggatgacctgaccacccatgctgtggatgctgtggtgaatgctgccaatgaagacctgctgcacggcggcggcctggccctggccctggtgaaggccggcggctttgagatccaggaggagagcaagcagtttgtggcccgctatggcaaggtgtctgctggggagattgctgtgactggagctggccgcctgccctgcaagcagatcatccatgctgtgggcccccgctggatggagtgggacaagcagggctgcaccgggaagctgcagagggccatcgtgtccatcctgaactacgtgatctacaagaacacccacatcaagacagtggccatcccagccctgagcagcggcatcttccagttccccctgaacctgtgcaccaagaccatcgtggagaccatccgggtgtccctgcagggcaagcccatgatgagcaacctgaaggagatccacctggtgtccaatgaagaccccaccgtggccgccttcaaggccgccagcgagttcatcctgggcaagtctgagctgggccaggagaccacccccagcttcaatgccatggtggtgaacaacctgaccctgcagatcgtgcagggccacatcgagtggcagacagcagatgtgattgtgaacagcgtgaacccccatgacatcaccgtgggccctgtggccaagagcatcctgcagcaggccggcgtggagatgaagtctgagttcctggccaccaaggccaagcagttccagaggagccagctggtgctggtgaccaagggcttcaacctcttctgcaagtacatctaccacgtgctgtggcacagcgagttccccaagccccagatcctgaagcacgccatgaaggaatgtctggagaagtgcatcgagcagaacatcaccagcatctccttccctgccctgggcactggaaacatggagatcaagaaggagacagctgctgagatcctgtttgatgaggtgctgacctttgccaaggaccacgtgaagcaccagctgactgtgaagtttgtgatcttccccacagacctggagatctacaaggccttcagcagcgagatggccaagaggagcaagatgctgagcctgaacaactacagcgtgccccagagcacccgggaggagaagcgggagaatggcctggaggcccggagccctgccatcaacctgatgggcttcaacgtggaggagatgtatgaggcccacgcctggatccagaggatcctgagcctgcagaaccaccacatcatcgagaacaaccacatcctgtacctgggcaggaaggagcatgacatcctgagccagctgcagaagaccagctctgtgtccatcacagagatcatcagccctggccgcacagagctggagattgaaggagcccgggctgacctgattgaggtggtgatgaacatcgaggacatgctgtgcaaggtgcaggaggagatggccaggaagaaggagcggggcctgtggaggagcctgggccagtggaccatccagcagcagaagacccaggatgagatgaaggagaacatcatcttcctgaagtgccctgtgccccccacccaggagctgctggaccagaagaagcagtttgagaagtgtggcctgcaggtgctgaaggtggagaagattgacaatgaggtgctgatggccgccttccagaggaagaagaagatgatggaggagaagctgcaccggcagcctgtgagccacaggctcttccagcaggtgccctaccagttctgcaatgtggtgtgccgggtgggcttccagaggatgtacagcaccccctgtgaccccaagtatggagctggcatctacttcaccaagaacctgaagaacctggccgagaaggccaagaagatctctgctgctgacaagctgatctacgtgtttgaagctgaggtgctgaccggcttcttctgccagggccaccccctgaacatcgtgcccccacccctgagccctggggccattgatggccatgattctgtggtggacaacgtgagcagccctgagaccttcgtcatcttcagcggcatgcaggccatcccccagtacctgtggacctgcacccaggagtatgtgcagagccaggactacagcagcggccccatgaggccctttgcccagcacccctggaggggctttgccagcggcagccctgtggactag

SEQ ID NO: 164509 - DNA, 2106 bp, synthetic construct
  misc_feature 1..2106: note = Description of Artificial Sequence: Synthetic coding sequence
  source 1..2106: mol_type = other DNA
atggcccaggccggcgtggtgggggaggtgacccaggtgctgtgtgccgccggcggggccctggagctgcctgagctgcggcggcggctgaggatgggcctgtctgcagatgccctggagcggctgctgcggcagaggggccgctttgtggtggccgtgcgggccggcggcgctgctgctgcccctgagcgggtggtgctggccgccagccccctgcggctgtgccgggcccaccagggcagcaagccaggctgtgtgggcctgtgtgcccagctgcacctgtgccgcttcatggtgtatggagcctgcaagttcctgcgggccggcaagaactgcaggaacagccacagcctgaccacagagcacaacctgtctgtgctgcggacccacggcgtggaccacctgagctacaatgagctgtgccagctgctcttccagaatgacccctggctgctgcctgagatctgccagcactacaacaagggagatggcccccacggcagctgtgccttccagaagcagtgcatcaagctgcacatctgccagtacttcctgcagggcgagtgcaagtttggcaccagctgcaagaggagccatgacttcagcaacagcgagaacctggagaagctggagaagctgggcatgagcagtgacctggtgtcccggctgcccaccatctacagaaatgcccatgacatcaagaacaagagcagcgcccccagccgggtgccccccctgtttgtgccccagggcaccagcgagaggaaggacagcagcggctctgtgagccccaacaccctgagccaggaggagggggaccagatctgcctgtaccacatcaggaagagctgcagcttccaggacaagtgccaccgggtgcacttccacctgccctaccgctggcagttcctggaccggggcaagtgggaggacctggacaacatggagctgattgaggaggcctactgcaaccccaagattgagcgcatcctgtgcagcgagagcgccagcaccttccacagccactgcctgaacttcaatgccatgacctatggagccacccaggcccggcggctgagcacagccagctctgtgaccaagccaccccacttcatcctgaccacagactggatctggtactggagcgatgaatttggctcctggcaggagtatggccggcagggcaccgtgcaccctgtgaccaccgtgagcagcagtgatgtggagaaggcctacctggcctactgcaccccaggcagtgatggccaggccgccaccctgaagttccaggccggcaagcacaactatgagctggacttcaaggcctttgtgcagaagaacctggtgtatggcaccaccaagaaggtgtgccggcggcccaagtatgtgagcccccaggatgtgaccaccatgcagacctgcaacaccaagtttcctggccccaagagcatcccagactactgggacagcagcgccctgcctgaccccggcttccagaagatcaccctgagcagcagcagcgaggagtaccagaaggtgtggaacctcttcaacagaaccctgcccttctactttgtgcagaagattgagcgggtgcagaacctggccctgtgggaggtgtaccagtggcagaagggccagatgcagaagcagaatggaggcaaggctgtggatgagcggcagctgttccacggcaccagcgccatctttgtggatgccatctgccagcagaactttgactggagggtgtgtggggtgcacggcaccagctatggcaagggcagctactttgccagagatgctgcctacagccaccactacagcaagagtgacacccagacccacaccatgttcctggcccgggtgctggtgggggagtttgtgagaggaaatgccagctttgtgcggcccccagccaaggagggctggagcaatgccttctatgacagctgtgtgaacagcgtgtctgaccccagcatctttgtgatctttgagaagcaccaggtgtacccagaatatgtgatccagtacaccaccagcagcaagcccagcgtgacccccagcatcctgctggccctgggcagcctcttcagcagccggcagtag

SEQ ID NO: 164510 - DNA, 393 bp, synthetic construct
  misc_feature 1..393: note = Description of Artificial Sequence: Synthetic coding sequence
  source 1..393: mol_type = other DNA
atgttcctggcccgggtgctggtgggggagtttgtgagaggaaatgccagctttgtgcggcccccagccaaggagggctggagcaatgccttctatgacagctgtgtgaacagcgtgtctgaccccagcatctttgtgatctttgagaagaccaggagcacccagagcatgagcagcagcaccccacctccacccagccccaggagccacccccccagctgctggccctgggccccctgcagcgctgctgacagcgagaggactggagtcttccaggccttccacctgctgtgcctggagatggccatctgggccttccccttcctgttcaagcagaagctgctgatgaactgcagcctgaacatcgacctgtccatgaagctgtgcagctag

SEQ ID NO: 164511 - DNA, 849 bp, synthetic construct
  misc_feature 1..849: note = Description of Artificial Sequence: Synthetic coding sequence
  source 1..849: mol_type = other DNA
atgagcaagctggccagcttcctgggcttcagcaagcagagcccccagaagaagaaccacctggtgctggagaagaagacagaaagtgccaccttccgggtgtgtggagaaaatgtgacctgtgtggagtatgccatctcctggctgcaggacctgattgagaaggagcagtgcccctacaccagtgaagatgagtgcatcaaggactttgatgagaaggagtaccaggagctgaatgagctgcagaagaagctgaacatcaacatcagcctggaccacaagaggcccctcatcaaggtgctgggcatcagcagagatgtgatgcaggccagagatgaaattgaggccatgatcaagagggtgcggctggccaaggagcaggagagcagagctgactgcatcagcgagttcatcgagtggcagtacaatgacaacaacaccagccactgcttcaacaagatgaccaacctgaagctggaggatgcccggcgggagaagaagaagacagtggatgtgaagatcaaccaccgccactacacagtgaacctgaacacctacacagccacagacaccaagggccacagcctgtctgtgcagaggctgaccaagagcaaggtggacatcccagcccactggagcgacatgaagcagcagaacttctgtgtggtggagctgctgcccagcgaccctgagtacaacacagtggccagcaagttcaaccagacctgcagccacttccgcatcgagaaggtgaatgtgatgatccgggcctgcagccccagctactgggaggccgaggtggagggcctgcacgagcccaggagcctgacccctgtgtgggtgacctag

SEQ ID NO: 164512 - DNA, 2394 bp, synthetic construct
  misc_feature 1..2394: note = Description of Artificial Sequence: Synthetic coding sequence
  source 1..2394: mol_type = other DNA
atgtacctgcggcggctgctgcggcccctgcagatgctgctggtgaaggagggcgtgcagaatgccaagacagatgtggtggtgaacagcgtgcccctggacctggtgctgagccggggccccctgagcaagagcctgctggagaaggccggccctgagctgcaggaggagctggacacagtgggccagggcgtggccgtgtccatgggcaccgtgctgaagaccagctcctggaacctggactgccgctacgtgctgcacgtggtggcccctgagtggagaaatggcagcaccagcagcctgaagatcatggaggacatcatccgggagtgcatggagatcacagagagcctgagcctgaagagcatcgccttccctgccatcggcaccggcaacctgggcttccccaagaacatctttgctgagctgatcatcagcgaggtgttcaagttcagcagcaagaaccagctgaagaccctgcaggaggtgcacttcctgctgcaccccagcgaccacgagaacatccaggccttcagtgatgaatttgcccggcgggccaatggaaacctggtgtctgacaagatccccaaggccaaggacacccagggcttctatggaacagtgagcagcccagattctggagtgtatgagatgaagattggcagcatcatcttccaggtggccagcggggacatcaccaaggaggaggctgatgtgattgtgaacagcaccagcaacagcttcaacctgaaggccggcgtgtccaaggccatcctggagtgtgccggccagaatgtggagagagaatgttcccagcaggcccagcagaggaagaatgactacatcatcaccggcggcggcttcctgcgctgcaagaacatcatccacgtgattggaggaaatgatgtgaagagctctgtgtcctctgtgctgcaggagtgtgagaagaagaactacagcagcatctgcctgcctgccatcggcactggaaatgccaagcagcacccagacaaggtggccgaggccatcattgatgccatcgaggactttgtgcagaagggcagcgcccagagcgtgaagaaggtgaaggtggtgatcttcctgccccaggtgctggatgtgttctacgccaacatgaagaagcgggagggcacccagctgagcagccagcagagcgtgatgagcaagctggccagcttcctgggcttcagcaagcagagcccccagaagaagaaccacctggtgctggagaagaagacagagagcgccaccttccgggtgtgtggggagaatgtgacctgtgtggagtatgccatctcctggctgcaggacctgattgagaaggagcagtgcccctacaccagtgaagatgagtgcatcaaggactttgatgagaaggagtaccaggagctgaatgagctgcagaagaagctgaacatcaacatcagcctggaccacaagaggcccctcatcaaggtgctgggcatcagcagagatgtgatgcaggccagagatgaaattgaggccatgatcaagagggtgcggctggccaaggagcaggagagcagagctgactgcatcagcgagttcatcgagtggcagtacaatgacaacaacaccagccactgcttcaacaagatgaccaacctgaagctggaggatgcccggcgggagaagaagaagacagtggatgtgaagatcaaccaccgccactacacagtgaacctgaacacctacacagccacagacaccaagggccacagcctgtctgtgcagaggctgaccaagagcaaggtggacatcccagcccactggagcgacatgaagcagcagaacttctgtgtggtggagctgctgcccagcgaccctgagtacaacacagtggccagcaagttcaaccagacctgcagccacttcagaattgagaagattgaaagaatccagaacccagacctgtggaacagctaccaggccaagaagaagaccatggatgccaagaatggccagaccatgaatgagaagcagctgttccacggcacagatgctggctctgtgccccacgtgaacagaaatggcttcaacagaagctatgctgggaagaatgctgtggcctacggcaagggcacctactttgctgtgaatgccaactacagcgccaatgacacctacagcaggccagatgccaatggaaggaagcacgtgtactacgtgcgggtgctgaccggcatctacacccacggcaaccacagcctcatcgtgccccccagcaagaacccccagaaccccacagacctgtatgacacagtgacagacaacgtgcaccaccccagcctgtttgtggccttctatgactaccaggcctacccagagtacctgatcaccttcaggaagtag

SEQ ID NO: 164513 - DNA, 5163 bp, synthetic construct
  misc_feature 1..5163: note = Description of Artificial Sequence: Synthetic coding sequence
  source 1..5163: mol_type = other DNA
atggctgtgcccggcagcttccccctgctggtggagggctcctggggccctgacccccccaagaacctgaacaccaagctgcagatgtacttccagagccccaagaggtctggaggaggagaatgtgaggtgcggcaggaccccaggagccccagccgcttcctggtgttcttctacccagaagatgtgcggcagaaggtgctggagaggaagaaccacgagctggtgtggcagggcaagggcaccttcaagctgactgtgcagctgcctgccaccccagatgaaattgaccacgtgtttgaggaggagctgctgaccaaggagagcaagaccaaggaggatgtgaaggagccagacaccatccgctttgtggatgactgcaccaagcaccacagcatcaagcagctgcagctgagcccccggctgctggaggtgaccaacaccatccgggtggagaacctgcccccaggagcagatgactacagcctgaagctgttctttgagaacccctacaacggcggcggccgggtggccaacgtggagtacttccctgaggagagcagcgccctgattgagttctttgacaggaaggtgctggacaccatcatggccaccaagctggacttcaacaagatgcccctgtctgtgttcccctactatgccagcctgggcacagccctgtatggcaaggagaagcccctcatcaagctgcctgccccctttgaggagagcctggacctgcccctgtggaagttcctgcagaagaagaaccacctgattgaggagatcaatgatgagatgaggcgctgccactgtgagctgacctggagccagctgagcggcaaggtgaccatccggcctgctgccaccctggtgaatgaaggccggccccgcatcaagacctggcaggccgacaccagcaccaccctgagcagcatccgcagcaagtacaaggtgaaccccatcaaggtggaccccaccatgtgggacaccatcaagaatgatgtgaaggatgaccgcatcctgattgaatttgacaccctgaaggagatggtgatcctggccggcaagtcagaagatgtgcagagcattgaggtgcaggtgcgggagctgattgagagcaccacccagaagatcaagcgggaggagcagagcctgaaggagaagatgatcatcagccctggccgctacttcctgctgtgccacagcagcctgctggaccacctgctgacagagtgcccagaaattgagatctgctatgacagagtgacccagcacctgtgcctgaagggccccagcgcagatgtgtacaaggccaagtgtgagatccaggagaaggtgtacaccatggcccagaagaacatccaggtgtccccagagatcttccagttcctgcagcaggtgaactggaaggagttcagcaaatgtctcttcatcgcccagaagatcctggccctgtatgagctggagggcaccaccgtgctgctgaccagctgcagcagcgaggccctgctggaggccgagaagcagatgctgagcgccctgaactacaagagaattgaggtggagaacaaggaggtgctgcacggcaagaagtggaagggcctgacccacaacctgctgaagaagcagaacagcagccccaacacagtcatcatcaatgagctgaccagcgagaccacagctgaggtgatcatcaccggctgtgtgaaggaggtgaatgagacctacaagctgctcttcaactttgtggagcagaacatgaagattgaaaggctggtggaggtgaagcccagcctggtgattgactacctgaagacagagaagaagctgttctggcccaagatcaagaaggtgaatgtgcaggtgtccttcaaccctgagaacaagcagaagggcatcctgctgaccggcagcaagacagaggtgctgaaggctgtggacatcgtgaagcaggtgtgggacagcgtgtgtgtgaagtctgtgcacacagacaagccaggggccaagcagttcttccaggacaaggcccgcttctaccagagcgagatcaagaggctgtttggctgctacatcgagctgcaggagaatgaggtgatgaaggagggcggcagccctgctggccagaagtgcttcagcaggacagtgctggcccctggggtggtgctgattgtgcagcagggcgacctggcccggctgcctgtggatgtggtggtgaatgccagcaatgaagacctgaagcactatggaggcctggccgccgccctgagcaaggccgccggccctgagctgcaggccgactgtgaccagatcgtgaagcgggagggccgcctgctgcctggaaatgccaccatcagcaaggccggcaagctgccctaccaccacgtgattcatgctgtgggcccccgctggagcggctatgaggccccccgctgtgtgtacctgctgcggcgggctgtgcagctgagcctgtgcctggccgagaagtacaagtaccgcagcatcgccatcccagccatcagcagcggcgtgtttggcttccccctgggccgctgtgtggagaccatcgtgtctgccatcaaggagaacttccagttcaagaaggatggccactgcctgaaggagatctacctggtggatgtgtctgagaagacagtggaggcctttgctgaggccgtgaagacagtgttcaaggccaccctgcctgacacagctgcccctcctggcctgcccccagctgctgctggccctgggaagacctcctgggagaagggcagcctggtgtcccctgggggcctgcagatgctgctggtgaaggagggcgtgcagaatgccaagacagatgtggtggtgaacagcgtgcccctggacctggtgctgagccggggccccctgagcaagagcctgctggagaaggccggccctgagctgcaggaggagctggacacagtgggccagggcgtggccgtgtccatgggcaccgtgctgaagaccagctcctggaacctggactgccgctacgtgctgcacgtggtggcccctgagtggagaaatggcagcaccagcagcctgaagatcatggaggacatcatccgggagtgcatggagatcacagagagcctgagcctgaagagcatcgccttccctgccatcggcactggaaacctgggcttccccaagaacatctttgctgagctgatcatcagcgaggtgttcaagttcagcagcaagaaccagctgaagaccctgcaggaggtgcacttcctgctgcaccccagcgaccacgagaacatccaggccttcagtgatgaatttgcccggcgggccaacggcaacctggtgtctgacaagatccccaaggccaaggacacccagggcttctacggcaccgtgagcagcccagacagcggcgtgtatgagatgaagattggcagcatcatcttccaggtggccagcggggacatcaccaaggaggaggctgatgtgattgtgaacagcaccagcaacagcttcaacctgaaggtgggcgtgtccaaggccatcctggagtgtgccggccagaatgtggagcgggagtgcagccagcaggcccagcagaggaagaatgactacatcatcactggaggcggcttcctgcgctgcaagaacatcatccacgtgattggaggaaatgatgtgaagagctctgtgtcctctgtgctgcaggagtgtgagaagaagaactacagcagcatctgcctgcctgccatcggcactggaaatgccaagcagcacccagacaaggtggccgaggccatcattgatgccattgaagattttgtgcagaagggcagcgcccagagcgtgaagaaggtgaaggtggtgatcttcctgccccaggtgctggatgtgttctacgccaacatgaagaagcgggagggcacccagctgagcagccagcagagcgtgatgagcaagctggccagcttcctgggcttcagcaagcagagcccccagaagaagaaccacctggtgctggagaagaagacagaaagtgccaccttccgggtgtgtggagaaaatgtgacctgtgtggagtatgccatctcctggctgcaggacctgattgagaaggagcagtgcccctacaccagtgaagatgagtgcatcaaggactttgatgagaaggagtaccaggagctgaatgagctgcagaagaagctgaacatcaacatcagcctggaccacaagaggcccctcatcaaggtgctgggcatcagcagagatgtgatgcaggccagagatgaaattgaggccatgatcaagagggtgcggctggccaaggagcaggagagcagagctgactgcatcagcgagttcatcgagtggcagtacaatgacaacaacaccagccactgcttcaacaagatgaccaacctgaagctggaggatgcccggcgggagaagaagaagacagtggatgtgaagatcaaccaccgccactacacagtgaacctgaacacctacacagccacagacaccaagggccacagcctgtctgtgcagaggctgaccaagagcaaggtggacatcccagcccactggagcgacatgaagcagcagaacttctgtgtggtggagctgctgcccagcgaccctgagtacaacacagtggccagcaagttcaaccagacctgcagccacttccgcatcgagaagattgagcgcatccagaacccagacctgtggaacagctaccaggccaagaagaagaccatggatgccaagaatggccagaccatgaatgagaagcagctgttccatggaacagatgctggctctgtgccccacgtgaacagaaatggcttcaacagaagctatgccggcaagaatgctgtggcctacggcaagggcacctactttgctgtgaatgccaactacagcgccaatgacacctacagcaggccagatgccaacggcaggaagcacgtgtactacgtgcgggtgctgaccggcatctacacccacggcaaccacagcctgattgtgccccccagcaagaacccccagaaccccacagacctgtatgacacagtgacagacaacgtgcaccaccccagcctgtttgtggccttctatgactaccaggcctacccagagtacctgatcaccttcaggaagtag

SEQ ID NO: 164514 - DNA, 5406 bp, synthetic construct
  misc_feature 1..5406: note = Description of Artificial Sequence: Synthetic coding sequence
  source 1..5406: mol_type = other DNA
atggctgtgcccggcagcttccccctgctggtggagggctcctggggccctgacccccccaagaacctgaacaccaagctgcagatgtacttccagagccccaagaggtctggaggaggagaatgtgaggtgcggcaggaccccaggagccccagccgcttcctggtgttcttctacccagaagatgtgcggcagaaggtgctggagaggaagaaccacgagctggtgtggcagggcaagggcaccttcaagctgactgtgcagctgcctgccaccccagatgaaattgaccacgtgtttgaggaggagctgctgaccaaggagagcaagaccaaggaggatgtgaaggagccagatgtgtctgaggagctggacaccaagctgcccctggatggcggcctggacaagatggaggacatcccagaagaatgtgagaacatcagcagcctggtggcctttgagaacctgaaggccaacgtgacagacatcatgctgatcctgctggtggagaacatcagcggcctgagcaatgatgacttccaggtggagatcatccgggactttgatgtggccgtggtgaccttccagaagcacatcgacaccatccgctttgtggatgactgcaccaagcaccacagcatcaagcagctgcagctgagcccccggctgctggaggtgaccaacaccatccgggtggagaacctgcccccaggagcagatgactacagcctgaagctgttctttgagaacccctacaatggaggcggccgggtggccaacgtggagtacttccctgaggagagcagcgccctgattgagttctttgacaggaaggtgctggacaccatcatggccaccaagctggacttcaacaagatgcccctgagcgtcttcccctactatgccagcctgggcacagccctgtatggcaaggagaagcccctcatcaagctgcctgccccctttgaggagagcctggacctgcccctgtggaagttcctgcagaagaagaaccacctgattgaggagatcaatgatgagatgaggcgctgccactgtgagctgacctggagccagctgagcggcaaggtgaccatccggcctgctgccaccctggtgaatgaaggccggccccgcatcaagacctggcaggccgacaccagcaccaccctgagcagcatccgcagcaagtacaaggtgaaccccatcaaggtggaccccaccatgtgggacaccatcaagaatgatgtgaaggatgaccgcatcctgattgaatttgacaccctgaaggagatggtgatcctggccggcaagtcagaagatgtgcagagcattgaggtgcaggtgcgggagctgattgagagcaccacccagaagatcaagcgggaggagcagagcctgaaggagaagatgatcatcagccctggccgctacttcctgctgtgccacagcagcctgctggaccacctgctgacagaatgtcctgagattgagatctgctatgacagagtgacccagcacctgtgcctgaagggccccagcgcagatgtgtacaaggccaagtgtgagatccaggagaaggtgtacaccatggcccagaagaacatccaggtgtccccagagatcttccagttcctgcagcaggtgaactggaaggagttcagcaagtgcctcttcatcgcccagaagatcctggccctgtatgagctggagggcaccaccgtgctgctgaccagctgcagcagcgaggccctgctggaggccgagaagcagatgctgagcgccctgaactacaagagaattgaggtggagaacaaggaggtgctgcacggcaagaagtggaagggcctgacccacaacctgctgaagaagcagaacagcagccccaacacagtcatcatcaatgagctgaccagcgagaccacagctgaggtgatcatcaccggctgtgtgaaggaggtgaatgagacctacaagctgctcttcaactttgtggagcagaacatgaagattgagcggctggtggaggtgaagcccagcctggtgattgactacctgaagacagagaagaagctgttctggcccaagatcaagaaggtgaatgtgcaggtgtccttcaaccctgagaacaagcagaagggcatcctgctgaccggcagcaagacagaggtgctgaaggctgtggacatcgtgaagcaggtgtgggacagcgtgtgtgtgaagtctgtgcacacagacaagccaggggccaagcagttcttccaggacaaggcccgcttctaccagagcgagatcaagaggctgtttggctgctacatcgagctgcaggagaatgaggtgatgaaggagggcggcagccctgctggccagaagtgcttcagcaggacagtgctggcccctggggtggtgctgattgtgcagcagggcgacctggcccggctgcctgtggatgtggtggtgaatgccagcaatgaagacctgaagcactacggcggcctggccgccgccctgagcaaggctgctggccctgagctgcaggccgactgtgaccagatcgtgaagcgggagggccgcctgctgcctggaaatgccaccatcagcaaggccggcaagctgccctaccaccacgtgattcatgctgtgggcccccgctggagcggctatgaggccccccgctgtgtgtacctgctgcggcgggctgtgcagctgagcctgtgcctggccgagaagtacaagtaccgcagcatcgccatcccagccatcagcagtggagtgtttggcttccccctgggccgctgtgtggagaccatcgtgtctgccatcaaggagaacttccagttcaagaaggatggccactgcctgaaggagatctacctggtggatgtgtctgagaagacagtggaggcctttgctgaggccgtgaagacagtgttcaaggccaccctgcctgacacagctgcccctcctggcctgcccccagctgctgctggccctgggaagacctcctgggagaagggcagcctggtgtccccaggcggcctgcagatgctgctggtgaaggagggcgtgcagaatgccaagacagatgtggtggtgaacagcgtgcccctggacctggtgctgagccggggccccctgagcaagagcctgctggagaaggccggccctgagctgcaggaggagctggacacagtgggccagggcgtggccgtgtccatgggcaccgtgctgaagaccagctcctggaacctggactgccgctacgtgctgcacgtggtggcccctgagtggagaaatggcagcaccagcagcctgaagatcatggaggacatcatccgggagtgcatggagatcacagagagcctgagcctgaagagcatcgccttccctgccatcggcaccggcaacctgggcttccccaagaacatctttgctgagctgatcatcagcgaggtgttcaagttcagcagcaagaaccagctgaagaccctgcaggaggtgcacttcctgctgcaccccagcgaccacgagaacatccaggccttcagtgatgaatttgcccggcgggccaatggaaacctggtgtctgacaagatccccaaggccaaggacacccagggcttctatggaacagtgagcagcccagattctggagtgtatgagatgaagattggcagcatcatcttccaggtggccagcggggacatcaccaaggaggaggctgatgtgattgtgaacagcaccagcaacagcttcaacctgaaggccggcgtgtccaaggccatcctggagtgtgccggccagaatgtggagagagaatgttcccagcaggcccagcagaggaagaatgactacatcatcaccggcggcggcttcctgcgctgcaagaacatcatccacgtgattggaggaaatgatgtgaagagctctgtgtcctctgtgctgcaggagtgtgagaagaagaactacagcagcatctgcctgcctgccatcggcactggaaatgccaagcagcacccagacaaggtggccgaggccatcattgatgccatcgaggactttgtgcagaagggcagcgcccagagcgtgaagaaggtgaaggtggtgatcttcctgccccaggtgctggatgtgttctacgccaacatgaagaagcgggagggcacccagctgagcagccagcagagcgtgatgagcaagctggccagcttcctgggcttcagcaagcagagcccccagaagaagaaccacctggtgctggagaagaagacagagagcgccaccttccgggtgtgtggggagaatgtgacctgtgtggagtatgccatctcctggctgcaggacctgattgagaaggagcagtgcccctacaccagtgaagatgagtgcatcaaggactttgatgagaaggagtaccaggagctgaatgagctgcagaagaagctgaacatcaacatcagcctggaccacaagaggcccctcatcaaggtgctgggcatcagcagagatgtgatgcaggccagagatgaaattgaggccatgatcaagagggtgcggctggccaaggagcaggagagcagagctgactgcatcagcgagttcatcgagtggcagtacaatgacaacaacaccagccactgcttcaacaagatgaccaacctgaagctggaggatgcccggcgggagaagaagaagacagtggatgtgaagatcaaccaccgccactacacagtgaacctgaacacctacacagccacagacaccaagggccacagcctgtctgtgcagaggctgaccaagagcaaggtggacatcccagcccactggagcgacatgaagcagcagaacttctgtgtggtggagctgctgcccagcgaccctgagtacaacacagtggccagcaagttcaaccagacctgcagccacttcagaattgagaagattgaaagaatccagaacccagacctgtggaacagctaccaggccaagaagaagaccatggatgccaagaatggccagaccatgaatgagaagcagctgttccacggcacagatgctggctctgtgccccacgtgaacagaaatggcttcaacagaagctatgctgggaagaatgctgtggcctacggcaagggcacctactttgctgtgaatgccaactacagcgccaatgacacctacagcaggccagatgccaatggaaggaagcacgtgtactacgtgcgggtgctgaccggcatctacacccacggcaaccacagcctcatcgtgccccccagcaagaacccccagaaccccacagacctgtatgacacagtgacagacaacgtgcaccaccccagcctgtttgtggccttctatgactaccaggcctacccagagtacctgatcaccttcaggaagtag

SEQ ID NO: 164515 - DNA, 585 bp, synthetic construct
  misc_feature 1..585: note = Description of Artificial Sequence: Synthetic coding sequence
  source 1..585: mol_type = other DNA
tgagtgagaagaagagctgagctgaggatggctgtgcccggcagcttccccctgctggtggagggctcctggggccctgacccccccaagaacctgaacaccaagctgcagatgtacttccagagccccaagaggtctgggggcggggagtgtgaggtgcggcaggaccccaggagccccagccgcttcctggtgttcttctacccagaagatgtgcggcagaaggtgctggagaggaagaaccacgagctggtgtggcagggcaagggcaccttcaagctgactgtgcagctgcctgccaccccagatgaaattgaccacgtgtttgaggaggagctgctgaccaaggagagcaagaccaaggaggatgtgaaggagccagacaccatccgctttgtggatgactgcaccaagcaccacagcatcaagcagctgcagctgagcccccggctgctggaggtgaccaacaccatccgggtggagaacctgcccccaggagcagatgactacagcctgaagctgttctttgagaacccctacaatggaggcggccgggtggccaacgtggagtacttccctgagtag

SEQ ID NO: 164516 - DNA, 1335 bp, synthetic construct
  misc_feature 1..1335: note = Description of Artificial Sequence: Synthetic coding sequence
  source 1..1335: mol_type = other DNA
atgctgcagagaattggcctcatcttcctgcacaacatcgtggtggtgagcaactgcttctacttccaggccttcctggatgagttcaccaactggagccgcatcaaccccaacaaggcccgcatccccatggccggggacacccagggcgtggtgggcaccgtgtccaagccctgcttcaccgcctatgagatgaagattggagccatcaccttccaggtggccaccggggacatcgccacagagcaggtggatgtgattgtgaacagcacagcccggaccttcaacaggaagtctggagtgtcccgggccatcctggagggcgccggccaggccgtggagagtgaatgtgctgtgctggccgcccagccccaccgggacttcatcatcacccctgggggctgcctgaagtgcaagatcatcatccacgtgcctgggggcaaggatgtgaggaagacagtgacctctgtgctggaggagtgtgagcagaggaagtacacctctgtgtccctgcctgccatcggcactggaaatgccggcaagaaccccatcaccgtggccgacaacatcattgatgccatcgtggacttcagcagccagcacagcacccccagcctgaagacagtgaaggtggtgatcttccagcctgagctgctgaacatcttctatgacagcatgaagaagagggacctgagcgccagcctgaacttccagagcaccttctccatgaccacctgcaacctgcctgagcactggacagacatgaaccaccagctgttctgcatggtgcagctggagcccggccagagcgagtacaacaccatcaaggacaagttcaccaggacctgcagcagctatgccatcgagaagattgagcgcatccagaatgccttcctgtggcagagctaccaggtgaagaagaggcagatggacatcaagaatgaccacaagaacaatgaaaggctgctcttccatggaacagatgctgacagcgtgccctacgtgaaccagcacggcttcaacagaagctgtgccggcaagaatgctgtgtcctatggcaagggcacctactttgctgtggatgccagctacagcgccaaggacacctacagcaagccagacagcaatggaaggaagcacatgtatgtggtgcgggtgctgactggagtcttcaccaagggccgggccggcctggtgaccccaccacccaagaacccccacaaccccacagacctgtttgattctgtgaccaacaacaccaggagccccaagctgtttgtggtgttctttgacaaccaggcctacccagagtacctgatcaccttcaccgcctag

SEQ ID NO: 164517 - DNA, 2037 bp, synthetic construct
  misc_feature 1..2037: note = Description of Artificial Sequence: Synthetic coding sequence
  source 1..2037: mol_type = other DNA
atggccgcccctggccccctgcctgctgctgccctgagccctggggcccccaccccccgggagctgatgcacggcgtggccggcgtgaccagcagagctggccgggaccgggaggccggctctgtgctgcctgctggcaacagaggagccaggaaggccagcagaagaagcagcagccgctccatgagccgggacaacaagttcagcaagaaggactgcctgagcatcagaaatgtggtggccagcatccagaccaaggagggcctgaacctgaagctgatctctggagatgtgctgtacatctgggcagatgtgattgtgaacagcgtgcccatgaacctgcagctgggcggcggccccctgagccgggccttcctgcagaaggccggccccatgctgcagaaggagctggatgacagaagaagagaaacagaggagaaggtgggcaacatcttcatgaccagcggctgcaacctggactgcaaggctgtgctgcatgctgtggccccctactggaacaacggggctgagacctcctggcagatcatggccaacatcatcaagaagtgcctgaccaccgtggaggtgctgtccttcagcagcatcaccttccccatgattggaacaggcagcctgcagttccccaaggctgtgtttgccaagctgatcctgtctgaggtgtttgagtacagcagcagcacccggcccatcaccagccccctgcaggaggtgcacttcctggtgtacaccaatgatgatgagggctgccaggccttcctggatgagttcaccaactggagccgcatcaaccccaacaaggcccgcatccccatggccggggacacccagggcgtggtgggcaccgtgtccaagccctgcttcaccgcctatgagatgaagattggagccatcaccttccaggtggccaccggggacatcgccacagagcaggtggatgtgattgtgaacagcacagcccggaccttcaacaggaagtctggagtgtcccgggccatcctggagggcgccggccaggccgtggagagtgaatgtgctgtgctggccgcccagccccaccgggacttcatcatcacccctgggggctgcctgaagtgcaagatcatcatccacgtgcctgggggcaaggatgtgaggaagacagtgacctctgtgctggaggagtgtgagcagaggaagtacacctctgtgtccctgcctgccatcggcactggaaatgccggcaagaaccccatcaccgtggccgacaacatcattgatgccatcgtggacttcagcagccagcacagcacccccagcctgaagacagtgaaggtggtgatcttccagcctgagctgctgaacatcttctatgacagcatgaagaagagggacctgagcgccagcctgaacttccagagcaccttctccatgaccacctgcaacctgcctgagcactggacagacatgaaccaccagctgttctgcatggtgcagctggagcccggccagagcgagtacaacaccatcaaggacaagttcaccaggacctgcagcagctatgccatcgagaagattgagcgcatccagaatgccttcctgtggcagagctaccaggtgaagaagaggcagatggacatcaagaatgaccacaagaacaatgaaaggctgctcttccatggaacagatgctgacagcgtgccctacgtgaaccagcacggcttcaacagaagctgtgccggcaagaatgctgtgtcctatggcaagggcacctactttgctgtggatgccagctacagcgccaaggacacctacagcaagccagacagcaatggaaggaagcacatgtatgtggtgcgggtgctgactggagtcttcaccaagggccgggccggcctggtgaccccaccacccaagaacccccacaaccccacagacctgtttgattctgtgaccaacaacaccaggagccccaagctgtttgtggtgttctttgacaaccaggcctacccagagtacctgatcaccttcaccgcctag

SEQ ID NO: 164518 - DNA, 1278 bp, synthetic construct
  misc_feature 1..1278: note = Description of Artificial Sequence: Synthetic coding sequence
  source 1..1278: mol_type = other DNA
atgaagcacacagccttcctggatgagttcaccaactggagccgcatcaaccccaacaaggcccgcatccccatggccggggacacccagggcgtggtgggcaccgtgtccaagccctgcttcaccgcctatgagatgaagatcggggccatcaccttccaggtggccactggagacatcgccacagagcaggtggatgtgattgtgaacagcacagcccggaccttcaacaggaagagcggcgtgtcccgggccatcctggagggcgccggccaggccgtggagagtgaatgtgctgtgctggccgcccagccccaccgggacttcatcatcaccccaggcggctgcctgaagtgcaagatcatcatccacgtgcctgggggcaaggatgtgaggaagacagtgacctctgtgctggaggagtgtgagcagaggaagtacacctctgtgtccctgcctgccatcggcactggaaatgctgggaagaaccccatcaccgtggccgacaacatcattgatgccatcgtggacttcagcagccagcacagcacccccagcctgaagacagtgaaggtggtgatcttccagcctgagctgctgaacatcttctatgacagcatgaagaagagggacctgagcgccagcctgaacttccagagcaccttctccatgaccacctgcaacctgcctgagcactggacagacatgaaccaccagctgttctgcatggtgcagctggagcccggccagagcgagtacaacaccatcaaggacaagttcaccaggacctgcagcagctatgccatcgagaagattgaaagaatccagaatgccttcctgtggcagagctaccaggtgaagaagaggcagatggacatcaagaatgaccacaagaacaatgaaaggctgctcttccacggcacagatgctgacagcgtgccctacgtgaaccagcacggcttcaacagaagctgtgccggcaagaatgctgtgtcctatggcaagggcacctactttgctgtggatgccagctacagcgccaaggacacctacagcaagccagacagcaatggaaggaagcacatgtatgtggtgcgggtgctgactggagtcttcaccaagggccgggccggcctggtgaccccaccacccaagaacccccacaaccccacagacctgtttgacagcgtgaccaacaacaccaggagccccaagctgtttgtggtgttctttgacaaccaggcctacccagagtacctgatcaccttcaccgcctag

SEQ ID NO: 164519 - DNA, 2565 bp, synthetic construct
  misc_feature 1..2565: note = Description of Artificial Sequence: Synthetic coding sequence
  source 1..2565: mol_type = other DNA
atggacttctccatggtggccggggccgccgcctacaatgagaagagcggccgcatcaccagcctgagcctgctcttccagaaggtgtttgcccagatcttcccccagtggaggaaaggaaacacagaggagtgcctgccctacaagtgcagcgagactggagccctgggggagaactacagctggcagatccccatcaaccacaatgacttcaagatcctgaagaacaatgaaaggcagctgtgtgaggtgctgcagaacaagtttggctgcatcagcaccctggtgtcccctgtgcaggagggcaacagcaagagcctgcaggtgttcaggaagatgctgaccccccgcatcgagctgtctgtgtggaaggatgacctgaccacccatgctgtggatgctgtggtgaatgctgccaatgaagacctgctgcatggaggcggcctggccctggccctggtgaaggccggcggctttgagatccaggaggagagcaagcagtttgtggcccgctatggcaaggtgtctgctggggagattgctgtgactggagctggccgcctgccctgcaagcagatcatccatgctgtgggcccccgctggatggagtgggacaagcagggctgcaccgggaagctgcagagggccatcgtgtccatcctgaactacgtgatctacaagaacacccacatcaagacagtggccatcccagccctgagcagcggcatcttccagttccccctgaacctgtgcaccaagaccatcgtggagaccatccgggtgtccctgcagggcaagcccatgatgagcaacctgaaggagatccacctggtgtccaatgaagaccccaccgtggccgccttcaaggccgccagcgagttcatcctgggcaagtctgagctgggccaggagaccacccccagcttcaatgccatggtggtgaacaacctgaccctgcagatcgtgcagggccacatcgagtggcagacagcagatgtgattgtgaacagcgtgaacccccatgacatcaccgtgggccctgtggccaagagcatcctgcagcaggccggcgtggagatgaagtctgagttcctggccaccaaggccaagcagttccagaggagccagctggtgctggtgaccaagggcttcaacctcttctgcaagtacatctaccacgtgctgtggcacagcgagttccccaagccccagatcctgaagcacgccatgaaggagtgcctggagaagtgcatcgagcagaacatcaccagcatctccttccctgccctgggcaccggcaacatggagatcaagaaggagacagctgctgagatcctgtttgatgaggtgctgacctttgccaaggaccacgtgaagcaccagctgactgtgaagtttgtgatcttccccacagacctggagatctacaaggccttcagcagcgagatggccaagaggagcaagatgctgagcctgaacaactacagcgtgccccagagcacccgggaggagaagagagaaaatggcctggaggcccggagccctgccatcaacctgatgggcttcaacgtggaggagatgtatgaggcccacgcctggatccagaggatcctgagcctgcagaaccaccacatcatcgagaacaaccacatcctgtacctgggcaggaaggagcatgacatcctgagccagctgcagaagaccagctctgtgtccatcacagagatcatcagccctggccgcacagagctggagattgagggcgcccgggctgacctgattgaggtggtgatgaacatcgaggacatgctgtgcaaggtgcaggaggagatggccaggaagaaggagcggggcctgtggaggagcctgggccagtggaccatccagcagcagaagacccaggatgagatgaaggagaacatcatcttcctgaagtgccctgtgccccccacccaggagctgctggaccagaagaagcagtttgagaagtgtggcctgcaggtgctgaaggtggagaagattgacaatgaggtgctgatggccgccttccagaggaagaagaagatgatggaggagaagctgcaccggcagcctgtgagccacaggctcttccagcaggtgccctaccagttctgcaatgtggtgtgccgggtgggcttccagaggatgtacagcaccccctgtgaccccaagtacggggccggcatctacttcaccaagaacctgaagaacctggccgagaaggccaagaagatctctgctgctgacaagctgatctacgtgtttgaggccgaggtgctgaccggcttcttctgccagggccaccccctgaacatcgtgcccccacccctgagccctggggccattgatggccatgacagcgtggtggacaacgtgagcagccctgagacctttgtgatcttcagcggcatgcaggccatcccccagtacctgtggacctgcacccaggagtatgtgcagagccaggactacagcagcggccccatgaggccctttgcccagcacccctggaggggctttgccagcggcagccctgtggactag

SEQ ID NO: 164520 - DNA, 2334 bp, synthetic construct
  misc_feature 1..2334: note = Description of Artificial Sequence: Synthetic coding sequence
  source 1..2334: mol_type = other DNA
atgtctgtgtcctgtgtgaagagcagccgcatcagcctggccgtgtccctgccctggagcctgcagttcaggaaggccacagccaacctgtgtgtgttcaggaagatgctgaccccaagaattgagctgtctgtgtggaaggatgacctgaccacccatgctgtggatgctgtggtgaatgctgccaatgaagacctgctgcacggcggcggcctggccctggccctggtgaaggccggcggctttgagatccaggaggagagcaagcagtttgtggcccgctatggcaaggtgtctgctggggagattgctgtgactggagctggccgcctgccctgcaagcagatcatccatgctgtgggcccccgctggatggagtgggacaagcagggctgcaccgggaagctgcagagggccatcgtgtccatcctgaactacgtgatctacaagaacacccacatcaagacagtggccatcccagccctgagcagcggcatcttccagttccccctgaacctgtgcaccaagaccatcgtggagaccatccgggtgtccctgcagggcaagcccatgatgagcaacctgaaggagatccacctggtgtccaatgaagaccccaccgtggccgccttcaaggccgccagcgagttcatcctgggcaagtctgagctgggccaggagaccacccccagcttcaatgccatggtggtgaacaacctgaccctgcagatcgtgcagggccacatcgagtggcagacagcagatgtgattgtgaacagcgtgaacccccatgacatcaccgtgggccctgtggccaagagcatcctgcagcaggccggcgtggagatgaagtctgagttcctggccaccaaggccaagcagttccagaggagccagctggtgctggtgaccaagggcttcaacctcttctgcaagtacatctaccacgtgctgtggcacagcgagttccccaagccccagatcctgaagcacgccatgaaggaatgtctggagaagtgcatcgagcagaacatcaccagcatctccttccctgccctgggcactggaaacatggagatcaagaaggagacagctgctgagatcctgtttgatgaggtgctgacctttgccaaggaccacgtgaagcaccagctgactgtgaagtttgtgatcttccccacagacctggagatctacaaggccttcagcagcgagatggccaagaggagcaagatgctgagcctgaacaactacagcgtgccccagagcacccgggaggagaagcgggagaatggcctggaggcccggagccctgccatcaacctgatgggcttcaacgtggaggagatgtatgaggcccacgcctggatccagaggatcctgagcctgcagaaccaccacatcatcgagaacaaccacatcctgtacctgggcaggaaggagcatgacatcctgagccagctgcagaagaccagctctgtgtccatcacagagatcatcagccctggccgcacagagctggagattgaaggagcccgggctgacctgattgaggtggtgatgaacatcgaggacatgctgtgcaaggtgcaggaggagatggccaggaagaaggagcggggcctgtggaggagcctgggccagtggaccatccagcagcagaagacccaggatgagatgaaggagaacatcatcttcctgaagtgccctgtgccccccacccaggagctgctggaccagaagaagcagtttgagaagtgtggcctgcaggtgctgaaggtggagaagattgacaatgaggtgctgatggccgccttccagaggaagaagaagatgatggaggagaagctgcaccggcagcctgtgagccacaggctcttccagcaggtgccctaccagttctgcaatgtggtgtgccgggtgggcttccagaggatgtacagcaccccctgtgaccccaagtatggagctggcatctacttcaccaagaacctgaagaacctggccgagaaggccaagaagatctctgctgctgacaagctgatctacgtgtttgaagctgaggtgctgaccggcttcttctgccagggccaccccctgaacatcgtgcccccacccctgagccctggggccattgatggccatgattctgtggtggacaacgtgagcagccctgagaccttcgtcatcttcagcggcatgcaggccatcccccagtacctgtggacctgcacccaggagtatgtgcagagccaggactacagcagcggccccatgaggccctttgcccagcacccctggaggggctttgccagcggcagccctgtggactag

SEQ ID NO: 164521 - DNA, 2460 bp, synthetic construct; identical to SEQ ID NO: 164508
  misc_feature 1..2460: note = Description of Artificial Sequence: Synthetic coding sequence
  source 1..2460: mol_type = other DNA

SEQ ID NO: 164522 - DNA, 1440 bp, synthetic construct
  misc_feature 1..1440: note = Description of Artificial Sequence: Synthetic coding sequence
  source 1..1440: mol_type = other DNA
atgtctgatggctttgaccgggcccctggagctggccggggccgcagccggggcctgggccggggcggcggcggccctgagggcggcggcttccccaatggagctggccctgctgagcgggcccggcaccagcccccccagcccaaggcccctggcttcctgcagcccccacccctgcggcagcccaggaccaccccacctcctggggcccagtgtgaggtgcctgccagcccccagaggcccagcaggcctggggccctgcctgagcagacccggcccctgcgggccccacccagcagccaggacaagatcccccagcagaacagcgagagcgccatggccaagccccaggtggtggtggcccctgtgctgatgagcaagctgtctgtgaatgcccctgagttctaccccagcggctacagcagcagctacacagagagctatgaagatggctgtgaggactaccccaccctgtctgaatatgtgcaggacttcctgaaccacctgacagagcagcccggcagctttgaaacagaaattgagcagtttgctgagaccctgaatggctgtgtgaccacagatgatgccctgcaggagctggtggagctgatctaccagcaggccaccagcatccccaacttctcctacatgggcgcccggctgtgcaactacctgagccaccacctgaccatcagcccccagagcggcaacttccggcagctgctgctgcagcgctgcaggacagaatatgaggtgaaggaccaggccgccaagggagatgaggtgaccaggaagcgcttccacgcctttgtgctcttcctgggggagctgtacctgaacctggagatcaagggcaccaacggccaggtgaccagggctgacatcctgcaggtgggcctgcgggagctgctgaatgccctcttcagcaaccccatggatgacaacctgatctgtgctgtgaagctgctgaagctgaccggctctgtgctggaggatgcctggaaggagaagggcaagatggacatggaggagatcatccagagaattgaaaatgtggtgctggatgccaactgcagcagagatgtgaagcagatgctgctgaagctggtggagctgcggagcagcaactggggccgggtgcacgccaccagcacctaccgggaggccaccccagaaaatgaccccaactacttcatgaatgagcccaccttctacaccagtgatggagtgcccttcaccgctgctgaccctgactaccaggagaagtaccaggagctgctggagcgggaggacttcttcccagactatgaggagaatggaacagacctgagcggggccggggacccctacctggatgacattgatgatgagatggaccctgagattgaggaggcctatgagaagttctgcctggagagcgagaggaagaggaagcagtag

SEQ ID NO: 164523 - DNA, 1104 bp, synthetic construct
  misc_feature 1..1104: note = Description of Artificial Sequence: Synthetic coding sequence
  source 1..1104: mol_type = other DNA
atggccaagccccaggtggtggtggcccctgtgctgatgagcaagctgtctgtgaatgcccctgagttctaccccagcggctacagcagcagctacacagagagctatgaagatggctgtgaggactaccccaccctgtctgaatatgtgcaggacttcctgaaccacctgacagagcagcccggcagctttgaaacagaaattgagcagtttgctgagaccctgaatggctgtgtgaccacagatgatgccctgcaggagctggtggagctgatctaccagcaggccaccagcatccccaacttctcctacatgggcgcccggctgtgcaactacctgagccaccacctgaccatcagcccccagagcggcaacttccggcagctgctgctgcagcgctgcaggacagaatatgaggtgaaggaccaggccgccaagggagatgaggtgaccaggaagcgcttccacgcctttgtgctcttcctgggggagctgtacctgaacctggagatcaagggcaccaacggccaggtgaccagggctgacatcctgcaggtgggcctgcgggagctgctgaatgccctcttcagcaaccccatggatgacaacctgatctgtgctgtgaagctgctgaagctgaccggctctgtgctggaggatgcctggaaggagaagggcaagatggacatggaggagatcatccagagaattgaaaatgtggtgctggatgccaactgcagcagagatgtgaagcagatgctgctgaagctggtggagctgcggagcagcaactggggccgggtgcacgccaccagcacctaccgggaggccaccccagaaaatgaccccaactacttcatgaatgagcccaccttctacaccagtgatggagtgcccttcaccgctgctgaccctgactaccaggagaagtaccaggagctgctggagcgggaggacttcttcccagactatgaggagaatggaacagacctgagcggggccggggacccctacctggatgacattgatgatgagatggaccctgagattgaggaggcctatgagaagttctgcctggagagcgagaggaagaggaagcagtag

SEQ ID NO: 164524 - DNA, 1203 bp, synthetic construct
  misc_feature 1..1203: note = Description of Artificial Sequence: Synthetic coding sequence
  source 1..1203: mol_type = other DNA
atgtctgatggctttgaccgggcccctgagcagacccggcccctgcgggccccacccagcagccaggacaagatcccccagcagaacagcgagagcgccatggccaagccccaggtggtggtggcccctgtgctgatgagcaagctgtctgtgaatgcccctgagttctaccccagcggctacagcagcagctacacagagagctatgaagatggctgtgaggactaccccaccctgtctgaatatgtgcaggacttcctgaaccacctgacagagcagcccggcagctttgaaacagaaattgagcagtttgctgagaccctgaatggctgtgtgaccacagatgatgccctgcaggagctggtggagctgatctaccagcaggccaccagcatccccaacttctcctacatgggcgcccggctgtgcaactacctgagccaccacctgaccatcagcccccagagcggcaacttccggcagctgctgctgcagcgctgcaggacagaatatgaggtgaaggaccaggccgccaagggagatgaggtgaccaggaagcgcttccacgcctttgtgctcttcctgggggagctgtacctgaacctggagatcaagggcaccaacggccaggtgaccagggctgacatcctgcaggtgggcctgcgggagctgctgaatgccctcttcagcaaccccatggatgacaacctgatctgtgctgtgaagctgctgaagctgactggatctgtgctggaggatgcctggaaggagaagggcaagatggacatggaggagatcatccagagaattgaaaatgtggtgctggatgccaactgcagcagagatgtgaagcagatgctgctgaagctggtggagctgcggagcagcaactggggccgggtgcacgccaccagcacctaccgggaggccaccccagaaaatgaccccaactacttcatgaatgagcccaccttctacaccagtgatggagtgcccttcaccgctgctgaccctgactaccaggagaagtaccaggagctgctggagcgggaggacttcttcccagactatgaagaaaatggaacagacctgtctggagctggggacccctacctggatgacattgatgatgagatggaccctgagattgaggaggcctatgagaagttctgcctggagagcgagaggaagaggaagcagtag

SEQ ID NO: 164525 - DNA, 507 bp, synthetic construct
  misc_feature 1..507: note = Description of Artificial Sequence: Synthetic coding sequence
  source 1..507: mol_type = other DNA
atggccaagccccaggtggtggtggcccctgtgctgatgagcaagctgtctgtgaatgcccctgagttctaccccagcggctacagcagcagctacacagagagctatgaagatggctgtgaggactaccccaccctgtctgaatatgtgcaggacttcctgaaccacctgacagagcagcccggcagctttgaaacagaaattgagcagtttgctgagaccctgaatggctgtgtgaccacagatgatgccctgcaggagctggtggagctgatctaccagcaggccaccagcatccccaacttctcctacatgggcgcccggctgtgcaactacctgagccaccacctgaccatcagcccccagagcggcaacttccggcagctgctgctgcagcgctgcaggacagaatatgaggtgaaggaccaggccgccaagggagatgaggtgaccaggaagcgcttccacgcctttgtgctcttcctgggggagctgtacctgaactag

SEQ ID NO: 164526 - DNA, 603 bp, synthetic construct
  misc_feature 1..603: note = Description of Artificial Sequence: Synthetic coding sequence
  source 1..603: mol_type = other DNA
atggccaagccccaggtggtggtggcccctgtgctgatgagcaagctgtctgtgaatgcccctgagttctaccccagcggctacagcagcagctacacagagagctatgaagatggctgtgaggactaccccaccctgtctgaatatgtgcaggacttcctgaaccacctgacagagcagcccggcagctttgaaacagaaattgagcagtttgctgagaccctgaatggctgtgtgaccacagatgatgccctgcaggagctggtggagctgatctaccagcaggccaccagcatccccaacttctcctacatgggcgcccggctgtgcaactacctgagccaccacctgaccatcagcccccagagcggcaacttccggcagctgctgctgcagcgctgcaggacagaatatgaggtgaaggaccaggccgccaagggagatgaggtgaccaggaagcgcttccacgcctttgtgctcttcctgggggagctgtacctgaacctggagatcaagggcaccaacggccaggtgaccagggctgacatcctgcaggtgggcctgcgggagctgctgaatgccctcttcagcaaccccatgtag

SEQ ID NO: 164527 - DNA, 1056 bp, synthetic construct
  misc_feature 1..1056: note = Description of Artificial Sequence: Synthetic coding sequence
  source 1..1056: mol_type = other DNA
atgtctgatggctttgaccgggcccctgagcagacccggcccctgcgggccccacccagcagccaggacaagatcccccagcagaacagcgagagcgccatggccaagccccaggtggtggtggcccctgtgctgatgagcaagctgtctgtgaatgcccctgagttctaccccagcggctacagcagcagctacacagagagctatgaagatggctgtgaggactaccccaccctgtctgaatatgtgcaggacttcctgaaccacctgacagagcagcccggcagctttgaaacagaaattgagcagtttgctgagaccctgaatggctgtgtgaccacagatgatgccctgcaggagctggtggagctgatctaccagcaggccaccagcatccccaacttctcctacatgggcgcccggctgtgcaactacctgagccaccacctgaccatcagcccccagagcggcaacttccggcagctgctgctgcagcgctgcaggacagaatatgaggtgaaggaccaggccgccaagggagatgaggtgaccaggaagcgcttccacgcctttgtgctcttcctgggggagctgtacctgaacctggagatcaagggcaccaacggccaggtgaccagggctgacatcctgcaggtgggcctgcgggagctgctgaatgccctcttcagcaaccccatggatgacaacctgatctgtgctgtgaagctgctgaagctgactggatctgtgctggaggatgcctggaaggagaagggcaagatggacatggaggagatcatccagagaattgaaaatgtggtgctggatgccaactgcagcagagatgtgaagcagatgctgctgaagctggtggagctgcggagcagcaactggggccgggtgcacgccaccagcacctaccgggaggccaccccagaaaatgaccccaactacttcatgaatgagcccaccttctacaccagtgatggagtgcccttcaccgctgctgaccctgacacctggatgatcctgatgatgcgctggacccagaggtag

SEQ ID NO: 164528 - DNA, 288 bp, synthetic construct
  misc_feature 1..288: note = Description of Artificial Sequence: Synthetic coding sequence
  source 1..288: mol_type = other DNA
atggccaagccccaggtggtggtggcccctgtgctgatgagcaagctgtctgtgaatgcccctgagttctaccccagcggctacagcagcagctacacagagagctatgaagatggctgtgaggactaccccaccctgtctgaatatgtgcaggacttcctgaaccacctgacagagcagcccggcagctttgaaacagaaattgagcagtttgctgagaccctgaatggctgtgtgaccacagatgatgccctgcaggagctggtggagctgatctaccagcagtag

SEQ ID NO: 164529 - DNA, 384 bp, synthetic construct
  misc_feature 1..384: note = Description of Artificial Sequence: Synthetic coding sequence
  source 1..384: mol_type = other DNA
atgaaggaccccagccgcagcagcaccagccccagcatcatcaatgaagatgtgatcatcaatggccacagccatgaagatgacaacccctttgctgagtacatgtggatggagaatgaggaggagttcaaccggcagatcgaggaggagctgtgggaggaggagttcatcgagcgctgcttccaggagatgctggaggaggaggaggagcacgagtggttcatcccagcccgggacctgccccagaccatggaccagatccaggaccagttcaatgacctggtgatcagtgatggcagcagcctggaggacctggtggtgaagagcaacctgaaccccaatgccaaggagtttgtgcctggggtgaagtatggcaacatctag

SEQ ID NO: 164530 - DNA, 384 bp, synthetic construct; identical to SEQ ID NO: 164529
  misc_feature 1..384: note = Description of Artificial Sequence: Synthetic coding sequence
  source 1..384: mol_type = other DNA

SEQ ID NO: 164531 - DNA, 282 bp, synthetic construct
  misc_feature 1..282: note = Description of Artificial Sequence: Synthetic coding sequence
  source 1..282: mol_type = other DNA
atgaaggaccccagccgcagcagcaccagccccagcatcatcaatgaagatgtgatcatcaatggccacagccatgaagatgacaacccctttgctgagtacatgtggatggagaatgaggaggagttcaaccggcagatcgaggaggagctgtgggaggaggagttcatcgagcgctgcttccaggagatgctggaggaggaggaggagcacgagtggttcatcccagcccgggacctgccccagaccatggaccagatccaggaccagttcaatgactag

SEQ ID NO: 164532 - DNA, 384 bp, synthetic construct; identical to SEQ ID NO: 164529
  misc_feature 1..384: note = Description of Artificial Sequence: Synthetic coding sequence
  source 1..384: mol_type = other DNA

SEQ ID NO: 164533 - DNA, 372 bp, synthetic construct
  misc_feature 1..372: note = Description of Artificial Sequence: Synthetic coding sequence
  source 1..372: mol_type = other DNA
atgaatggcagcaacatggccaacaccagccccagcgtgaagagcaaagaagaccagggcctgagcggccatgatgagaaggagaacccctttgctgagtacatgtggatggagaatgaggaggacttcaaccggcaggtggaggaggagctgcaggagcaggacttcctggaccgctgcttccaggagatgctggatgaggaggaccaggactggttcatccccagccgggacctgccccaggccatgggccagctgcagcagcagctgaatggcctgtctgtgtctgagggccatgattctgaggacatcctgagcaagagcaacctgaacccagatgccaaggagttcatccctggagagaagtactag

SEQ ID NO: 164534 - DNA, 1896 bp, synthetic construct
  misc_feature 1..1896: note = Description of Artificial Sequence: Synthetic coding sequence
  source 1..1896: mol_type = other DNA
atgaaccccagcacccccagctaccccacagccagcctgtatgtgggggacctgcacccagatgtgacagaggccatgctgtatgagaagttctccccagctggccccatcctgagcatccgcatctgccgggacctgatcaccagcggcagcagcaactatgcctacgtgaacttccagcacaccaaggatgctgagcacgccctggacaccatgaactttgatgtgatcaagggcaagcctgtgcgcatcatgtggagccagagggaccccagcctgaggaagagcggcgtgggcaacatctttgtgaagaacctggacaagagcatcaacaacaaggccctgtatgacacagtgtctgccttcggcaacatcctgagctgcaatgtggtgtgtgatgaaaatggcagcaagggctacggctttgtgcactttgagacccatgaggccgctgagcgggccatcaagaagatgaatggcatgctgctgaatggaaggaaggtgtttgtgggccagttcaagagcaggaaggagcgggaggccgagctgggcgcccgggccaaggagttccccaacgtgtacatcaagaactttggagaggacatggatgatgagcggctgaaggacctgtttgggaagtttggacctgccctgtctgtgaaggtgatgacagatgaaagtggcaagagcaaaggatttggatttgtgtcctttgaaagacatgaagatgcccagaaggctgtggatgagatgaatggcaaggagctgaatggcaagcagatctacgtgggccgggcccagaagaaggtggagcggcagacagagctgaagaggacctttgagcagatgaagcaggaccgcatcacccgctaccaggtggtgaacctgtatgtgaagaacctggatgatggcattgatgatgagcggctgaggaaggccttcagccccttcggcaccatcaccagcgccaaggtgatgatggagggcggccgcagcaaaggatttggatttgtgtgcttcagcagccctgaggaggccaccaaggctgtgacagagatgaatggaagaattgtggccaccaagcccctgtatgtggccctggcccagaggaaggaggagcggcaggcctacctgaccaatgagtacatgcagaggatggcctctgtgcgggctgtgcccaaccagagggccccacccagcggctacttcatgacagctgtgccccagacccagaaccacgccgcctactacccacccagccagatcgcccggctgcggcccagcccccgctggacagcccagggcgcccggccccaccccttccagaacaagcccagcgccatccggcctggggccccccgggtgcccttcagcaccatgaggcctgccagcagccaggtgccccgggtgatgagcacccagagggtggccaacaccagcacccagacagtgggccccaggcctgctgctgctgctgctgctgctgccaccccagctgtgaggacagtgccccgctacaagtatgctgctggggtgaggaacccccagcagcacagaaatgcccagccccaggtgaccatgcagcagctggccgtgcacgtgcagggccaggagaccctgacagccagccggctggccagcgccccaccccagaagcagaagcagatgctgggggagcggctcttccccctcatccaggccatgcaccccaccctggccggcaagatcaccggcatgctgctggagattgacaacagcgagctgctgtacatgctggagagccctgagagcctgcggagcaaggtggatgaagctgtggccgtgctgcaggcccaccaggccaaggaggccacccagaaggctgtgaacagcgccaccggggtgcccaccgtgtag

SEQ ID NO: 164535 - DNA, 1896 bp, synthetic construct
  misc_feature 1..1896: note = Description of Artificial Sequence: Synthetic coding sequence
  source 1..1896: mol_type = other DNA
atgaatgctgctgccagcagctaccccatggccagcctgtatgtgggggacctgcacagtgatgtgacagaggccatgctgtatgagaagttctccccagctggccctgtgctgagcatccgggtgtgccgggacatgatcaccaggaggagcctgggctacgcctacgtgaacttccagcagcctgcagatgctgagcgggccctggacaccatgaactttgatgtgatcaagggcaagcccatccgcatcatgtggagccagagggaccccagcctgaggaagagcggcgtgggcaatgtgttcatcaagaacctggacaagagcattgacaacaaggccctgtatgacaccttcagcgccttcggcaacatcctgagctgcaaggtggtgtgtgatgaaaatggcagcaagggctacgcctttgtgcactttgagacccaggaggccgctgacaaggccatcgagaagatgaatggcatgctgctgaatgacaggaaggtgtttgtgggccgcttcaagagcaggaaggagcgggaggccgagctgggcgccaaggccaaggagttcaccaacgtgtacatcaagaactttggagaggaggtggatgatgagagcctgaaggagctgttcagccagtttgggaagaccctgtctgtgaaggtgatgagggaccccaacgggaagagcaaaggatttggatttgtgtcctatgagaagcatgaagatgccaacaaggctgtggaggagatgaatggcaaggagatcagcggcaagatcatctttgtgggccgggcccagaagaaggtggagcggcaggccgagctgaagaggaagtttgagcagctgaagcaggagcgcatcagccgctaccagggcgtgaacctgtacatcaagaacctggatgacaccattgatgatgagaagctgaggaaggagttcagccccttcggcagcatcaccagcgccaaggtgatgctggaggatggccgcagcaaaggatttggatttgtgtgcttcagcagccctgaggaggccaccaaggctgtgacagagatgaatggaagaattgtgggcagcaagcccctgtatgtggccctggcccagaggaaggaggagaggaaggcccacctgaccaaccagtacatgcagagggtggccggcatgagggccctgcctgccaatgccatcctgaaccagttccagcctgctgctgggggctactttgtgcctgctgtgccccaggcccagggccggcccccctactacacccccaaccagctggcccagatgaggcccaacccccgctggcagcagggcggccggccccagggcttccagggcatgcccagcgccatccggcagagcggcccccggcccaccctgcggcacctggcccccactggaaatgccccagccagccggggcctgcccaccaccacccagagggtgggcgtgcccacagctgtgcagaacctggcccccagggctgctgtggccgccgccgcccccagggctgtggccccctacaagtatgccagctctgtgcgcagcccccacccagccatccagcccctgcaggccccccagcctgctgtgcacgtgcagggccaggagcccctgacagcctccatgctggccgccgccccaccccaggagcagaagcagatgctgggggagcggctcttccccctcatccagaccatgcacagcaacctggccggcaagatcaccggcatgctgctggagattgacaacagcgagctgctgcacatgctggagagccctgagagcctgcggagcaaggtggatgaggccgtggccgtgctgcaggcccaccacgccaagaaggaggccgcccagaaggtgggcgctgtggccgccgccaccagctag

SEQ ID NO: 164536 - DNA, 1935 bp, synthetic construct
  misc_feature 1..1935: note = Description of Artificial Sequence: Synthetic coding sequence
  source 1..1935: mol_type = other DNA
atgaatgctgctgccagcagctaccccatggccagcctgtatgtgggggacctgcacagtgatgtgacagaggccatgctgtatgagaagttctccccagctggccctgtgctgagcatccgggtgtgccgggacatgatcaccaggaggagcctgggctacgcctacgtgaacttccagcagcctgcagatgctgagcgggccctggacaccatgaactttgatgtgatcaagggcaagcccatccgcatcatgtggagccagagggaccccagcctgaggaagagcggcgtgggcaatgtgttcatcaagaacctggacaagagcattgacaacaaggccctgtatgacaccttcagcgccttcggcaacatcctgagctgcaaggtggtgtgtgatgaaaatggcagcaagggctacgcctttgtgcactttgagacccaggaggccgctgacaaggccatcgagaagatgaatggcatgctgctgaatgacaggaaggtgtttgtgggccgcttcaagagcaggaaggagcgggaggccgagctgggcgccaaggccaaggagttcaccaacgtgtacatcaagaactttggagaggaggtggatgatgagagcctgaaggagctgttcagccagtttgggaagaccctgtctgtgaaggtgatgagggaccccaacgggaagagcaaaggatttggatttgtgtcctatgagaagcatgaagatgccaacaaggctgtggaggagatgaatggcaaggagatcagcggcaagatcatctttgtgggccgggcccagaagaaggtggagcggcaggccgagctgaagaggaagtttgagcagctgaagcaggagcgcatcagccgctaccagggcgtgaacctgtacatcaagaacctggatgacaccattgatgatgagaagctgaggaaggagttcagccccttcggcagcatcaccagcgccaaggtgatgctggaggatggccgcagcaaaggatttggatttgtgtgcttcagcagccctgaggaggccaccaaggctgtgacagagatgaatggaagaattgtgggcagcaagcccctgtatgtggccctggcccagaggaaggaggagaggaaggcccacctgaccaaccagtacatgcagagggtggccggcatgagggccctgcctgccaatgccatcctgaaccagttccagcctgctgctgggggctactttgtgcctgctgtgccccaggcccagggccggcccccctactacacccccaaccagctggcccagatgaggcccaacccccgctggcagcagggcggccggccccagggcttccagggcatgcccagcgccatccggcagagcggcccccggcccaccctgcggcacctggcccccaccggctctgaatgtcctgaccggctggccatggactttggaggagctggagctgcccagcagggcctgacagacagctgccagagcggcggcgtgcccacagctgtgcagaacctggcccccagggctgctgtggccgctgctgcccccagggctgtggccccctacaagtatgccagctctgtgcgcagcccccacccagccatccagcccctgcaggccccccagcctgctgtgcacgtgcagggccaggagcccctgacagcctccatgctggccgccgccccaccccaggagcagaagcagatgctgggggagcggctcttccccctcatccagaccatgcacagcaacctggccggcaagatcaccggcatgctgctggagattgacaacagcgagctgctgcacatgctggagagccctgagagcctgcggagcaaggtggatgaagctgtggccgtgctgcaggcccaccacgccaagaaggaggccgcccagaaggtgggcgctgtggccgccgccaccagctag

SEQ ID NO: 164537 - DNA, 1983 bp, synthetic construct
  misc_feature 1..1983: note = Description of Artificial Sequence: Synthetic coding sequence
  source 1..1983: mol_type = other DNA
atgaatgctgctgccagcagctaccccatggccagcctgtatgtgggggacctgcacagtgatgtgacagaggccatgctgtatgagaagttctccccagctggccctgtgctgagcatccgggtgtgccgggacatgatcaccaggaggagcctgggctacgcctacgtgaacttccagcagcctgcagatgctgagcgggccctggacaccatgaactttgatgtgatcaagggcaagcccatccgcatcatgtggagccagagggaccccagcctgaggaagagcggcgtgggcaatgtgttcatcaagaacctggacaagagcattgacaacaaggccctgtatgacaccttcagcgccttcggcaacatcctgagctgcaaggtggtgtgtgatgaaaatggcagcaagggctacgcctttgtgcactttgagacccaggaggccgctgacaaggccatcgagaagatgaatggcatgctgctgaatgacaggaaggtgtttgtgggccgcttcaagagcaggaaggagcgggaggccgagctgggcgccaaggccaaggagttcaccaacgtgtacatcaagaactttggagaggaggtggatgatgagagcctgaaggagctgttcagccagtttgggaagaccctgtctgtgaaggtgatgagggaccccaacgggaagagcaaaggatttggatttgtgtcctatgagaagcatgaagatgccaacaaggctgtggaggagatgaatggcaaggagatcagcggcaagatcatctttgtgggccgggcccagaagaaggtggagcggcaggccgagctgaagaggaagtttgagcagctgaagcaggagcgcatcagccgctaccagggcgtgaacctgtacatcaagaacctggatgacaccattgatgatgagaagctgaggaaggagttcagccccttcggcagcatcaccagcgccaaggtgatgctggaggatggccgcagcaaaggatttggatttgtgtgcttcagcagccctgaggaggccaccaaggctgtgacagagatgaatggaagaattgtgggcagcaagcccctgtatgtggccctggcccagaggaaggaggagaggaaggcccacctgaccaaccagtacatgcagagggtggccggcatgagggccctgcctgccaatgccatcctgaaccagttccagcctgctgctgggggctactttgtgcctgctgtgccccaggcccagggccggcccccctactacacccccaaccagctggcccagatgaggcccaacccccgctggcagcagggcggccggccccagggcttccagggcatgcccagcgccatccggcagagcggcccccggcccaccctgcggcacctggcccccactggaaatgccccagccagccggggcctgcccaccaccacccagagggtgggctctgaatgtcctgaccggctggccatggactttggaggagctggagctgcccagcagggcctgacagacagctgccagagcggcggcgtgcccacagctgtgcagaacctggcccccagggctgctgtggccgctgctgcccccagggctgtggccccctacaagtatgccagctctgtgcgcagcccccacccagccatccagcccctgcaggccccccagcctgctgtgcacgtgcagggccaggagcccctgacagcctccatgctggccgccgccccaccccaggagcagaagcagatgctgggggagcggctcttccccctcatccagaccatgcacagcaacctggccggcaagatcaccggcatgctgctggagattgacaacagcgagctgctgcacatgctggagagccctgagagcctgcggagcaaggtggatgaagctgtggccgtgctgcaggcccaccacgccaagaaggaggccgcccagaaggtgggcgctgtggccgccgccaccagctag

SEQ ID NO: 164538 - DNA, 390 bp, synthetic construct
  misc_feature 1..390: note = Description of Artificial Sequence: Synthetic coding sequence
  source 1..390: mol_type = other DNA
atgaatgctgctgccagcagctaccccatggccagcctgtatgtgggggacctgcacagtgatgtgacagaggccatgctgtatgagaagttctccccagctggccctgtgctgagcatccgggtgtgccgggacatgatcaccaggaggagcctgggctacgcctacgtgaacttccagcagcctgcagatgctgagcgggccctggacaccatgaactttgatgtgatcaagggcaagcccatccgcatcatgtggagccagagggaccccagcctgaggaagagcggcgtgggcaatgtgttcatcaagaacctggacaagagcattgacaacaaggccctgtatgacaccttcagcgccttcggcaacatcctgagctgcaagtag

SEQ ID NO: 164539 - DNA, 207 bp, synthetic construct
  misc_feature 1..207: note = Description of Artificial Sequence: Synthetic coding sequence
  source 1..207: mol_type = other DNA
tgactcatccagaccatgcacagcaacctggccggcaagatcaccggcatgctgctggagattgacaacagcgagctgctgcacatgctggagagccctgagagcctgcggagcaaggtggatgaagctgtggccgtgctgcaggcccaccacgccaagaaggaggccgcccagaaggtgggcgctgtggccgccgccaccagctag

SEQ ID NO: 164540 - DNA, 120 bp, synthetic construct
  misc_feature 1..120: note = Description of Artificial Sequence: Synthetic coding sequence
  source 1..120: mol_type = other DNA
atgaatgctgctgccagcagctaccccatggccagcctgtatgtgggggacctgcacagtgatgtgacagaggccatgctgtatgagaagttctccccagctggccctgtgctgtcctag

SEQ ID NO: 164541 - DNA, 1149 bp, synthetic construct
  misc_feature 1..1149: note = Description of Artificial Sequence: Synthetic coding sequence
  source 1..1149: mol_type = other DNA
atgggcagcggggagcccaacccagctgggaagaagaagaagtacctgaaggccgccctgtatgtgggggacctggaccctgatgtgacagaggacatgctgtacaagaagttccggcctgctggccccctgcgcttcacccgcatctgccgggaccctgtgaccaggagccccctgggctacggctacgtgaacttccgcttcccagcagatgctgagtgggccctgaacaccatgaactttgacctgatcaatggcaagcccttccggctgatgtggagccagccagatgaccggctgaggaagtctggagtgggcaacatcttcatcaagaacctggacaagagcattgacaacagagccctcttctacctgttcagcgcctttggaaacatcctgagctgcaaggtggtgtgtgatgacaatggcagcaagggctacgcctacgtgcactttgacagcctggccgccgccaacagagccatctggcacatgaatggagtgcggctgaacaaccggcaggtgtatgtgggccgcttcaagtttcctgaggagagagctgctgaggtgaggacccgggaccgggccaccttcaccaacgtgtttgtgaagaacattggagatgacattgatgatgagaagctgaaggagctgttctgtgaatatggccccacagaatctgtgaaggtgatcagagatgccagcggcaagagcaaaggatttggatttgtgcgctatgagacccatgaagctgcccagaaggctgtgctggacctgcacggcaagagcattgatggcaaggtgctgtatgtgggccgggcccagaagaagattgaaaggctggccgagctgcggaggagatttgagcggctgcggctgaaggagaagagcaggcctcctggggtgcccatctacatcaagaacctggatgagaccatcaatgatgagaagctgaaggaggagttcagcagctttggcagcatcagccgggccaaggtgatgatggaggtgggccagggcaaaggatttggagtggtgtgcttcagcagctttgaggaggccaccaaggctgtggatgagatgaatggaagaattgtgggcagcaagcccctgcacgtgaccctgggccaggcccggcggcgctgctag

SEQ ID NO: 164542 - DNA, 657 bp, synthetic construct
  misc_feature 1..657: note = Description of Artificial Sequence: Synthetic coding sequence
  source 1..657: mol_type = other DNA
atgaatggagtgcggctgaacaaccggcaggtgtatgtgggccgcttcaagtttcctgaggagagagctgctgaggtgaggacccgggaccgggccaccttcaccaacgtgtttgtgaagaacattggagatgacattgatgatgagaagctgaaggagctgttctgtgaatatggccccacagaatctgtgaaggtgatcagagatgccagcggcaagagcaaaggatttggatttgtgcgctatgagacccatgaagctgcccagaaggctgtgctggacctgcacggcaagagcattgatggcaaggtgctgtatgtgggccgggcccagaagaagattgaaaggctggccgagctgcggaggagatttgagcggctgcggctgaaggagaagagcaggcctcctggggtgcccatctacatcaagaacctggatgagaccatcaatgatgagaagctgaaggaggagttcagcagctttggcagcatcagccgggccaaggtgatgatggaggtgggccagggcaaaggatttggagtggtgtgcttcagcagctttgaggaggccaccaaggctgtggatgagatgaatggaagaattgtgggcagcaagcccctgcacgtgaccctgggccaggcccggcggcgctgctag

SEQ ID NO: 164543 - DNA, 1053 bp, synthetic construct
  misc_feature 1..1053: note = Description of Artificial Sequence: Synthetic coding sequence
  source 1..1053: mol_type = other DNA
atgctgtacaagaagttccggcctgctggccccctgcgcttcacccgcatctgccgggaccctgtgaccaggagccccctgggctacggctacgtgaacttccgcttcccagcagatgctgagtgggccctgaacaccatgaactttgacctgatcaatggcaagcccttccggctgatgtggagccagccagatgaccggctgaggaagtctggagtgggcaacatcttcatcaagaacctggacaagagcattgacaacagagccctcttctacctgttcagcgcctttggaaacatcctgagctgcaaggtggtgtgtgatgacaatggcagcaagggctacgcctacgtgcactttgacagcctggccgccgccaacagagccatctggcacatgaatggagtgcggctgaacaaccggcaggtgtatgtgggccgcttcaagtttcctgaggagagagctgctgaggtgaggacccgggaccgggccaccttcaccaacgtgtttgtgaagaacattggagatgacattgatgatgagaagctgaaggagctgttctgtgaatatggccccacagaatctgtgaaggtgatcagagatgccagcggcaagagcaaaggatttggatttgtgcgctatgagacccatgaagctgcccagaaggctgtgctggacctgcacggcaagagcattgatggcaaggtgctgtatgtgggccgggcccagaagaagattgaaaggctggccgagctgcggaggagatttgagcggctgcggctgaaggagaagagcaggcctcctggggtgcccatctacatcaagaacctggatgagaccatcaatgatgagaagctgaaggaggagttcagcagctttggcagcatcagccgggccaaggtgatgatggaggtgggccagggcaaaggatttggagtggtgtgcttcagcagctttgaggaggccaccaaggctgtggatgagatgaatggaagaattgtgggcagcaagcccctgcacgtgaccctgggccaggcccggcggcgctgctag

SEQ ID NO: 164544 - DNA, 957 bp, synthetic construct
  misc_feature 1..957: note = Description of Artificial Sequence: Synthetic coding sequence
  source 1..957: mol_type = other DNA
atgcccaagaggggcaagaagggagctgtggccgaggatggagatgagctgaggacagagcctgaggccaagaagagcaagacagctgccaagaagaatgacaaggaggccgccggggagggccctgccctgtatgaggaccccccagaccagaagaccagccccagcggcaagccagccaccctgaagatctgctcctggaatgtggatggcctgcgggcctggatcaagaagaagggcctggactgggtgaaggaggaggccccagacatcctgtgcctgcaggagaccaagtgcagcgagaacaagctgcctgctgagctgcaggagctgcccggcctgagccaccagtactggagcgcccccagcgacaaggagggctacagcggcgtgggcctgctgagccggcagtgccccctgaaggtgtcctatggaattggagatgaggagcatgaccaggagggccgggtcatcgtggccgagtttgacagctttgtgctggtgacagcctacgtgcccaatgccggccggggcctggtgcggctggagtaccggcagcgctgggatgaggccttcaggaagttcctgaagggcctggccagcaggaagcccctggtgctgtgtggggacctgaatgtggcccacgaggagattgacctgaggaaccccaagggcaacaagaagaatgccggcttcaccccccaggagcggcagggctttggagagctgctgcaggccgtgcccctggccgacagcttccgccacctgtaccccaacaccccctatgcctacaccttctggacctacatgatgaatgcccggagcaagaatgtgggctggaggctggactacttcctgctgagccacagcctgctgcctgccctgtgtgacagcaagatccgcagcaaggccctgggcagtgaccactgccccatcaccctgtacctggccctgtag

SEQ ID NO: 164545 - DNA, 891 bp, synthetic construct
  misc_feature 1..891: note = Description of Artificial Sequence: Synthetic coding sequence
  source 1..891: mol_type = other DNA
atggctgctgctgctgctgctgctgctgctgctggagctgctgggggccggggcagcggccctggaagaagaagacacctggtgcctggagctggaggagaggccggggagggcgcccctgggggcgctggggactatggaaatggcctggagagcgaggagctggagcctgaggagctgctgctggagcctgagcctgagcctgagcctgaggaggagcccccccggccccgggcccctcctggggcccctggccctggccctggcagcggggcccctggcagccaggaggaggaggaggagcccggcctggtggagggggaccctggagatggagccattgaagatcctgagctggaggccatcaaggcccgggtgcgggagatggaggaggaggccgagaagctgaaggagctgcagaatgaggtggagaagcagatgaacatgagccccccacctggaaatgccggccctgtgatcatgagcattgaggagaagatggaggctgatgcccggagcatctacgtgggcaatgtggactatggagccacagctgaggagctggaggcccacttccacggctgcggctctgtgaacagagtgaccatcctgtgtgacaagttcagcggccaccccaagggctttgcctacatcgagttcagtgacaaggagagcgtgaggaccagcctggccctggatgagagcctcttccggggccggcagatcaaggtgatccccaagaggaccaaccggcccggcatcagcaccacagaccggggcttcccccgggcccgctaccgggcccggaccaccaactacaacagcagccgcagccgcttctacagcggcttcaacagccggccccggggccgggtgtacagaagtggatag

SEQ ID NO: 164546 - DNA, 1557 bp, synthetic construct
  misc_feature 1..1557: note = Description of Artificial Sequence: Synthetic coding sequence
  source 1..1557: mol_type = other DNA
atgagctgtgtgaagctgtggcccagcggggccccagcccccctggtgtccattgaggagctggagaaccaggagctggtgggcaaaggaggcttcggcaccgtcttccgggcccagcacaggaagtggggctatgatgtggccgtgaagatcgtgaacagcaaggccatcagccgggaggtgaaggccatggccagcctggacaatgaatttgtgctgcggctggagggcgtgattgagaaggtgaactgggaccaggaccccaagccagccctggtgaccaagttcatggagaatggcagcctgagcggcctgctgcagagccagtgcccccggccctggcccctgctgtgccgcctgctgaaggaggtggtgctgggcatgttctacctgcatgaccagaaccctgtgctgctgcaccgggacctgaagcccagcaatgtgctgctggaccctgagctgcacgtgaagctggccgactttggcctgagcaccttccagggcggcagccagagcggcaccggcagcggggagcccggcggcaccctgggctacctggcccctgagctgtttgtgaatgtgaacaggaaggccagcacagccagtgatgtgtacagctttggcatcctgatgtgggccgtgctggccggccgggaggtggagctgcccacagagcccagcctggtgtatgaggccgtgtgcaaccggcagaaccggcccagcctggccgagctgccccaggccggccctgagaccccaggcctggagggcctgaaggagctgatgcagctgtgctggagcagcgagcccaaggaccggcccagcttccaggagtgcctgcccaagacagatgaggtgttccagatggtggagaacaacatgaatgctgctgtgtccacagtgaaggacttcctgagccagctgcggagcagcaacagacgcttcagcatccctgagagcggccagggcggcacagagatggatggcttccggaggaccatcgagaaccagcacagcagaaatgatgtgatggtgtctgagtggctgaacaagctgaacctggaggagccccccagctctgtgcccaagaagtgccccagcctgaccaagaggagccgggcccaggaggagcaggtgccccaggcctggacagctggcaccagcagtgacagcatggcccagcccccccagaccccagagaccagcaccttcaggaaccagatgcccagccccaccagcacaggcacccccagccctggcccccggggcaaccagggcgctgagcggcagggcatgaactggagctgcaggaccccagagcccaaccctgtgacaggccggcccctggtgaacatctacaactgcagcggcgtgcaggtgggggacaacaactacctgaccatgcagcagaccacagccctgcccacctggggcctggcccccagcggcaagggccggggcctgcagcaccccccacctgtgggcagccaggagggccccaaggaccctgaggcctggagccggccccagggctggtacaaccacagcggcaagtag

SEQ ID NO: 164547 - DNA, 2223 bp, synthetic construct
  misc_feature 1..2223: note = Description of Artificial Sequence: Synthetic coding sequence
  source 1..2223: mol_type = other DNA
atgctgggccggcggggcagtgactgggccgtgcctgcccctgagaccatgcccttccctgtgaccacccagggcagccagcagacccagcccccccagaagcactacggcatcaccagccccatcagcctggccgcccccaaggagacagactgtgtgctgacccagaagctgattgagaccctgaagccctttggagtgtttgaggaggaggaggagctgcagaggcgcatcctgatcctgggcaagctgaacaacctggtgaaggagtggatccgggagatcagcgagagcaagaacctgccccagagcgtgattgaaaatgtgggcggcaagatcttcaccttcggcagctaccgcctgggcgtgcacaccaagggagctgacattgatgccctgtgtgtggcccccaggcatgtggacagaagtgacttcttcaccagcttctatgacaagctgaagctgcaggaggaggtgaaggacctgcgggctgtggaggaggcctttgtgcctgtgatcaagctgtgctttgatggcatcgagattgacatcctgtttgcccggctggccctgcagaccatccctgaggacctggacctgagagatgacagcctgctgaagaacctggacatccgctgcatccgcagcctgaatggctgccgggtgacagatgagatcctgcacctggtgcccaacatcgacaacttccggctgaccctgcgggccatcaagctgtgggccaagaggcacaacatctacagcaacatcctgggcttcctgggcggcgtgtcctgggccatgctggtggcccggacctgccagctgtacccaaatgccatcgccagcaccctggtgcacaagttcttcctggtgttcagcaagtgggagtggcccaaccctgtgctgctgaagcagcctgaggagtgcaacctgaacctgcctgtgtgggacccccgggtgaaccccagcgaccgctaccacctgatgcccatcatcaccccagcctacccccagcagaacagcacctacaacgtgtctgtgtccaccaggatggtgatggtggaggagttcaagcagggcctggccatcacagatgagatcctgctgagcaaggccgagtggagcaagctgtttgaggcccccaacttcttccagaagtacaagcactacatcgtgctgctggccagcgcccccacagagaagcagaggctggagtgggtgggcctggtggagagcaagatccgcatcctggtgggcagcctggagaagaatgagttcatcaccctggcccacgtgaacccccagagcttccctgcccccaaggagaacccagacaaggaggagttccgcaccatgtgggtgattggcctggtgttcaagaagacagaaaattctgagaacctgtctgtggacctgacctatgacatccagagcttcacagacacagtgtaccggcaggccatcaacagcaagatgtttgaggtggacatgaagattgctgccatgcacgtgaagaggaagcagctgcaccagctgctgcccaaccacgtgctgcagaagaagaagaagcacagcacagagggcgtgaagctgacagccctgaatgacagcagcctggacctgtccatggacagcgacaacagcatgtctgtgcccagccccaccagcgccaccaagaccagccccctgaacagcagcggcagcagccagggcaggaacagccctgccccagctgtgacagctgcctctgtgaccaacatccaggccacagaggtgtctgtgccccaggtgaacagcagcgagagcagcggcggcaccagcagcgagagcatcccccagacagccacccagcctgccatcagccccccacccaagcccaccgtgtcccgggtggtgagcagcacccggctggtgaaccccccacccaggagcagtggaaatgctgccaccagcggaaatgctgccaccaagatccccacccccatcgtgggcgtgaagaggaccagcagcccccacaaggaggagagccccaagaagaccaagacagaggaggagcagctggacacagagaccagcaccacccagagcgagaccatccagacagctgccagcctgctggccagccagaagaccagcagcacagacctgagtgacatcccagccctgcctgccaaccccatccctgtgatcaagaacagcatcaagctgcggctgaacagatag

SEQ ID NO: 164548 - DNA, 858 bp, synthetic construct
  misc_feature 1..858: note = Description of Artificial Sequence: Synthetic coding sequence
  source 1..858: mol_type = other DNA
atgcccttccctgtgaccacccagggcagccagcagacccagcccccccagaagcactacggcatcaccagccccatcagcctggccgcccccaaggagacagactgtgtgctgacccagaagctgattgagaccctgaagccctttggagtgtttgaggaggaggaggagctgcagaggcgcatcctgatcctgggcaagctgaacaacctggtgaaggagtggatccgggagatcagcgagagcaagaacctgccccagagcgtgattgaaaatgtgggcggcaagatcttcaccttcggcagctaccgcctgggcgtgcacaccaagggagctgacattgatgccctgtgtgtggcccccaggcatgtggacagaagtgacttcttcaccagcttctatgacaagctgaagctgcaggaggaggtgaaggacctgcgggctgtggaggaggcctttgtgcctgtgatcaagctgtgctttgatggcatcgagattgacatcctgtttgcccggctggccctgcagaccatccctgaggacctggacctgagagatgacagcctgctgaagaacctggacatccgctgcatccgcagcctgaatggctgccgggtgacagatgagatcctgcacctggtgcccaacatcgacaacttccggctgaccctgcgggccatcaagctgtgggccaagaggcacaacatctacagcaacatcctgggcttcctgggcggcgtgtcctgggccatgctggtggcccggacctgccagctgtacccaaatgccatcgccagcaccctggtgcacaagttcttcctggtgttcagcaagtggtacgtgttccggctgtactag

SEQ ID NO: 164549 - DNA, 1911 bp, synthetic construct
  misc_feature 1..1911: note = Description of Artificial Sequence: Synthetic coding sequence
  source 1..1911: mol_type = other DNA
atgcccttccctgtgaccacccagggccccccccagcctgcccccccacccaacagatatggagtgagcagccccatcagcctggccgtgcccaaggagacagactgcctgctgacccagaggctgattgagaccctgcggccctttggagtgtttgaggaggaggaggagctgcagaggcgcatcctggtgctggagaagctgaacaacctggtgaaggagtggatccgggagatcagcgagagcaagagcctgccccagagcgtgattgaaaatgtgggcggcaagatcttcaccttcggcagctaccgcctgggcgtgcacaccaagggagctgacattgatgccctgtgtgtggcccccagccacgtggacagaagtgacttcttcaccagcttctacgccaagctgaagctgcaggaggaggtgaaggacctgcgggctgtggaggaggcctttgtgcctgtgatcaagctgtgctttgatggcatcgagattgacatcctgtttgcccggctggccctgcagaccatccctgaggacctggacctgagagatgacagcctgctgaagaacctggacatccgctgcatccgcagcctgaatggctgccgggtgacagatgagatcctgcacctggtgcccaacatcgacaacttccggctgaccctgcgggccatcaagctgtgggccaagtgccacaacatctacagcaacatcctgggcttcctgggcggcgtgtcctgggccatgctggtggcccggacctgccagctgtacccaaatgctgtggccagcaccctggtgaggaagttcttcctggtgttttctgagtgggagtggcccaaccctgtgctgctgaaggagcctgaggagaggaacctgaacctgcctgtgtgggacccccgggtgaaccccagcgaccgctaccacctgatgcccatcatcaccccagcctacccccagcagaacagcacctacaacgtgtccatcagcaccaggatggtgatgattgaggagttcaagcagggcctggccatcacccatgagatcctgctgagcaaggccgagtggagcaagctgtttgaggcccccagcttcttccagaagtacaagcactacatcgtgctgctggccagcgccagcacagagaagcagcacctggagtgggtgggcctggtggagagcaagatccgcatcctggtgggcagcctggagaagaatgagttcatcaccctggcccacgtgaacccccagagcttccctgcccccaaggagaacccagacatggaggagttccgcaccatgtgggtgattggcctgggcctgaagaagccagacaacagcgagatcctgagcattgacctgacctatgacatccagagcttcacagacacagtgtaccggcaggccgtgaacagcaagatgtttgagatgggcatgaagatcacagccatgcacctgcggaggaaggagctgcaccagctgctgccccaccacgtgctgcaggacaagaaggcccacagcacagagggccgccgcctgacagacctgaatgacagcagctttgacctgtctgctggctgtgagaacagcatgtctgtgcccagcagcaccagcaccatgaagacaggccccctcatcagcagcagccagggcaggaacagccctgccctggccgtgatgacagcctctgtggccaacatccaggccacagagttcagcctgcagcaggtgaacaccaatgaatcttctggagtggccctgaatgaaagcatcccccatgctgtgtcccagcctgccatcagccccagccccaaggccatggtggcccgggtggtgagcagcacctgcctgatcagccacccagacctgcaggagacccagcagcagacctacctgatcctgtag

SEQ ID NO: 164550 - DNA, 1737 bp, synthetic construct
  misc_feature 1..1737: note = Description of Artificial Sequence: Synthetic coding sequence
  source 1..1737: mol_type = other DNA
atggacttcctgctcttccagtttggcctgtgcaccttcaagtatgactacacagacagcaagtacatcaccaagagcttcaacttctacgtgttccccaagcccttcaacagaagcagcccagatgtgaagtttgtgtgccagagcagcagcattgacttcctggccagccagggctttgacttcaacaaggtgttcagaaatggcatcccctacctgaaccaggaggaggagcggcagctgcgggagcagtatgatgagaagaggagccaggccaatggagctggggccctgtcctatgtgagccccaacaccagcaaatgtcctgtgaccatccctgaggaccagaagaagttcatcgaccaggtggtggagaagattgaggacctgctgcagagcgaggagaacaagaacctggacctggagccctgcaccggcttccagaggaagctgatctaccagaccctgtcctggaagtaccccaagggcatccacgtggagaccctggagacagagaagaaggagcgctacatcgtcatcagcaaggtggatgaggaggagaggaagaggcgggagcagcagaagcacgccaaggagcaggaggagctgaatgatgctgtgggcttcagcagggtcatccacgccatcgccaacagcggcaagctggtgattggccacaacatgctgctggatgtgatgcacacagtgcaccagttctactgccccctgcctgctgacctgtctgagttcaaggagatgaccacctgtgtgttcccccggctgctggacaccaagctgatggccagcacccagcccttcaaggacatcatcaacaacaccagcctggccgagctggagaagaggctgaaggagacccccttcaacccccccaaggtggagagcgctgagggcttccccagctatgacacagccagcgagcagctgcacgaggccggctatgatgcctacatcaccggcctgtgcttcatctccatggccaactacctgggcagcttcctgagcccccccaagatccacgtgtctgcccggagcaagctgattgagcccttcttcaacaagctgttcctgatgagggtgatggacatcccctacctgaacctggagggccctgacctgcagcccaagagggaccacgtgctgcacgtgaccttccccaaggagtggaagaccagtgacctgtaccagctgttcagcgcctttggaaacatccagatctcctggattgatgacaccagcgcctttgtgtccctgagccagcctgagcaggtgaagattgctgtgaacaccagcaaatatgcagagagctaccgcatccagacctatgcagagtacatgggcaggaagcaggaggagaagcagatcaagaggaagtggacagaagattcctggaaggaggccgacagcaagaggctgaacccccagtgcatcccctacaccctgcagaaccactactacagaaacaacagcttcaccgcccccagcacagtgggcaagaggaacctgagccccagccaggaggaggccggcctggaggatggagtgtctggagagatcagtgacacagagctggagcagacagacagctgtgccgagcccctgtctgagggcaggaagaaggccaagaagctgaagaggatgaagaaggagctgagccctgctggcagcatcagcaagaacagccctgccaccctgtttgaggtgcctgacacctggtag

SEQ ID NO: 164551 - DNA, 1782 bp, synthetic construct
  misc_feature 1..1782: note = Description of Artificial Sequence: Synthetic coding sequence
  source 1..1782: mol_type = other DNA
atggagatcatccgcagcaacttcaagagcaacctgcacaaggtgtaccaggccatcgaggaggccgacttctttgccattgatggagagttcagcggcatcagtgatggccccagcgtgtctgccctgaccaatggatttgacaccccagaggagaggagcagcccagatgtgaagtttgtgtgccagagcagcagcattgacttcctggccagccagggctttgacttcaacaaggtgttcagaaatggcatcccctacctgaaccaggaggaggagcggcagctgcgggagcagtatgatgagaagaggagccaggccaacggggccggggccctgtcctatgtgagccccaacaccagcaagtgccctgtgaccatccctgaggaccagaagaagttcatcgaccaggtggtggagaagattgaggacctgctgcagagcgaggagaacaagaacctggacctggagccctgcaccggcttccagaggaagctgatctaccagaccctgtcctggaagtaccccaagggcatccacgtggagaccctggagacagagaagaaggagcgctacatcgtcatcagcaaggtggatgaggaggagaggaagagaagagagcagcagaagcacgccaaggagcaggaggagctgaatgatgctgtgggcttcagcagggtcatccacgccatcgccaacagcggcaagctggtgattggccacaacatgctgctggatgtgatgcacacagtgcaccagttctactgccccctgcctgctgacctgtctgagttcaaggagatgaccacctgtgtgttcccccggctgctggacaccaagctgatggccagcacccagcccttcaaggacatcatcaacaacaccagcctggccgagctggagaagaggctgaaggagacccccttcaacccccccaaggtggagagcgctgagggcttccccagctatgacacagccagcgagcagctgcatgaagctggctatgatgcctacatcaccggcctgtgcttcatctccatggccaactacctgggcagcttcctgagcccccccaagatccacgtgtctgcccggagcaagctgattgagcccttcttcaacaagctgttcctgatgagggtgatggacatcccctacctgaacctggagggccctgacctgcagcccaagagggaccacgtgctgcacgtgaccttccccaaggagtggaagaccagtgacctgtaccagctgttcagcgccttcggcaacatccagatctcctggattgatgacaccagcgcctttgtgtccctgagccagcctgagcaggtgaagattgctgtgaacaccagcaaatatgcagagagctaccgcatccagacctacgccgagtacatgggcaggaagcaggaggagaagcagatcaagaggaagtggacagaggacagctggaaggaggccgacagcaagaggctgaacccccagtgcatcccctacaccctgcagaaccactactacagaaacaacagcttcaccgcccccagcacagtgggcaagaggaacctgagccccagccaggaggaggccggcctggaggatggagtgtctggagagatcagtgacacagagctggagcagacagacagctgtgccgagcccctgtctgagggcaggaagaaggccaagaagctgaagaggatgaagaaggagctgagccctgctggcagcatcagcaagaacagccctgccaccctgtttgaggtgcctgacacctggtag

SEQ ID NO: 164552 - DNA, 1920 bp, synthetic construct
  misc_feature 1..1920: note = Description of Artificial Sequence: Synthetic coding sequence
  source 1..1920: mol_type = other DNA
atggagatcatccgcagcaacttcaagagcaacctgcacaaggtgtaccaggccatcgaggaggccgacttctttgccattgatggagagttcagcggcatcagtgatggccccagcgtgtctgccctgaccaatggatttgacaccccagaggagcgctaccagaagctgaagaagcacagcatggacttcctgctcttccagtttggcctgtgcaccttcaagtatgactacacagacagcaagtacatcaccaagagcttcaacttctacgtgttccccaagcccttcaacagaagcagcccagatgtgaagtttgtgtgccagagcagcagcattgacttcctggccagccagggctttgacttcaacaaggtgttcagaaatggcatcccctacctgaaccaggaggaggagcggcagctgcgggagcagtatgatgagaagaggagccaggccaacggggccggggccctgtcctatgtgagccccaacaccagcaagtgccctgtgaccatccctgaggaccagaagaagttcatcgaccaggtggtggagaagattgaggacctgctgcagagcgaggagaacaagaacctggacctggagccctgcaccggcttccagaggaagctgatctaccagaccctgtcctggaagtaccccaagggcatccacgtggagaccctggagacagagaagaaggagcgctacatcgtcatcagcaaggtggatgaggaggagaggaagagaagagagcagcagaagcacgccaaggagcaggaggagctgaatgatgctgtgggcttcagcagggtcatccacgccatcgccaacagcggcaagctggtgattggccacaacatgctgctggatgtgatgcacacagtgcaccagttctactgccccctgcctgctgacctgtctgagttcaaggagatgaccacctgtgtgttcccccggctgctggacaccaagctgatggccagcacccagcccttcaaggacatcatcaacaacaccagcctggccgagctggagaagaggctgaaggagacccccttcaacccccccaaggtggagagcgctgagggcttccccagctatgacacagccagcgagcagctgcatgaagctggctatgatgcctacatcaccggcctgtgcttcatctccatggccaactacctgggcagcttcctgagcccccccaagatccacgtgtctgcccggagcaagctgattgagcccttcttcaacaagctgttcctgatgagggtgatggacatcccctacctgaacctggagggccctgacctgcagcccaagagggaccacgtgctgcacgtgaccttccccaaggagtggaagaccagtgacctgtaccagctgttcagcgccttcggcaacatccagatctcctggattgatgacaccagcgcctttgtgtccctgagccagcctgagcaggtgaagattgctgtgaacaccagcaaatatgcagagagctaccgcatccagacctacgccgagtacatgggcaggaagcaggaggagaagcagatcaagaggaagtggacagaggacagctggaaggaggccgacagcaagaggctgaacccccagtgcatcccctacaccctgcagaaccactactacagaaacaacagcttcaccgcccccagcacagtgggcaagaggaacctgagccccagccaggaggaggccggcctggaggatggagtgtctggagagatcagtgacacagagctggagcagacagacagctgtgccgagcccctgtctgagggcaggaagaaggccaagaagctgaagaggatgaagaaggagctgagccctgctggcagcatcagcaagaacagccctgccaccctgtttgaggtgcctgacacctggtag

SEQ ID NO: 164553 - DNA, 624 bp, synthetic construct
  misc_feature 1..624: note = Description of Artificial Sequence: Synthetic coding sequence
  source 1..624: mol_type = other DNA
atggagatcatccgcagcaacttcaagagcaacctgcacaaggtgtaccaggccatcgaggaggccgacttctttgccattgatggagagttcagcggcatcagtgatggccccagcgtgtctgccctgaccaatggatttgacaccccagaggagcgctaccagaagctgaagaagcacagcatggacttcctgctcttccagtttggcctgtgcaccttcaagtatgactacacagacagcaagagcagcccagatgtgaagtttgtgtgccagagcagcagcattgacttcctggccagccagggctttgacttcaacaaggtgttcagaaatggcatcccctacctgaaccaggaggaggagcggcagctgcgggagcagtatgatgagaagaggagccaggccaatggagctggggccctgtcctatgtgagccccaacaccagcaaatgtcctgtgaccatccctgaggaccagaagaagttcatcgaccaggtggtggagaagattgaggacctgctgcagagcgaggagaacaagaacctggacctggagccctgcaccggcttccagaggaagctgatctaccagaccctgtcctggaagagaagtgacatctag

SEQ ID NO: 164554 - DNA, 1395 bp, synthetic construct
  misc_feature 1..1395: note = Description of Artificial Sequence: Synthetic coding sequence
  source 1..1395: mol_type = other DNA
atggagatcatccgcagcaacttcaagagcaacctgcacaaggtgtaccaggccatcgaggaggccgacttctttgccattgatggagagttcagcggcatcagtgatggccccagcgtgtctgccctgaccaatggatttgacaccccagaggagcgctaccagaagctgaagaagaaggagcgctacatcgtcatcagcaaggtggatgaggaggagaggaagaggcgggagcagcagaagcacgccaaggagcaggaggagctgaatgatgctgtgggcttcagcagggtcatccacgccatcgccaacagcggcaagctggtgattggccacaacatgctgctggatgtgatgcacacagtgcaccagttctactgccccctgcctgctgacctgtctgagttcaaggagatgaccacctgtgtgttcccccggctgctggacaccaagctgatggccagcacccagcccttcaaggacatcatcaacaacaccagcctggccgagctggagaagaggctgaaggagacccccttcaacccccccaaggtggagagcgctgagggcttccccagctatgacacagccagcgagcagctgcacgaggccggctatgatgcctacatcaccggcctgtgcttcatctccatggccaactacctgggcagcttcctgagcccccccaagatccacgtgtctgcccggagcaagctgattgagcccttcttcaacaagctgttcctgatgagggtgatggacatcccctacctgaacctggagggccctgacctgcagcccaagagggaccacgtgctgcacgtgaccttccccaaggagtggaagaccagtgacctgtaccagctgttcagcgcctttggaaacatccagatctcctggattgatgacaccagcgcctttgtgtccctgagccagcctgagcaggtgaagattgctgtgaacaccagcaaatatgcagagagctaccgcatccagacctatgcagagtacatgggcaggaagcaggaggagaagcagatcaagaggaagtggacagaagattcctggaaggaggccgacagcaagaggctgaacccccagtgcatcccctacaccctgcagaaccactactacagaaacaacagcttcaccgcccccagcacagtgggcaagaggaacctgagccccagccaggaggaggccggcctggaggatggagtgtctggagagatcagtgacacagagctggagcagacagacagctgtgccgagcccctgtctgagggcaggaagaaggccaagaagctgaagaggatgaagaaggagctgagccctgctggcagcatcagcaagaacagccctgccaccctgtttgaggtgcctgacacctggtag

SEQ ID NO: 164555 - DNA, 1071 bp, synthetic construct
  misc_feature 1..1071: note = Description of Artificial Sequence: Synthetic coding sequence
  source 1..1071: mol_type = other DNA
atggatgctggggtgacagagagcggcctgaatgtgaccctgaccatccggctgctgatgcacggcaaggaggtgggcagcatcatcggcaagaagggggagagcgtgaagaggatccgggaggagagcggggcccgcatcaacatcagcgagggcaactgcccagagcgcatcatcaccctgaccggccccaccaatgccatcttcaaggcctttgccatgatcatcgacaagctggaggaggacatcaacagctccatgaccaacagcacagctgccagccggccccctgtgaccctgcggctggtggtgcctgccacccagtgtggcagcctgattggaaaaggaggctgcaagatcaaggagatccgggagagcactggagcccaggtgcaggtggccggggacatgctgcccaacagcacagagcgggccatcaccatcgccggcgtgccccagagcgtgacagaatgtgtgaagcagatctgcctggtgatgctggagaccctgagccagagcccccagggccgggtgatgaccatcccctaccagcccatgcctgccagcagccctgtgatctgtgccggcggccaggaccgctgcagtgatgctgctggctacccccacgccacccatgacctggagggcccccccctggatgcctacagcatccagggccagcacaccatcagccccctggacctggccaagctgaaccaggtggcccggcagcagagccactttgccatgatgcacggcggcactggatttgctggcatcgacagcagcagccctgaggtgaagggctactgggccagcctggatgccagcacccagaccacccatgagctgaccatccccaacaacctgattggctgcatcatcggccggcagggcgccaacatcaatgagatccggcagatgtctggggcccagatcaagatcgccaaccctgtggagggcagcagcggccggcaggtgaccatcaccggcagcgctgccagcatcagcctggcccagtacctgatcaatgcccggctgagcagcgagaagggcatgggctgcagctag

SEQ ID NO: 164556 - DNA, 957 bp, synthetic construct
  misc_feature 1..957: note = Description of Artificial Sequence: Synthetic coding sequence
  source 1..957: mol_type = other DNA
atggacacaggagtcatcgagggcggcctgaatgtgaccctgaccatccggctgctgatgcacggcaaggaggtgggcagcatcatcggcaagaagggggagagcgtgaagaagatgagggaggagagcggggcccgcatcaacatcagcgagggcaactgcccagagcgcatcatcaccctggccggccccaccaatgccatcttcaaggcctttgccatgatcatcgacaagctggaggaggacatcagcagctccatgaccaacagcacagctgccagccggccccctgtgaccctgcggctggtggtgcctgccagccagtgtggcagcctgattggaaaaggaggctgcaagatcaaggagatccgggagagcactggagcccaggtgcaggtggccggggacatgctgcccaacagcacagagcgggccatcaccatcgccggcatcccccagagcatcattgaatgtgtgaagcagatctgtgtggtgatgctggagagcccccccaagggcgtgaccatcccctaccggcccaagcccagcagcagccctgtgatctttgctgggggccaggcctacaccatccagggccagtatgccatcccccagcctgacctgaccaagctgcaccagctggccatgcagcagagccacttccccatgacccacggcaacacaggcttctctgctggcctggatgccagcgcccagaccaccagccatgagctgaccatccccaatgacctgattggctgcatcatcggccggcagggcgccaagatcaatgagatccggcagatgtctggggcccagatcaagatcgccaaccctgtggagggcagcacagaccggcaggtgaccatcactggatctgctgccagcatcagcctggcccagtacctgatcaacgtgcggctgagcagcgagaccggcggcatgggcagcagctag

SEQ ID NO: 164557 - DNA, 1098 bp, synthetic construct
  misc_feature 1..1098: note = Description of Artificial Sequence: Synthetic coding sequence
  source 1..1098: mol_type = other DNA
atggacacaggagtcatcgagggcggcctgaatgtgaccctgaccatccggctgctgatgcacggcaaggaggtgggcagcatcatcggcaagaagggggagagcgtgaagaagatgagggaggagagcggggcccgcatcaacatcagcgagggcaactgcccagagcgcatcatcaccctggccggccccaccaatgccatcttcaaggcctttgccatgatcatcgacaagctggaggaggacatcagcagctccatgaccaacagcacagctgccagccggccccctgtgaccctgcggctggtggtgcctgccagccagtgtggcagcctgattggaaaaggaggctgcaagatcaaggagatccgggagagcactggagcccaggtgcaggtggccggggacatgctgcccaacagcacagagcgggccatcaccatcgccggcatcccccagagcatcattgaatgtgtgaagcagatctgtgtggtgatgctggagaccctgagccagagcccccccaagggcgtgaccatcccctaccggcccaagcccagcagcagccctgtgatctttgctgggggccaggaccgctacagcacaggcagtgacagcgccagcttcccccacaccacccccagcatgtgcctgaacccagacctggagggcccccccctggaggcctacaccatccagggccagtatgccatcccccagcctgacctgaccaagctgcaccagctggccatgcagcagagccacttccccatgacccacggcaacacaggcttcagcggcatcgagagcagcagccctgaggtgaagggctactggggcctggatgccagcgcccagaccaccagccatgagctgaccatccccaatgacctgattggctgcatcatcggccggcagggcgccaagatcaatgagatccggcagatgtctggggcccagatcaagatcgccaaccctgtggagggcagcacagaccggcaggtgaccatcaccggcagcgctgccagcatcagcctggcccagtacctgatcaacgtgcggctgagcagcgagactggaggcatgggcagcagctag

SEQ ID NO: 164558 - DNA, 1008 bp, synthetic construct
  misc_feature 1..1008: note = Description of Artificial Sequence: Synthetic coding sequence
  source 1..1008: mol_type = other DNA
atggacacaggagtcatcgagggcggcctgaatgtgaccctgaccatccggctgctgatgcacggcaaggaggtgggcagcatcatcggcaagaagggggagagcgtgaagaagatgagggaggagagcggggcccgcatcaacatcagcgagggcaactgcccagagcgcatcatcaccctggccggccccaccaatgccatcttcaaggcctttgccatgatcatcgacaagctggaggaggacatcagcagctccatgaccaacagcacagctgccagccggccccctgtgaccctgcggctggtggtgcctgccagccagtgtggcagcctgattggaaaaggaggctgcaagatcaaggagatccgggagagcactggagcccaggtgcaggtggccggggacatgctgcccaacagcacagagcgggccatcaccatcgccggcatcccccagagcatcattgaatgtgtgaagcagatctgtgtggtgatgctggagaccctgagccagagcccccccaagggcgtgaccatcccctaccggcccaagcccagcagcagccctgtgatctttgctgggggccaggcctacaccatccagggccagtatgccatcccccagcctgacctgaccaagctgcaccagctggccatgcagcagagccacttccccatgacccacggcaacacaggcttctctggaattgagagcagcagccctgaggtgaagggctactgggccggcctggatgccagcgcccagaccaccagccatgagctgaccatccccaatgacctgattggctgcatcatcggccggcagggcgccaagatcaatgagatccggcagatgtctggggcccagatcaagatcgccaaccctgtggagggcagcacagaccggcaggtgaccatcaccggcagcgctgccagcatcagcctggcccagtacctgatcaacgtgcggctgagcagcgagactggaggcatgggcagcagctag

SEQ ID NO: 164559 - DNA, 906 bp, synthetic construct
  misc_feature 1..906: note = Description of Artificial Sequence: Synthetic coding sequence
  source 1..906: mol_type = other DNA
atggacacaggagtcatcgagggcggcctgaatgtgaccctgaccatccggctgctgatgcacggcaaggaggtgggcagcatcatcggcaagaagggggagagcgtgaagaagatgagggaggagagcggggcccgcatcaacatcagcgagggcaactgcccagagcgcatcatcaccctggccggccccaccaatgccatcttcaaggcctttgccatgatcatcgacaagctggaggaggacatcagcagctccatgaccaacagcacagctgccagccggccccctgtgaccctgcggctggtggtgcctgccagccagtgtggcagcctgattggaaaaggaggctgcaagatcaaggagatccgggagagcactggagcccaggtgcaggtggccggggacatgctgcccaacagcacagagcgggccatcaccatcgccggcatcccccagagcatcattgaatgtgtgaagcagatctgtgtggtgatgctggagagcccccccaagggcgtgaccatcccctaccggcccaagcccagcagcagccctgtgatctttgctgggggccaggaccgctacagcacaggcagtgacagcgccagcttcccccacaccacccccagcatgtgcctgaacccagacctggagggcccccccctggaggcctacaccatccagggccagtatgccatcccccagcctgacctgaccaagctgcaccagctggccatgcagcagagccacttccccatgacccacggcaacacaggcttcagcggcatggacacctctgtgttcatctctgtgcgctgcagcgcccgggagaggcctgtgcccaggagccagctggacatctgcctgaagcagaccagcctgagcagcatcctgctggtgtag

SEQ ID NO: 164560 - DNA, 1089 bp, synthetic construct
  misc_feature 1..1089: note = Description of Artificial Sequence: Synthetic coding sequence
  source 1..1089: mol_type = other DNA
atggacacaggagtcatcgagggcggcctgaatgtgaccctgaccatccggctgctgatgcacggcaaggaggtgggcagcatcatcggcaagaagggggagagcgtgaagaagatgagggaggagagcggggcccgcatcaacatcagcgagggcaactgcccagagcgcatcatcaccctggccggccccaccaatgccatcttcaaggcctttgccatgatcatcgacaagctggaggaggacatcagcagctccatgaccaacagcacagctgccagccggccccctgtgaccctgcggctggtggtgcctgccagccagtgtggcagcctgattggaaaaggaggctgcaagatcaaggagatccgggagagcactggagcccaggtgcaggtggccggggacatgctgcccaacagcacagagcgggccatcaccatcgccggcatcccccagagcatcattgaatgtgtgaagcagatctgtgtggtgatgctggagagcccccccaagggcgtgaccatcccctaccggcccaagcccagcagcagccctgtgatctttgctgggggccaggaccgctacagcacaggcagtgacagcgccagcttcccccacaccacccccagcatgtgcctgaacccagacctggagggcccccccctggaggcctacaccatccagggccagtatgccatcccccagcctgacctgaccaagctgcaccagctggccatgcagcagagccacttccccatgacccacggcaacacaggcttcagcggcatcgagagcagcagccctgaggtgaagggctactgggccggcctggatgccagcgcccagaccaccagccatgagctgaccatccccaatgacctgattggctgcatcatcggccggcagggcgccaagatcaatgagatccggcagatgtctggggcccagatcaagatcgccaaccctgtggagggcagcacagaccggcaggtgaccatcactggatctgctgccagcatcagcctggcccagtacctgatcaacgtgcggctgagcagcgagaccggcggcatgggcagcagctag

SEQ ID NO: 164561 - DNA, 996 bp, synthetic construct
  misc_feature 1..996: note = Description of Artificial Sequence: Synthetic coding sequence
  source 1..996: mol_type = other DNA
atggacacaggagtcatcgagggcggcctgaatgtgaccctgaccatccggctgctgatgcacggcaaggaggtgggcagcatcatcggcaagaagggggagagcgtgaagaagatgagggaggagagcggggcccgcatcaacatcagcgagggcaactgcccagagcgcatcatcaccctggccggccccaccaatgccatcttcaaggcctttgccatgatcatcgacaagctggaggaggacatcagcagctccatgaccaacagcacagctgccagccggccccctgtgaccctgcggctggtggtgcctgccagccagtgtggcagcctgattggaaaaggaggctgcaagatcaaggagatccgggagagcactggagcccaggtgcaggtggccggggacatgctgcccaacagcacagagcgggccatcaccatcgccggcatcccccagagcatcattgaatgtgtgaagcagatctgtgtggtgatgctggagagcccccccaagggcgtgaccatcccctaccggcccaagcccagcagcagccctgtgatctttgctgggggccaggcctacaccatccagggccagtatgccatcccccagcctgacctgaccaagctgcaccagctggccatgcagcagagccacttccccatgacccacggcaacacaggcttctctggaattgagagcagcagccctgaggtgaagggctactgggccggcctggatgccagcgcccagaccaccagccatgagctgaccatccccaatgacctgattggctgcatcatcggccggcagggcgccaagatcaatgagatccggcagatgtctggggcccagatcaagatcgccaaccctgtggagggcagcacagaccggcaggtgaccatcaccggcagcgctgccagcatcagcctggcccagtacctgatcaacgtgcggctgagcagcgagactggaggcatgggcagcagctag

SEQ ID NO: 164562 - DNA, 1101 bp, synthetic construct
  misc_feature 1..1101: note = Description of Artificial Sequence: Synthetic coding sequence
  source 1..1101: mol_type = other DNA
atggacacaggagtcatcgagggcggcctgaatgtgaccctgaccatccggctgctgatgcacggcaaggaggtgggcagcatcatcggcaagaagggggagagcgtgaagaagatgagggaggagagcggggcccgcatcaacatcagcgagggcaactgcccagagcgcatcatcaccctggccggccccaccaatgccatcttcaaggcctttgccatgatcatcgacaagctggaggaggacatcagcagctccatgaccaacagcacagctgccagccggccccctgtgaccctgcggctggtggtgcctgccagccagtgtggcagcctgattggaaaaggaggctgcaagatcaaggagatccgggagagcactggagcccaggtgcaggtggccggggacatgctgcccaacagcacagagcgggccatcaccatcgccggcatcccccagagcatcattgaatgtgtgaagcagatctgtgtggtgatgctggagaccctgagccagagcccccccaagggcgtgaccatcccctaccggcccaagcccagcagcagccctgtgatctttgctgggggccaggaccgctacagcacaggcagtgacagcgccagcttcccccacaccacccccagcatgtgcctgaacccagacctggagggcccccccctggaggcctacaccatccagggccagtatgccatcccccagcctgacctgaccaagctgcaccagctggccatgcagcagagccacttccccatgacccacggcaacacaggcttcagcggcatcgagagcagcagccctgaggtgaagggctactgggccggcctggatgccagcgcccagaccaccagccatgagctgaccatccccaatgacctgattggctgcatcatcggccggcagggcgccaagatcaatgagatccggcagatgtctggggcccagatcaagatcgccaaccctgtggagggcagcacagaccggcaggtgaccatcactggatctgctgccagcatcagcctggcccagtacctgatcaacgtgcggctgagcagcgagaccggcggcatgggcagcagctag

SEQ ID NO: 164563 - DNA, 1086 bp, synthetic construct
  misc_feature 1..1086: note = Description of Artificial Sequence: Synthetic coding sequence
  source 1..1086: mol_type = other DNA
atggacacaggagtcatcgagggcggcctgaatgtgaccctgaccatccggctgctgatgcacggcaaggaggtgggcagcatcatcggcaagaagggggagagcgtgaagaagatgagggaggagagcggggcccgcatcaacatcagcgagggcaactgcccagagcgcatcatcaccctggccggccccaccaatgccatcttcaaggcctttgccatgatcatcgacaagctggaggaggacatcagcagctccatgaccaacagcacagctgccagccggccccctgtgaccctgcggctggtggtgcctgccagccagtgtggcagcctgattggaaaaggaggctgcaagatcaaggagatccgggagagcactggagcccaggtgcaggtggccggggacatgctgcccaacagcacagagcgggccatcaccatcgccggcatcccccagagcatcattgaatgtgtgaagcagatctgtgtggtgatgctggagagcccccccaagggcgtgaccatcccctaccggcccaagcccagcagcagccctgtgatctttgctgggggccaggaccgctacagcacaggcagtgacagcgccagcttcccccacaccacccccagcatgtgcctgaacccagacctggagggcccccccctggaggcctacaccatccagggccagtatgccatcccccagcctgacctgaccaagctgcaccagctggccatgcagcagagccacttccccatgacccacggcaacacaggcttcagcggcatcgagagcagcagccctgaggtgaagggctactggggcctggatgccagcgcccagaccaccagccatgagctgaccatccccaatgacctgattggctgcatcatcggccggcagggcgccaagatcaatgagatccggcagatgtctggggcccagatcaagatcgccaaccctgtggagggcagcacagaccggcaggtgaccatcaccggcagcgctgccagcatcagcctggcccagtacctgatcaacgtgcggctgagcagcgagactggaggcatgggcagcagctag

SEQ ID NO: 164564 - DNA, 1056 bp, synthetic construct
  misc_feature 1..1056: note = Description of Artificial Sequence: Synthetic coding sequence
  source 1..1056: mol_type = other DNA
ctgagccctggagatgccttctgggcccccagcgtgctgccccacagcaccctgagcaccctgagccaccacccccagccccagtttggaagaaggatggagagcaaggtgtctgagggcggcctgaatgtgaccctgaccatccggctgctgatgcacggcaaggtgagaggagctgccatcgtgtccaagggggagaccgtgaagaagatgagggaggagagcggggcccgcatcaacatcagcgagggcaactgcccagagcgcatcgtgaccatcaccggccccacagatgccatcttcaaggcctttgccatgattgcctacaagtttgaggaggacatcatcaacagcatgagcaacagccctgccaccagcaagccccctgtgaccctgcggctggtggtgcctgccagccagtgtggcagcctgattggaaaaggaggcagcaagatcaaggagatccgggagagcactggagcccaggtgcaggtggccggggacatgctgcccaacagcacagaaagagctgtgaccatcagcggcaccccagatgccatcatccagtgtgtgaagcagatctgtgtggtgatgctggagagcccccccaagggggccaccatcccctaccggcccaagccagccagcacccctgtgatctttgctgggggccaggcctacaccatccagggccagtatgccatcccccacccagaccagctgaccaagctgcaccagctggccatgcagcagacccccttcccccccctgggccagaccaacccagccttccctggcctggatgccagccccccagccagcacccatgagctgaccatccccaatgacctgattggctgcatcatcggccggcagggcaccaagatcaatgagatccggcagatgtctggggcccagatcaagatcgccaatgccacagagggcagcagcgagcggcagatcaccatcaccggcaccccagccaacatcagcctggcccagtacctgatcaatgcccggctgaccagcgaggtgacaggcatgggcaccctgtag

SEQ ID NO: 164565 - DNA, 969 bp, synthetic construct
  misc_feature 1..969: note = Description of Artificial Sequence: Synthetic coding sequence
  source 1..969: mol_type = other DNA
ccccagccccagtttggaagaaggatggagagcaaggtgtctgagggcggcctgaatgtgaccctgaccatccggctgctgatgcacggcaaggaggtgggcagcatcatcggcaagaagggggagaccgtgaagaagatgagggaggagagcggggcccgcatcaacatcagcgagggcaactgcccagagcgcatcgtgaccatcaccggccccacagatgccatcttcaaggcctttgccatgattgcctacaagtttgaggaggacatcatcaacagcatgagcaacagccctgccaccagcaagccccctgtgaccctgcggctggtggtgcctgccagccagtgtggcagcctgattggaaaaggaggcagcaagatcaaggagatccgggagagcactggagcccaggtgcaggtggccggggacatgctgcccaacagcacagaaagagctgtgaccatcagcggcaccccagatgccatcatccagtgtgtgaagcagatctgtgtggtgatgctggaggcctacaccatccagggccagtatgccatcccccacccagaccagctgaccaagctgcaccagctggccatgcagcagacccccttcccccccctgggccagaccaacccagccttccctggagagaagctgcccctgcacagcagcgaggaggcccagaacctgatgggccagagcagcggcctggatgccagccccccagccagcacccatgagctgaccatccccaatgacctgattggctgcatcatcggccggcagggcaccaagatcaatgagatccggcagatgtctggggcccagatcaagatcgccaatgccacagagggcagcagcgagcggcagatcaccatcaccggcaccccagccaacatcagcctggcccagtacctgatcaatgcccggctgaccagcgaggtgacaggcatgggcaccctgtag

SEQ ID NO: 164566 - DNA, 1038 bp, synthetic construct
  misc_feature 1..1038: note = Description of Artificial Sequence: Synthetic coding sequence
  source 1..1038: mol_type = other DNA
atgggagaaggagatgccttctgggcccccagcgtgctgccccacagcaccctgagcaccctgagccaccacccccagccccagtttggaagaaggatggagagcaaggtgtctgagggcggcctgaatgtgaccctgaccatccggctgctgatgcacggcaaggaggtgggcagcatcatcggcaagaagggggagaccgtgaagaagatgagggaggagagcggggcccgcatcaacatcagcgagggcaactgcccagagcgcatcgtgaccatcaccggccccacagatgccatcttcaaggcctttgccatgattgcctacaagtttgaggaggacatcatcaacagcatgagcaacagccctgccaccagcaagccccctgtgaccctgcggctggtggtgcctgccagccagtgtggcagcctgattggaaaaggaggcagcaagatcaaggagatccgggagagcactggagcccaggtgcaggtggccggggacatgctgcccaacagcacagaaagagctgtgaccatcagcggcaccccagatgccatcatccagtgtgtgaagcagatctgtgtggtgatgctggaggcctacaccatccagggccagtatgccatcccccacccagacctgaccaagctgcaccagctggccatgcagcagacccccttcccccccctgggccagaccaacccagccttccctggagagaagctgcccctgcacagcagcgaggaggcccagaacctgatgggccagagcagcggcctggatgccagccccccagccagcacccatgagctgaccatccccaatgacctgattggctgcatcatcggccggcagggcaccaagatcaatgagatccggcagatgtctggggcccagatcaagatcgccaatgccacagagggcagcagcgagcggcagatcaccatcaccggcaccccagccaacatcagcctggcccagtacctgatcaatgcccggctgaccagcgaggtgacaggcatgggcaccctgtag

SEQ ID NO: 164567 - DNA, 1113 bp, synthetic construct
  misc_feature 1..1113: note = Description of Artificial Sequence: Synthetic coding sequence
  source 1..1113: mol_type = other DNA
atgggagaaggagatgccttctgggcccccagcgtgctgccccacagcaccctgagcaccctgagccaccacccccagccccagtttggaagaaggatggagagcaaggtgtctgagggcggcctgaatgtgaccctgaccatccggctgctgatgcacggcaaggaggtgggcagcatcatcggcaagaagggggagaccgtgaagaagatgagggaggagagcggggcccgcatcaacatcagcgagggcaactgcccagagcgcatcgtgaccatcaccggccccacagatgccatcttcaaggcctttgccatgattgcctacaagtttgaggaggacatcatcaacagcatgagcaacagccctgccaccagcaagccccctgtgaccctgcggctggtggtgcctgccagccagtgtggcagcctgattggaaaaggaggcagcaagatcaaggagatccgggagagcactggagcccaggtgcaggtggccggggacatgctgcccaacagcacagaaagagctgtgaccatcagcggcaccccagatgccatcatccagtgtgtgaagcagatctgtgtggtgatgctggagagcccccccaagggggccaccatcccctaccggcccaagccagccagcacccctgtgatctttgctgggggccaggcctacaccatccagggccagtatgccatcccccacccagacctgaccaagctgcaccagctggccatgcagcagacccccttcccccccctgggccagaccaacccagccttccctggagagaagctgcccctgcacagcagcgaggaggcccagaacctgatgggccagagcagcggcctggatgccagccccccagccagcacccatgagctgaccatccccaatgacctgattggctgcatcatcggccggcagggcaccaagatcaatgagatccggcagatgtctggggcccagatcaagatcgccaatgccacagagggcagcagcgagcggcagatcaccatcaccggcaccccagccaacatcagcctggcccagtacctgatcaatgcccggctgaccagcgaggtgacaggcatgggcaccctgtag

SEQ ID NO: 164568 - DNA, 1056 bp, synthetic construct
  misc_feature 1..1056: note = Description of Artificial Sequence: Synthetic coding sequence
  source 1..1056: mol_type = other DNA
atgggagaaggagatgccttctgggcccccagcgtgctgccccacagcaccctgagcaccctgagccaccacccccagccccagtttggaagaaggatggagagcaaggtgtctgagggcggcctgaatgtgaccctgaccatccggctgctgatgcacggcaaggaggtgggcagcatcatcggcaagaagggggagaccgtgaagaagatgagggaggagagcggggcccgcatcaacatcagcgagggcaactgcccagagcgcatcgtgaccatcaccggccccacagatgccatcttcaaggcctttgccatgattgcctacaagtttgaggaggacatcatcaacagcatgagcaacagccctgccaccagcaagccccctgtgaccctgcggctggtggtgcctgccagccagtgtggcagcctgattggaaaaggaggcagcaagatcaaggagatccgggagagcactggagcccaggtgcaggtggccggggacatgctgcccaacagcacagaaagagctgtgaccatcagcggcaccccagatgccatcatccagtgtgtgaagcagatctgtgtggtgatgctggagagcccccccaagggggccaccatcccctaccggcccaagccagccagcacccctgtgatctttgctgggggccaggcctacaccatccagggccagtatgccatcccccacccagaccagctgaccaagctgcaccagctggccatgcagcagacccccttcccccccctgggccagaccaacccagccttccctggcctggatgccagccccccagccagcacccatgagctgaccatccccaatgacctgattggctgcatcatcggccggcagggcaccaagatcaatgagatccggcagatgtctggggcccagatcaagatcgccaatgccacagagggcagcagcgagcggcagatcaccatcaccggcaccccagccaacatcagcctggcccagtacctgatcaatgcccggctgaccagcgaggtgacaggcatgggcaccctgtag

SEQ ID NO: 164569 - DNA, 1116 bp, synthetic construct
  misc_feature 1..1116: note = Description of Artificial Sequence: Synthetic coding sequence
  source 1..1116: mol_type = other DNA
atgggagaaggagatgccttctgggcccccagcgtgctgccccacagcaccctgagcaccctgagccaccacccccagccccagtttggaagaaggatggagagcaaggtgtctgagggcggcctgaatgtgaccctgaccatccggctgctgatgcacggcaaggaggtgggcagcatcatcggcaagaagggggagaccgtgaagaagatgagggaggagagcggggcccgcatcaacatcagcgagggcaactgcccagagcgcatcgtgaccatcaccggccccacagatgccatcttcaaggcctttgccatgattgcctacaagtttgaggaggacatcatcaacagcatgagcaacagccctgccaccagcaagccccctgtgaccctgcggctggtggtgcctgccagccagtgtggcagcctgattggaaaaggaggcagcaagatcaaggagatccgggagagcactggagcccaggtgcaggtggccggggacatgctgcccaacagcacagaaagagctgtgaccatcagcggcaccccagatgccatcatccagtgtgtgaagcagatctgtgtggtgatgctggagagcccccccaagggggccaccatcccctaccggcccaagccagccagcacccctgtgatctttgctgggggccaggcctacaccatccagggccagtatgccatcccccacccagaccagctgaccaagctgcaccagctggccatgcagcagacccccttcccccccctgggccagaccaacccagccttccctggagagaagctgcccctgcacagcagcgaggaggcccagaacctgatgggccagagcagcggcctggatgccagccccccagccagcacccatgagctgaccatccccaatgacctgattggctgcatcatcggccggcagggcaccaagatcaatgagatccggcagatgtctggggcccagatcaagatcgccaatgccacagagggcagcagcgagcggcagatcaccatcaccggcaccccagccaacatcagcctggcccagtacctgatcaatgcccggctgaccagcgaggtgacaggcatgggcaccctgtag

SEQ ID NO: 164570 - DNA, 1116 bp, synthetic construct; identical to SEQ ID NO: 164569
  misc_feature 1..1116: note = Description of Artificial Sequence: Synthetic coding sequence
  source 1..1116: mol_type = other DNA

SEQ ID NO: 164571 - DNA, 18 bp, synthetic construct
  misc_feature 1..18: note = Description of Artificial Sequence: Synthetic coding sequence
  source 1..18: mol_type = other DNA
atggagagcaaggtgtag

SEQ ID NO: 164572 - DNA, 5070 bp, synthetic construct
  misc_feature 1..5070: note = Description of Artificial Sequence: Synthetic coding sequence
  source 1..5070: mol_type = other DNA
atgggcagcaagagaagaagagccaccagccccagcagctctgtgtctggggactttgatgatggccaccacagcgtgtccaccccaggccccagcaggaagagaagaaggctgagcaacctgcccaccgtggaccccatcgctgtgtgccacgagctgtacaacaccatccgggactacaaggatgagcagggccgcctgctgtgtgagctgttcatccgggcccccaagagaagaaaccagcctgactactatgaggtggtgtcccagcccatcgacctgatgaagatccagcagaagctgaagatggaggagtatgatgatgtgaacctgctgacagctgacttccagctgctcttcaacaatgccaagagctactacaagccagacagccctgagtacaaggccgcctgcaagctgtgggacctgtacctgcggaccagaaatgaatttgtgcagaagggggaggctgatgatgaagatgatgatgaagatggccaggacaaccagggcaccgtgacagagggcagcagccctgcctacctgaaggagatcctggagcagctgctggaggccatcgtggtggccaccaaccccagcggccgcctcatcagcgagctgttccagaagctgcccagcaaggtgcagtacccagactactatgccatcatcaaggagcccatcgacctgaagaccatcgcccagaggatccagaatggcagctacaagagcatccacgccatggccaaggacatcgacctgctggccaagaatgccaagacctacaatgaacctggcagccaggtgttcaaggatgccaacagcatcaagaagatcttctacatgaagaaggccgagattgagcaccacgagatggccaagagcagcctgaggatgaggacccccagcaacctggccgccgcccggctgaccggccccagccacagcaagggcagcctgggggaggagaggaaccccaccagcaagtactacagaaacaagagagctgtgcagggcggccgcctgagcgccatcaccatggccctgcagtatggcagcgagagtgaagaagatgctgccctggccgccgcccgctatgaggagggggagagcgaggccgagagcatcaccagcttcatggatgtgagcaaccccttctaccagctgtatgacacagtgcgcagctgcaggaacaaccagggccagctgattgctgagcccttctaccacctgcccagcaagaagaagtacccagactactaccagcagatcaagatgcccatcagcctgcagcagatccgcaccaagctgaagaaccaggagtatgagaccctggaccacctggagtgtgacctgaacctgatgtttgaaaatgccaagcgctacaacgtgcccaacagcgccatctacaagagggtgctgaagctgcagcaggtgatgcaggccaagaagaaggagctggccaggagagatgacattgaagatggagacagcatgatcagcagcgccaccagtgacaccggcagcgccaagaggaagagcaagaagaacatcaggaagcagaggatgaagatcctcttcaacgtggtgctggaggcccgggagcccggcagcggccggcggctgtgtgacctcttcatggtgaagcccagcaagaaggactacccagactactacaagatcatcctggagcccatggacctgaagatcatcgagcacaacatcagaaatgacaagtatgctggggaggagggcatgattgaggacatgaagctgatgttcagaaatgcccggcactacaatgaggagggcagccaggtgtacaatgatgcccacatcctggagaagctgctgaaggagaagaggaaggagctgggccccctgcctgatgatgatgacatggccagccccaagctgaagctgagcaggaagagcggcatcagccccaagaagagcaagtacatgacccccatgcagcagaagctgaatgaggtgtatgaggccgtgaagaactacacagacaagaggggccggcggctgagcgccatcttcctgcggctgcccagccgctctgagctgcctgactactacctgaccatcaagaagcccatggacatggagaagatccgcagccacatgatggccaacaagtaccaggacatcgacagcatggtggaggactttgtgatgatgttcaacaatgcctgcacctacaatgaacctgagagcctcatctacaaggatgccctggtgctgcacaaggtgctgctggagacccggcgggacctggagggagatgaggacagccacgtgcccaacgtgaccctgctgatccaggagctgatccacaacctgtttgtgtctgtgatgagccaccaggatgatgagggccgctgctacagcgacagcctggccgagatcccagctgtggaccccaacttccccaacaagccacccctgacctttgacatcatcaggaagaatgtggagaacaaccgctacagaaggctggacctcttccaggagcacatgtttgaggtgctggagcgggcccggaggatgaacagaacagattctgagatctatgaagatgctgtggagctgcagcagttcttcatcaagatcagagatgagctgtgcaagaatggagagatcctgctgagccctgccctgagctacaccaccaagcacctgcacaatgatgtggagaaggagaggaaggagaagctgcccaaggagattgaggaggacaagctgaagcgggaggaggagaagcgggaggccgagaagtctgaggacagcagtggagctgctggcctgagcggcctgcacaggacctacagccaggactgcagcttcaagaacagcatgtaccacgtgggggactatgtgtatgtggagcctgctgaggccaacctgcagccccacatcgtgtgcatcgagcggctgtgggaggacagcgctggggagaagtggctgtatggctgctggttctaccggcccaatgagaccttccacctggccaccaggaagttcctggagaaggaggtgttcaagagtgactactacaacaaggtgcctgtgtccaagatcctgggcaaatgtgtggtgatgtttgtgaaggagtacttcaagctgtgcccagagaacttcagagatgaagatgtgtttgtgtgtgagagccgctacagcgccaagaccaagagcttcaagaagatcaagctgtggaccatgcccatcagctctgtgcgctttgtgcccagagatgtgcccctgcctgtggtgcgggtggcctctgtgtttgccaatgctgacaagggagatgatgagaagaacacagacaacagcgaggacagcagagctgaggacaacttcaacctggagaaggagaaggaggatgtgcctgtggagatgagcaatggagagcccggctgccactactttgagcagctgcactacaatgacatgtggctgaaggtgggggactgtgtgttcatcaagagccacggcctggtgcggccccgggtgggcagaattgagaaggtgtgggtgagagatggagctgcctacttctacggccccatcttcatccaccctgaggagacagagcacgagcccaccaagatgttctacaagaaggaggtgttcctgagcaacctggaggagacctgccccatgacctgcatcctgggcaaatgtgctgtgctgtccttcaaggacttcctgagctgccggcccacagagatcccagaaaatgacatcctgctgtgtgagagccgctacaatgaaagtgacaagcagatgaagaagttcaagggcctgaagcgcttcagcctgagcgccaaggtggtggatgatgagatctactacttcaggaagcccatcgtgccccagaaggagcccagccccctgctggagaagaagatccagctgctggaggccaagtttgctgagctggagggcggagatgatgacatcgaggagatgggagaggaggacagcgaggtgattgagccccccagcctgccccagctgcagacccccctggccagcgagctggacctgatgccctacaccccaccccagagcacccccaagagcgccaagggcagcgccaagaaggagggcagcaagaggaagatcaacatgagcggctacatcctcttcagcagcgagatgagagctgtgatcaaggcccagcacccagactacagctttggagagctgagccggctggtgggcacagagtggaggaacctggagacagccaagaaggccgagtatgaggagcgggccgccaaggtggccgagcagcaggagcgggagcgggccgcccagcagcagcagcccagcgccagcccccgggccggcacccctgtgggcgccctgatgggcgtggtgcccccacccacccccatgggcatgctgaaccagcagctgacccctgtggccggcatgatgggcggctacccacctggcctgccccccctgcagggccctgtggatggcctggtgtccatgggctccatgcagcccctgcaccctgggggccccccaccccaccacctgcccccaggagtgcccggcctgcccggcatccccccacctggggtgatgaaccagggcgtggcccccatggtgggcaccccagcccctgggggcagcccctacggccagcaggtgggcgtgctgggccccccaggccagcaggcccccccaccctacccaggcccccaccctgctggcccccctgtgatccagcagcccaccacccccatgtttgtggcccccccacccaagacccagaggctgctgcacagcgaggcctacctgaagtacatcgagggcctgtctgctgagagcaacagcatcagcaagtgggaccagaccctggccgccaggagaagagatgtgcacctgagcaaggagcaggagagccggctgcccagccactggctgaagagcaagggggcccacaccaccatggctgatgccctgtggaggctgcgggacctgatgctgcgggacaccctgaacatccggcaggcctacaacctggagaatgtgtag

SEQ ID NO: 164573 - DNA, 4749 bp, synthetic construct
  misc_feature 1..4749: note = Description of Artificial Sequence: Synthetic coding sequence
  source 1..4749: mol_type = other DNA
atgggcagcaagagaagaagagccaccagccccagcagctctgtgtctggggactttgatgatggccaccacagcgtgtccaccccaggccccagcaggaagagaagaaggctgagcaacctgcccaccgtggaccccatcgctgtgtgccacgagctgtacaacaccatccgggactacaaggatgagcagggccgcctgctgtgtgagctgttcatccgggcccccaagagaagaaaccagcctgactactatgaggtggtgtcccagcccatcgacctgatgaagatccagcagaagctgaagatggaggagtatgatgatgtgaacctgctgacagctgacttccagctgctcttcaacaatgccaagagctactacaagccagacagccctgagtacaaggccgcctgcaagctgtgggacctgtacctgcggaccagaaatgaatttgtgcagaagggggaggctgatgatgaagatgatgatgaagatggccaggacaaccagggcaccgtgacagagggcagcagccctgcctacctgaaggagatcctggagcagctgctggaggccatcgtggtggccaccaaccccagcggccgcctcatcagcgagctgttccagaagctgcccagcaaggtgcagtacccagactactatgccatcatcaaggagcccatcgacctgaagaccatcgcccagaggatccagaatggcagctacaagagcatccacgccatggccaaggacatcgacctgctggccaagaatgccaagacctacaatgaacctggcagccaggtgttcaaggatgccaacagcatcaagaagatcttctacatgaagaaggccgagattgagcaccacgagatggccaagagcagcctgaggatgaggacccccagcaacctggccgccgcccggctgaccggccccagccacagcaagggcagcctgggggaggagaggaaccccaccagcaagtactacagaaacaagagagctgtgcagggcggccgcctgagcgccatcaccatggccctgcagtatggcagcgagagtgaagaagatgctgccctggccgccgcccgctatgaggagggggagagcgaggccgagagcatcaccagcttcatggatgtgagcaaccccttctaccagctgtatgacacagtgcgcagctgcaggaacaaccagggccagctgattgctgagcccttctaccacctgcccagcaagaagaagtacccagactactaccagcagatcaagatgcccatcagcctgcagcagatccgcaccaagctgaagaaccaggagtatgagaccctggaccacctggagtgtgacctgaacctgatgtttgaaaatgccaagcgctacaacgtgcccaacagcgccatctacaagagggtgctgaagctgcagcaggtgatgcaggccaagaagaaggagctggccaggagagatgacattgaagatggagacagcatgatcagcagcgccaccagtgacaccggcagcgccaagaggaagagcaagaagaacatcaggaagcagaggatgaagatcctcttcaacgtggtgctggaggcccgggagcccggcagcggccggcggctgtgtgacctcttcatggtgaagcccagcaagaaggactacccagactactacaagatcatcctggagcccatggacctgaagatcatcgagcacaacatcagaaatgacaagtatgctggggaggagggcatgattgaggacatgaagctgatgttcagaaatgcccggcactacaatgaggagggcagccaggtgtacaatgatgcccacatcctggagaagctgctgaaggagaagaggaaggagctgggccccctgcctgatgatgatgacatggccagccccaagctgaagctgagcaggaagagcggcatcagccccaagaagagcaagtacatgacccccatgcagcagaagctgaatgaggtgtatgaggccgtgaagaactacacagacaagaggggccggcggctgagcgccatcttcctgcggctgcccagccgctctgagctgcctgactactacctgaccatcaagaagcccatggacatggagaagatccgcagccacatgatggccaacaagtaccaggacatcgacagcatggtggaggactttgtgatgatgttcaacaatgcctgcacctacaatgaacctgagagcctcatctacaaggatgccctggtgctgcacaaggtgctgctggagacccggcgggacctggagggagatgaggacagccacgtgcccaacgtgaccctgctgatccaggagctgatccacaacctgtttgtgtctgtgatgagccaccaggatgatgagggccgctgctacagcgacagcctggccgagatcccagctgtggaccccaacttccccaacaagccacccctgacctttgacatcatcaggaagaatgtggagaacaaccgctacagaaggctggacctcttccaggagcacatgtttgaggtgctggagcgggcccggaggatgaacagaacagattctgagatctatgaagatgctgtggagctgcagcagttcttcatcaagatcagagatgagctgtgcaagaatggagagatcctgctgagccctgccctgagctacaccaccaagcacctgcacaatgatgtggagaaggagaggaaggagaagctgcccaaggagattgaggaggacaagctgaagcgggaggaggagaagcgggaggccgagaagtctgaggacagcagtggagctgctggcctgagcggcctgcacaggacctacagccaggactgcagcttcaagaacagcatgtaccacgtgggggactatgtgtatgtggagcctgctgaggccaacctgcagccccacatcgtgtgcatcgagcggctgtgggaggacagcgctggggagaagtggctgtatggctgctggttctaccggcccaatgagaccttccacctggccaccaggaagttcctggagaaggaggtgttcaagagtgactactacaacaaggtgcctgtgtccaagatcctgggcaaatgtgtggtgatgtttgtgaaggagtacttcaagctgtgcccagagaacttcagagatgaagatgtgtttgtgtgtgagagccgctacagcgccaagaccaagagcttcaagaagatcaagctgtggaccatgcccatcagctctgtgcgctttgtgcccagagatgtgcccctgcctgtggtgcgggtggcctctgtgtttgccaatgctgacaagggagatgatgagaagaacacagacaacagcgaggacagcagagctgaggacaacttcaacctggagaaggagaaggaggatgtgcctgtggagatgagcaatggagagcccggctgccactactttgagcagctgcactacaatgacatgtggctgaaggtgggggactgtgtgttcatcaagagccacggcctggtgcggccccgggtgggcagaattgagaaggtgtgggtgagagatggagctgcctacttctacggccccatcttcatccaccctgaggagacagagcacgagcccaccaagatgttctacaagaaggaggtgttcctgagcaacctggaggagacctgccccatgacctgcatcctgggcaaatgtgctgtgctgtccttcaaggacttcctgagctgccggcccacagagatcccagaaaatgacatcctgctgtgtgagagccgctacaatgaaagtgacaagcagatgaagaagttcaagggcctgaagcgcttcagcctgagcgccaaggtggtggatgatgagatctactacttcaggaagcccatcgtgccccagaaggagcccagccccctgctggagaagaagatccagctgctggaggccaagtttgctgagctggagggcggagatgatgacatcgaggagatgggagaggaggacagcgaggtgattgagccccccagcctgccccagctgcagacccccctggccagcgagctggacctgatgccctacaccccaccccagagcacccccaagagcgccaagggcagcgccaagaaggagggcagcaagaggaagatcaacatgagcggctacatcctcttcagcagcgagatgagagctgtgatcaaggcccagcacccagactacagctttggagagctgagccggctggtgggcacagagtggaggaacctggagacagccaagaaggccgagtatgagggcgtgatgaaccagggcgtggcccccatggtgggcaccccagcccctgggggcagcccctacggccagcaggtgggcgtgctgggccccccaggccagcaggcccccccaccctacccaggcccccaccctgctggcccccctgtgatccagcagcccaccacccccatgtttgtggcccccccacccaagacccagaggctgctgcacagcgaggcctacctgaagtacatcgagggcctgtctgctgagagcaacagcatcagcaagtgggaccagaccctggccgcccggaggagagatgtgcacctgagcaaggagcaggagagccggctgcccagccactggctgaagagcaaaggagcccacaccaccatggctgatgccctgtggaggctgcgggacctgatgctgcgggacaccctgaacatccggcaggcctacaacctggagaatgtgtag

SEQ ID NO: 164574 - DNA, 4809 bp, synthetic construct
  misc_feature 1..4809: note = Description of Artificial Sequence: Synthetic coding sequence
  source 1..4809: mol_type = other DNA
atgggcagcaagagaagaagagccaccagccccagcagctctgtgtctggggactttgatgatggccaccacagcgtgtccaccccaggccccagcaggaagagaagaaggctgagcaacctgcccaccgtggaccccatcgctgtgtgccacgagctgtacaacaccatccgggactacaaggatgagcagggccgcctgctgtgtgagctgttcatccgggcccccaagagaagaaaccagcctgactactatgaggtggtgtcccagcccatcgacctgatgaagatccagcagaagctgaagatggaggagtatgatgatgtgaacctgctgacagctgacttccagctgctcttcaacaatgccaagagctactacaagccagacagccctgagtacaaggccgcctgcaagctgtgggacctgtacctgcggaccagaaatgaatttgtgcagaagggggaggctgatgatgaagatgatgatgaagatggccaggacaaccagggcaccgtgacagagggcagcagccctgcctacctgaaggagatcctggagcagctgctggaggccatcgtggtggccaccaaccccagcggccgcctcatcagcgagctgttccagaagctgcccagcaaggtgcagtacccagactactatgccatcatcaaggagcccatcgacctgaagaccatcgcccagaggatccagaatggcagctacaagagcatccacgccatggccaaggacatcgacctgctggccaagaatgccaagacctacaatgaacctggcagccaggtgttcaaggatgccaacagcatcaagaagatcttctacatgaagaaggccgagattgagcaccacgagatggccaagagcagcctgaggatgagcaacaagagagctgtgcagggcggccgcctgagcgccatcaccatggccctgcagtatggcagcgagagtgaagaagatgctgccctggccgccgcccgctatgaggagggggagagcgaggccgagagcatcaccagcttcatggatgtgagcaaccccttctaccagctgtatgacacagtgcgcagctgcaggaacaaccagggccagctgattgctgagcccttctaccacctgcccagcaagaagaagtacccagactactaccagcagatcaagatgcccatcagcctgcagcagatccgcaccaagctgaagaaccaggagtatgagaccctggaccacctggagtgtgacctgaacctgatgtttgaaaatgccaagcgctacaacgtgcccaacagcgccatctacaagagggtgctgaagctgcagcaggtgatgcaggccaagaagaaggagctggccaggagagatgacattgaagatggagacagcatgatcagcagcgccaccagtgacaccggcagcgccaagaggaagagcaagaagaacatcaggaagcagaggatgaagatcctcttcaacgtggtgctggaggcccgggagcccggcagcggccggcggctgtgtgacctcttcatggtgaagcccagcaagaaggactacccagactactacaagatcatcctggagcccatggacctgaagatcatcgagcacaacatcagaaatgacaagtatgctggggaggagggcatgattgaggacatgaagctgatgttcagaaatgcccggcactacaatgaggagggcagccaggtgtacaatgatgcccacatcctggagaagctgctgaaggagaagaggaaggagctgggccccctgcctgatgatgatgacatggccagccccaagctgaagctgagcaggaagagcggcatcagccccaagaagagcaagtacatgacccccatgcagcagaagctgaatgaggtgtatgaggccgtgaagaactacacagacaagaggggccggcggctgagcgccatcttcctgcggctgcccagccgctctgagctgcctgactactacctgaccatcaagaagcccatggacatggagaagatccgcagccacatgatggccaacaagtaccaggacatcgacagcatggtggaggactttgtgatgatgttcaacaatgcctgcacctacaatgaacctgagagcctcatctacaaggatgccctggtgctgcacaaggtgctgctggagacccggcgggacctggagggagatgaggacagccacgtgcccaacgtgaccctgctgatccaggagctgatccacaacctgtttgtgtctgtgatgagccaccaggatgatgagggccgctgctacagcgacagcctggccgagatcccagctgtggaccccaacttccccaacaagccacccctgacctttgacatcatcaggaagaatgtggagaacaaccgctacagaaggctggacctcttccaggagcacatgtttgaggtgctggagcgggcccggaggatgaacagaacagattctgagatctatgaagatgctgtggagctgcagcagttcttcatcaagatcagagatgagctgtgcaagaatggagagatcctgctgagccctgccctgagctacaccaccaagcacctgcacaatgatgtggagaaggagaggaaggagaagctgcccaaggagattgaggaggacaagctgaagcgggaggaggagaagcgggaggccgagaagtctgaggacagcagtggagctgctggcctgagcggcctgcacaggacctacagccaggactgcagcttcaagaacagcatgtaccacgtgggggactatgtgtatgtggagcctgctgaggccaacctgcagccccacatcgtgtgcatcgagcggctgtgggaggacagcgctggggagaagtggctgtatggctgctggttctaccggcccaatgagaccttccacctggccaccaggaagttcctggagaaggaggtgttcaagagtgactactacaacaaggtgcctgtgtccaagatcctgggcaaatgtgtggtgatgtttgtgaaggagtacttcaagctgtgcccagagaacttcagagatgaagatgtgtttgtgtgtgagagccgctacagcgccaagaccaagagcttcaagaagatcaagctgtggaccatgcccatcagctctgtgcgctttgtgcccagagatgtgcccctgcctgtggtgcgggtggcctctgtgtttgccaatgctgacaagggagatgatgagaagaacacagacaacagcgaggacagcagagctgaggacaacttcaacctggagaaggagaaggaggatgtgcctgtggagatgagcaatggagagcccggctgccactactttgagcagctgcactacaatgacatgtggctgaaggtgggggactgtgtgttcatcaagagccacggcctggtgcggccccgggtgggcagaattgagaaggtgtgggtgagagatggagctgcctacttctacggccccatcttcatccaccctgaggagacagagcacgagcccaccaagatgttctacaagaaggaggtgttcctgagcaacctggaggagacctgccccatgacctgcatcctgggcaaatgtgctgtgctgtccttcaaggacttcctgagctgccggcccacagagatcccagaaaatgacatcctgctgtgtgagagccgctacaatgaaagtgacaagcagatgaagaagttcaagggcctgaagcgcttcagcctgagcgccaaggtggtggatgatgagatctactacttcaggaagcccatcgtgccccagaaggagcccagccccctgctggagaagaagatccagctgctggaggccaagtttgctgagctggagggcggagatgatgacatcgaggagatgggagaggaggacagcgaggtgattgagccccccagcctgccccagctgcagacccccctggccagcgagctggacctgatgccctacaccccaccccagagcacccccaagagcgccaagggcagcgccaagaaggagggcagcaagaggaagatcaacatgagcggctacatcctcttcagcagcgagatgagagctgtgatcaaggcccagcacccagactacagctttggagagctgagccggctggtgggcacagagtggaggaacctggagacagccaagaaggccgagtatgagggcatgatgggcggctacccacctggcctgccccccctgcagggccctgtggatggcctggtgtccatgggctccatgcagcccctgcaccctgggggccccccaccccaccacctgcccccaggagtgcccggcctgcccggcatccccccacctggggtgatgaaccagggcgtggcccccatggtgggcaccccagcccctgggggcagcccctacggccagcaggtgggcgtgctgggccccccaggccagcaggcccccccaccctacccaggcccccaccctgctggcccccctgtgatccagcagcccaccacccccatgtttgtggcccccccacccaagacccagaggctgctgcacagcgaggcctacctgaagtacatcgagggcctgtctgctgagagcaacagcatcagcaagtgggaccagaccctggccgcccggaggagagatgtgcacctgagcaaggagcaggagagccggctgcccagccactggctgaagagcaaaggagcccacaccaccatggctgatgccctgtggaggctgcgggacctgatgctgcgggacaccctgaacatccggcaggcctacaacctggagaatgtgtag

SEQ ID NO: 164575 - DNA, 4749 bp, synthetic construct
  misc_feature 1..4749: note = Description of Artificial Sequence: Synthetic coding sequence
  source 1..4749: mol_type = other DNA
atgggcagcaagagaagaagagccaccagccccagcagctctgtgtctggggactttgatgatggccaccacagcgtgtccaccccaggccccagcaggaagagaagaaggctgagcaacctgcccaccgtggaccccatcgctgtgtgccacgagctgtacaacaccatccgggactacaaggatgagcagggccgcctgctgtgtgagctgttcatccgggcccccaagagaagaaaccagcctgactactatgaggtggtgtcccagcccatcgacctgatgaagatccagcagaagctgaagatggaggagtatgatgatgtgaacctgctgacagctgacttccagctgctcttcaacaatgccaagagctactacaagccagacagccctgagtacaaggccgcctgcaagctgtgggacctgtacctgcggaccagaaatgaatttgtgcagaagggggaggctgatgatgaagatgatgatgaagatggccaggacaaccagggcaccgtgacagagggcagcagccctgcctacctgaaggagatcctggagcagctgctggaggccatcgtggtggccaccaaccccagcggccgcctcatcagcgagctgttccagaagctgcccagcaaggtgcagtacccagactactatgccatcatcaaggagcccatcgacctgaagaccatcgcccagaggatccagaatggcagctacaagagcatccacgccatggccaaggacatcgacctgctggccaagaatgccaagacctacaatgaacctggcagccaggtgttcaaggatgccaacagcatcaagaagatcttctacatgaagaaggccgagattgagcaccacgagatggccaagagcagcctgaggatgaggacccccagcaacctggccgccgcccggctgaccggccccagccacagcaagggcagcctgggggaggagaggaaccccaccagcaagtactacagaaacaagagagctgtgcagggcggccgcctgagcgccatcaccatggccctgcagtatggcagcgagagtgaagaagatgctgccctggccgccgcccgctatgaggagggggagagcgaggccgagagcatcaccagcttcatggatgtgagcaaccccttctaccagctgtatgacacagtgcgcagctgcaggaacaaccagggccagctgattgctgagcccttctaccacctgcccagcaagaagaagtacccagactactaccagcagatcaagatgcccatcagcctgcagcagatccgcaccaagctgaagaaccaggagtatgagaccctggaccacctggagtgtgacctgaacctgatgtttgaaaatgccaagcgctacaacgtgcccaacagcgccatctacaagagggtgctgaagctgcagcaggtgatgcaggccaagaagaaggagctggccaggagagatgacattgaagatggagacagcatgatcagcagcgccaccagtgacaccggcagcgccaagaggaagagcaagaagaacatcaggaagcagaggatgaagatcctcttcaacgtggtgctggaggcccgggagcccggcagcggccggcggctgtgtgacctcttcatggtgaagcccagcaagaaggactacccagactactacaagatcatcctggagcccatggacctgaagatcatcgagcacaacatcagaaatgacaagtatgctggggaggagggcatgattgaggacatgaagctgatgttcagaaatgcccggcactacaatgaggagggcagccaggtgtacaatgatgcccacatcctggagaagctgctgaaggagaagaggaaggagctgggccccctgcctgatgatgatgacatggccagccccaagctgaagctgagcaggaagagcggcatcagccccaagaagagcaagtacatgacccccatgcagcagaagctgaatgaggtgtatgaggccgtgaagaactacacagacaagaggggccggcggctgagcgccatcttcctgcggctgcccagccgctctgagctgcctgactactacctgaccatcaagaagcccatggacatggagaagatccgcagccacatgatggccaacaagtaccaggacatcgacagcatggtggaggactttgtgatgatgttcaacaatgcctgcacctacaatgaacctgagagcctcatctacaaggatgccctggtgctgcacaaggtgctgctggagacccggcgggacctggagggagatgaggacagccacgtgcccaacgtgaccctgctgatccaggagctgatccacaacctgtttgtgtctgtgatgagccaccaggatgatgagggccgctgctacagcgacagcctggccgagatcccagctgtggaccccaacttccccaacaagccacccctgacctttgacatcatcaggaagaatgtggagaacaaccgctacagaaggctggacctcttccaggagcacatgtttgaggtgctggagcgggcccggaggatgaacagaacagattctgagatctatgaagatgctgtggagctgcagcagttcttcatcaagatcagagatgagctgtgcaagaatggagagatcctgctgagccctgccctgagctacaccaccaagcacctgcacaatgatgtggagaaggagaggaaggagaagctgcccaaggagattgaggaggacaagctgaagcgggaggaggagaagcgggaggccgagaagtctgaggacagcagtggagctgctggcctgagcggcctgcacaggacctacagccaggactgcagcttcaagaacagcatgtaccacgtgggggactatgtgtatgtggagcctgctgaggccaacctgcagccccacatcgtgtgcatcgagcggctgtgggaggacagcgctgagaaggaggtgttcaagagtgactactacaacaaggtgcctgtgtccaagatcctgggcaaatgtgtggtgatgtttgtgaaggagtacttcaagctgtgcccagagaacttcagagatgaagatgtgtttgtgtgtgagagccgctacagcgccaagaccaagagcttcaagaagatcaagctgtggaccatgcccatcagctctgtgcgctttgtgcccagagatgtgcccctgcctgtggtgcgggtggcctctgtgtttgccaatgctgacaagggagatgatgagaagaacacagacaacagcgaggacagcagagctgaggacaacttcaacctggagaaggagaaggaggatgtgcctgtggagatgagcaatggagagcccggctgccactactttgagcagctgcactacaatgacatgtggctgaaggtgggggactgtgtgttcatcaagagccacggcctggtgcggccccgggtgggccgcatcgagaaggtgtgggtgagagatggagctgcctacttctacggccccatcttcatccaccctgaggagacagaacatgagcccaccaagatgttctacaagaaggaggtgttcctgagcaacctggaggagacctgccccatgacctgcatcctgggcaaatgtgctgtgctgtccttcaaggacttcctgagctgccggcccacagagatcccagaaaatgacatcctgctgtgtgagagccgctacaatgaaagtgacaagcagatgaagaagttcaagggcctgaagcgcttcagcctgagcgccaaggtggtggatgatgagatctactacttcaggaagcccatcgtgccccagaaggagcccagccccctgctggagaagaagatccagctgctggaggccaagtttgctgagctggagggcggagatgatgacatcgaggagatgggagaagaagattctgagagcacccccaagagcgccaagggcagcgccaagaaggagggcagcaagaggaagatcaacatgagcggctacatcctcttcagcagcgagatgagagctgtgatcaaggcccagcacccagactacagctttggagagctgagccggctggtgggcacagagtggaggaacctggagacagccaagaaggccgagtatgagggcatgatgggcggctacccacctggcctgccccccctgcagggccctgtggatggcctggtgtccatgggctccatgcagcccctgcaccctgggggccccccaccccaccacctgcccccaggagtgcccggcctgcccggcatccccccacctggggtgatgaaccagggcgtggcccccatggtgggcaccccagcccctgggggcagcccctacggccagcaggtgggcgtgctgggccccccaggccagcaggcccccccaccctacccaggcccccaccctgctggcccccctgtgatccagcagcccaccacccccatgtttgtggcccccccacccaagacccagaggctgctgcacagcgaggcctacctgaagtacatcgagggcctgtctgctgagagcaacagcatcagcaagtgggaccagaccctggccgcccggaggagagatgtgcacctgagcaaggagcaggagagccggctgcccagccactggctgaagagcaaaggagcccacaccaccatggctgatgccctgtggaggctgcgggacctgatgctgcgggacaccctgaacatccggcaggcctacaacctggagaatgtgtag

SEQ ID NO: 164576 - DNA, 4905 bp, synthetic construct
  misc_feature 1..4905: note = Description of Artificial Sequence: Synthetic coding sequence
  source 1..4905: mol_type = other DNA
atgggcagcaagagaagaagagccaccagccccagcagctctgtgtctggggactttgatgatggccaccacagcgtgtccaccccaggccccagcaggaagagaagaaggctgagcaacctgcccaccgtggaccccatcgctgtgtgccacgagctgtacaacaccatccgggactacaaggatgagcagggccgcctgctgtgtgagctgttcatccgggcccccaagagaagaaaccagcctgactactatgaggtggtgtcccagcccatcgacctgatgaagatccagcagaagctgaagatggaggagtatgatgatgtgaacctgctgacagctgacttccagctgctcttcaacaatgccaagagctactacaagccagacagccctgagtacaaggccgcctgcaagctgtgggacctgtacctgcggaccagaaatgaatttgtgcagaagggggaggctgatgatgaagatgatgatgaagatggccaggacaaccagggcaccgtgacagagggcagcagccctgcctacctgaaggagatcctggagcagctgctggaggccatcgtggtggccaccaaccccagcggccgcctcatcagcgagctgttccagaagctgcccagcaaggtgcagtacccagactactatgccatcatcaaggagcccatcgacctgaagaccatcgcccagaggatccagaatggcagctacaagagcatccacgccatggccaaggacatcgacctgctggccaagaatgccaagacctacaatgaacctggcagccaggtgttcaaggatgccaacagcatcaagaagatcttctacatgaagaaggccgagattgagcaccacgagatggccaagagcagcctgaggatgaggacccccagcaacctggccgccgcccggctgaccggccccagccacagcaagggcagcctgggggaggagaggaaccccaccagcaagtactacagaaacaagagagctgtgcagggcggccgcctgagcgccatcaccatggccctgcagtatggcagcgagagtgaagaagatgctgccctggccgccgcccgctatgaggagggggagagcgaggccgagagcatcaccagcttcatggatgtgagcaaccccttctaccagctgtatgacacagtgcgcagctgcaggaacaaccagggccagctgattgctgagcccttctaccacctgcccagcaagaagaagtacccagactactaccagcagatcaagatgcccatcagcctgcagcagatccgcaccaagctgaagaaccaggagtatgagaccctggaccacctggagtgtgacctgaacctgatgtttgaaaatgccaagcgctacaacgtgcccaacagcgccatctacaagagggtgctgaagctgcagcaggtgatgcaggccaagaagaaggagctggccaggagagatgacattgaagatggagacagcatgatcagcagcgccaccagtgacaccggcagcgccaagaggaagagcaagaagaacatcaggaagcagaggatgaagatcctcttcaacgtggtgctggaggcccgggagcccggcagcggccggcggctgtgtgacctcttcatggtgaagcccagcaagaaggactacccagactactacaagatcatcctggagcccatggacctgaagatcatcgagcacaacatcagaaatgacaagtatgctggggaggagggcatgattgaggacatgaagctgatgttcagaaatgcccggcactacaatgaggagggcagccaggtgtacaatgatgcccacatcctggagaagctgctgaaggagaagaggaaggagctgggccccctgcctgatgatgatgacatggccagccccaagctgaagctgagcaggaagagcggcatcagccccaagaagagcaagtacatgacccccatgcagcagaagctgaatgaggtgtatgaggccgtgaagaactacacagacaagaggggccggcggctgagcgccatcttcctgcggctgcccagccgctctgagctgcctgactactacctgaccatcaagaagcccatggacatggagaagatccgcagccacatgatggccaacaagtaccaggacatcgacagcatggtggaggactttgtgatgatgttcaacaatgcctgcacctacaatgaacctgagagcctcatctacaaggatgccctggtgctgcacaaggtgctgctggagacccggcgggacctggagggagatgaggacagccacgtgcccaacgtgaccctgctgatccaggagctgatccacaacctgtttgtgtctgtgatgagccaccaggatgatgagggccgctgctacagcgacagcctggccgagatcccagctgtggaccccaacttccccaacaagccacccctgacctttgacatcatcaggaagaatgtggagaacaaccgctacagaaggctggacctcttccaggagcacatgtttgaggtgctggagcgggcccggaggatgaacagaacagattctgagatctatgaagatgctgtggagctgcagcagttcttcatcaagatcagagatgagctgtgcaagaatggagagatcctgctgagccctgccctgagctacaccaccaagcacctgcacaatgatgtggagaaggagaggaaggagaagctgcccaaggagattgaggaggacaagctgaagcgggaggaggagaagcgggaggccgagaagtctgaggacagcagtggagctgctggcctgagcggcctgcacaggacctacagccaggactgcagcttcaagaacagcatgtaccacgtgggggactatgtgtatgtggagcctgctgaggccaacctgcagccccacatcgtgtgcatcgagcggctgtgggaggacagcgctggggagaagtggctgtatggctgctggttctaccggcccaatgagaccttccacctggccaccaggaagttcctggagaaggaggtgttcaagagtgactactacaacaaggtgcctgtgtccaagatcctgggcaaatgtgtggtgatgtttgtgaaggagtacttcaagctgtgcccagagaacttcagagatgaagatgtgtttgtgtgtgagagccgctacagcgccaagaccaagagcttcaagaagatcaagctgtggaccatgcccatcagctctgtgcgctttgtgcccagagatgtgcccctgcctgtggtgcgggtggcctctgtgtttgccaatgctgacaagggagatgatgagaagaacacagacaacagcgaggacagcagagctgaggacaacttcaacctggagaaggagaaggaggatgtgcctgtggagatgagcaatggagagcccggctgccactactttgagcagctgcactacaatgacatgtggctgaaggtgggggactgtgtgttcatcaagagccacggcctggtgcggccccgggtgggcagaattgagaaggtgtgggtgagagatggagctgcctacttctacggccccatcttcatccaccctgaggagacagagcacgagcccaccaagatgttctacaagaaggaggtgttcctgagcaacctggaggagacctgccccatgacctgcatcctgggcaaatgtgctgtgctgtccttcaaggacttcctgagctgccggcccacagagatcccagaaaatgacatcctgctgtgtgagagccgctacaatgaaagtgacaagcagatgaagaagttcaagggcctgaagcgcttcagcctgagcgccaaggtggtggatgatgagatctactacttcaggaagcccatcgtgccccagaaggagcccagccccctgctggagaagaagatccagctgctggaggccaagtttgctgagctggagggcggagatgatgacatcgaggagatgggagaggaggacagcgaggtgattgagccccccagcctgccccagctgcagacccccctggccagcgagctggacctgatgccctacaccccaccccagagcacccccaagagcgccaagggcagcgccaagaaggagggcagcaagaggaagatcaacatgagcggctacatcctcttcagcagcgagatgagagctgtgatcaaggcccagcacccagactacagctttggagagctgagccggctggtgggcacagagtggaggaacctggagacagccaagaaggccgagtatgagggcatgatgggcggctacccacctggcctgccccccctgcagggccctgtggatggcctggtgtccatgggctccatgcagcccctgcaccctgggggccccccaccccaccacctgcccccaggagtgcccggcctgcccggcatccccccacctggggtgatgaaccagggcgtggcccccatggtgggcaccccagcccctgggggcagcccctacggccagcaggtgggcgtgctgggccccccaggccagcaggcccccccaccctacccaggcccccaccctgctggcccccctgtgatccagcagcccaccacccccatgtttgtggcccccccacccaagacccagaggctgctgcacagcgaggcctacctgaagtacatcgagggcctgtctgctgagagcaacagcatcagcaagtgggaccagaccctggccgcccggaggagagatgtgcacctgagcaaggagcaggagagccggctgcccagccactggctgaagagcaaaggagcccacaccaccatggctgatgccctgtggaggctgcgggacctgatgctgcgggacaccctgaacatccggcaggcctacaacctggagaatgtgtag

SEQ ID NO: 164577 - DNA, 459 bp, synthetic construct
  misc_feature 1..459: note = Description of Artificial Sequence: Synthetic coding sequence
  source 1..459: mol_type = other DNA
atgggcagcaagagaagaagagccaccagccccagcagctctgtgtctggggactttgatgatggccaccacagcgtgtccaccccaggccccagcaggaagagaagaaggctgagcaacctgcccaccgtggaccccatcgctgtgtgccacgagctgtacaacaccatccgggactacaaggatgagcagggccgcctgctgtgtgagctgttcatccgggcccccaagagaagaaaccagcctgactactatgaggtggtgtcccagcccatcgacctgatgaagatccagcagaagctgaagatggaggagtatgatgatgtgaacctgctgacagctgacttccagctgctcttcaacaatgccaagagctactacaagccagacagccctgagtacaaggccgcctgcaagctgtgggacctgtacctgcggaccagaaatgaatttgtgtag

SEQ ID NO: 164578 - DNA, 81 bp, synthetic construct
  misc_feature 1..81: note = Description of Artificial Sequence: Synthetic coding sequence
  source 1..81: mol_type = other DNA
atgggcagcaagagaagaagagccaccagccccagcagctctgtgtctggggactttgatgatggccaccacagcgtgtag

SEQ ID NO: 164579 - DNA, 693 bp, synthetic construct
  misc_feature 1..693: note = Description of Artificial Sequence: Synthetic coding sequence
  source 1..693: mol_type = other DNA
atgggcagcaagagaagaagagccaccagccccagcagctctgtgtctggggactttgatgatggccaccacagcgtgtccaccccaggccccagcaggaagagaagaaggctgagcaacctgcccaccgtggaccccatcgctgtgtgccacgagctgtacaacaccatccgggactacaaggatgagcagggccgcctgctgtgtgagctgttcatccgggcccccaagagaagaaaccagcctgactactatgaggtggtgtcccagcccatcgacctgatgaagatccagcagaagctgaagatggaggagtatgatgatgtgaacctgctgacagctgacttccagctgctcttcaacaatgccaagagctactacaagccagacagccctgagtacaaggccgcctgcaagctgtgggacctgtacctgcggaccagaaatgaatttgtgcagaagggggaggctgatgatgaagatgatgatgaagatggccaggacaaccagggcaccgtgacagagggcagcagccctgcctacctgaaggagatcctggagcagctgctggaggccatcgtggtggccaccaaccccagcggccgcctcatcagcgagctgttccagaagctgcccagcaaggtgcagtacccagactactatgccatcatcaaggagcccatcgacctgtag

SEQ ID NO: 164580 - DNA, 132 bp, synthetic construct
  misc_feature 1..132: note = Description of Artificial Sequence: Synthetic coding sequence
  source 1..132: mol_type = other DNA
atgggcagcaagagaagaagagccaccagccccagcagctctgtgtctggggactttgatgatggccaccacagcgtgtccaccccaggccccagcaggaagagaagaaggctgagcaacctgcccacctag

SEQ ID NO: 164581 - DNA, 357 bp, synthetic construct
  misc_feature 1..357: note = Description of Artificial Sequence: Synthetic coding sequence
  source 1..357: mol_type = other DNA
atgggcagcaagagaagaagagccaccagccccagcagctctgtgtctggggactttgatgatggccaccacagcgtgtccaccccaggccccagcaggaagagaagaaggctgagcaacctgcccaccgtggaccccatcgctgtgtgccacgagctgtacaacaccatccgggactacaaggatgagcagggccgcctgctgtgtgagctgttcatccgggcccccaagagaagaaaccagcctgactactatgaggtggtgtcccagcccatcgacctgatgaagatccagcagaagctgaagatggaggagtatgatgatgtgaacctgctgacagctgacttccagctgtag

SEQ ID NO: 164582 - DNA, 264 bp, synthetic construct
  misc_feature 1..264: note = Description of Artificial Sequence: Synthetic coding sequence
  source 1..264: mol_type = other DNA
atgggcagcaagagaagaagagccaccagccccagcagctctgtgtctggggactttgatgatggccaccacagcgtgtccaccccaggccccagcaggaagagaagaaggctgagcaacctgcccaccgtggaccccatcgctgtgtgccacgagctgtacaacaccatccgggactacaaggatgagcagggccgcctgctgtgtgagctgttcatccgggcccccaagagaagaaaccagcctgactactatgaggtgtag

SEQ ID NO: 164583 - DNA, 132 bp, synthetic construct; identical to SEQ ID NO: 164580
  misc_feature 1..132: note = Description of Artificial Sequence: Synthetic coding sequence
  source 1..132: mol_type = other DNA

SEQ ID NO: 164584 - DNA, 828 bp, synthetic construct
  misc_feature 1..828: note = Description of Artificial Sequence: Synthetic coding sequence
  source 1..828: mol_type = other DNA
atggagggcgtggccgtggtgacagctggctctgtgggcgccgccaagacagaaggagctgctgccctgcccccacctcctcctgtgtccccaccagccctgaccccagccccagctgctggggaggagggccctgcccccctgtctgaaacaggagcccctggctgcagcggcagcaggcctcctgagctggagcctgagaggagcctgggccgcttccggggccgctttgaagatgaagatgaggagctggaggaggaggaggagctggaggaggaggaggaggaggaggaggaggacatgagccacttcagcctgcggctggagggcggccggcaggacagtgaagatgaggaggagcggctcatcaacctgtctgagctgaccccctacatcctgtgcagcatctgcaagggctacctgattgatgccaccaccatcacagaatgtctgcacaccttctgcaagagctgcatcgtgcgccacttctactacagcaaccgctgccccaagtgcaacatcgtggtgcaccagacccagcccctgtacaacatcagcgccaatgaaggaacaggccacttcaagcccctggagaagaagtttgtgcgggtgtctggagaggccaccatcggccacgtggagaagttcctgcggaggaagatgggcctggaccctgcctgccaggtggacatcatctgtggggaccacctgctggagcagtaccagaccctgcgggagatccggcgggccatcggagatgctgccatgcaggacggcctgctggtgctgcactacggcctggtggtgagccccctgaagatcacctag

SEQ ID NO: 164585 - DNA, 1053 bp, synthetic construct
  misc_feature 1..1053: note = Description of Artificial Sequence: Synthetic coding sequence
  source 1..1053: mol_type = other DNA
atggagggcgtggccgtggtgacagctggctctgtgggcgccgccaagacagaaggagctgctgccctgcccccacctcctcctgtgtccccaccagccctgaccccagccccagctgctggggaggagggccctgcccccctgtctgaaacaggagcccctggctgcagcggcagcaggcctcctgagctggagcctgagaggagcctgggccgcttccggggccgctttgaagatgaagatgaggagctggaggaggaggaggagctggaggaggaggaggaggaggaggaggaggacatgagccacttcagcctgcggctggagggcggccggcaggacagtgaagatgaggaggagcggctcatcaacctgtctgagctgaccccctacatcctgtgcagcatctgcaagggctacctgattgatgccaccaccatcacagaatgtctgcacaccttctgcaagagctgcatcgtgcgccacttctactacagcaaccgctgccccaagtgcaacatcgtggtgcaccagacccagcccctgtacaacatccggctggaccggcagctgcaggacatcgtgtacaagctggtgatcaacctggaggagcgggagaagaagcagatgcatgacttctacaaggagcggggcctggaggtgcccaagccagctgtgccccagcctgtgcccagcagcaagggccgcagcaagaaggtgctggagagcgtcttccgcatccccccagagctggacatgagcctgctgctggagttcatcggggccaatgaaggcaccggccacttcaagcccctggagaagaagtttgtgcgggtgtctggagaggccaccatcggccacgtggagaagttcctgcggaggaagatgggcctggaccctgcctgccaggtggacatcatctgtggggaccacctgctggagcagtaccagaccctgcgggagatcagaagagccatcggagatgctgccatgcaggacggcctgctggtgctgcactacggcctggtggtgagccccctgaagatcacctag

SEQ ID NO: 164586 - DNA, 10191 bp, synthetic construct
  misc_feature 1..10191: note = Description of Artificial Sequence: Synthetic coding sequence
  source 1..10191: mol_type = other DNA
atgacagcctggctgatcagcctgatgagcattgaggtgctgctgctggccgtgcgccacctgagcctgcacatcgagcctgaggagggcagcctggccggcggcacctggatcaccgtcatctttgatggcctggagctgggcgtgctgtaccccaacaacggcagccagctggagatccacctggtgaatgtgaacatggtggtgcctgccctgcggtctgtgccctgtgatgtgtttcctgtgttcctggacctgcctgtggtgacctgcaggaccaggtctgtgctgtctgaggcccacgagggcctgtacttcctggaggcctactttggaggccagctggtgagcagccccaaccctggcccccgggacagctgcaccttcaagttcagcaaggcccagacccccatcgtgcaccaggtgtacccacccagcggcgtgcctgggaagctgatccacgtgtatggctggatcatcaccggccgcctggagacctttgattttgatgctgagtacatcgacagccctgtgatcctggaggcccagggcgacaagtgggtgaccccctgcagcctcatcaaccggcagatgggcagctgctaccccatccaggaggaccacggcctgggcaccctgcagtgccacgtggagggggactacatcggcagccagaatgtgtccttcagcgtcttcaacaagggcaagtccatggtgcacaagaaggcctggctgatcagcgccaagcaggacctcttcctgtaccagacccacagcgagatcctgtctgtgtttcctgagaccggcagcctgggcggccgcaccaacatcaccatcaccggggacttctttgacaacagcgcccaggtgaccatcgccggcatcccctgtgacatcagacatgtgagccccaggaagattgagtgcaccacccgggcccctgggaaggatgtgcggctgaccaccccccagcccggcaacagaggcctgctgtttgaggtgggagatgctgtggagggcctggagctgacagaggccaccccaggctaccgctggcagatcgtgcccaatgccagcagccccttcggcttctggagccaggagggccagcccttccgggcccggctgagcggcttctttgtggcccctgagaccaacaactacaccttctggatccaggccgacagccaggccagcctgcacttctcctggagcgaggagcccaggaccaaggtgaaggtggccagcatctctgtgggcacagctgactggtttgacagctgggagcagaacagagatgagggcacctggcagcagaagacccccaagctggagctgctgggcggggccatgtactacctggaggccgagcaccacggcatcgcccccagccggggcatgagaattggagtgcagatccacaacacctggctgaacccagatgtggtgaccacctacctgcgggagaagcaccagatccgggtgcgggcccagaggctgcctgaggtgcaggtgctgaatgtgtctggccggggcaacttcttcctgacctgggacaacgtgagcagccagcccatcccagccaatgccacagcccacctgatccagaccaccatcgaggagctgctggccgtgaagtgcaagctggagcccctgtggagcaacatcctgctgcggctgggctttgagcggggccctgaggtgagcaacagtgatggagacctgaccagcggcacagagcccttctgtggccgcttcagcctgcggcagcccaggcacctggtgctgaccccacctgctgcccagaagggctaccgcctggaccagtacacccacctgtgcctggcctacaagggccacatgaacaagatcctgaagatgattgtgtccttcaccatcggcttccagaacatggtgaagaacaccacctgtgactggagcctgaccaggaccagccctgagagctggcagtttgactgcacagacctgtgggagacctgtgtgcgctgctttggagacctgcagcccccaccagccaacagccctgtgctggtgcaccagatcaacctgctgcccctggcccaggagaccggcctcttctacgtggatgagatcatcatcgctgacaccaacgtgacagtgtcccaggccgacagcggcacagcccggcctgggggcaacctggtggagagcgtgtctgtggtgggcagcccccctgtgtacagcgtgacctcctggctggccggctgcggcacagagctgcccctcatcacagcccggtctgtgcccacagagggcacagaggagggcagcggcctggtgctggtgaccacccagaggcggcagaggaccagcccccccctgggcggccacttccgcatccagctgcccaacacagtcatcagtgatgtgcctgtgcagatcagcgcccaccacctgcaccagctgctgcagaacaatgctgatgacttcaccagccgctacctgaatgccagtgacttcaccgtgaaggaggacctgtacacctgctatgagcacgtgtggaccctgtcctggagcacccagatcggggacctgcccaacttcatccgggtgtctgatgagaacctgactggagtgaacccagctgctgccaccagggtggtgtatgatggcggcgtcttcctgggccccatctttggagacatgctggccacagccaaccagcacacccaggtggtggtgcgggtgaatgatgtgcctgcccactgccccggcagctgcagcttccagtacctgcagggcagcaccccctgtgtgcacagcgtgtggtacagcattgatggagacatcaacctgatgatctacatcactggaacaggcttcagcggggacagccagttcctgcaggtgacagtgaacaagaccagctgcaaggtgatcttcagcaaccagaccaacgtggtgtgccagacagacctgctgcctgtgggcatgcaccgcatcctgatgctggtgcggcccagcggcctggccatcagcgccactggagaagatctcttcctgaatgtgaagccccggctggacatggtggagcccagcagagctgctgacatcggcggcctgtgggccaccatccggggcagcagcctggagggcgtgtccctcatcctgtttggcagctacagctgtgccatcaacgtggccaccagcaacagcagccgcatccagtgcaaggtgcccccccggggcaaggatggccgcatcgtgaatgtgaccgtcatccggggggactacagcgctgtgctgccccgggccttcacctacgtgagcagcctgaaccctgtgattgtgaccctgagcaggaacatcagcaacattgctggaggagagaccctggtgattggagtggcccggctgatgaactacacagacctggatgtggaggtgcacgtgcaggatgccctggcccctgtgcacacccagagcgcctggggcctggaggtggccctgccccccctgcctgctggcctgcaccgcatctctgtgtccatcaatggagtgtccatccacagccagggcgtggacctgcacatccagtacctgacagaggtgttcagcattgagccctgctgcggcagcctgctgggcggcaccatcctgagcatctctggaattggcttcagccgggaccctgccctggtgtgggtgctggtgggcaacagaagctgtgacatcgtgaacctgacagaggccagcatctggtgtgagaccctgcctgccccccagatcccagatgctggggcccccaccgtgcctgctgctgtggaggtgtgggccggcaaccgcttctttgcccggggccccagccccagcctggtgggcaagggcttcaccttcatgtatgaagctgctgccacccctgtggtgacagccatgcagggcgagatcaccaacagcagcctgagcctgcacgtgggcggcagcaacctgagcaacagcgtcatcctgctgggcaacctgaactgtgatgtggagacccagagcttccagggcaatgtgtccctgagcggctgcagcatccccctgcacagcctggaggccggcatctaccccctgcaggtgcggcagaagcagatgggctttgccaacatgtctgtggtgctgcagcagtttgctgtgatgccccgcatcatggccatcttccccagccagggcagcgcctgtggcggcaccatcctgactgtgcggggcctgctgctgaacagcagaagaagatctgtgcgggtggacctgagcggccccttcacctgtgtgatcctgagcctgggggaccacaccatcctgtgccaggtgtccctggagggggaccccctgcccggggccagcttcagcctgaatgtgacagtgctggtgaatggcctgaccagcgagtgccagggcaactgcaccctcttcatccgggaggaggccagccctgtgatggatgccctgagcaccaacaccagcggcagcctgaccaccgtgctgatccggggccagaggctggccaccacagcagatgagcccatggtgtttgtggatgaccagctgccctgcaatgtgaccttcttcaatgccagccacgtggtgtgccagacccgggacctggcccctggcccccactacctgtctgtgttctacaccagaaatggctacgcctgcagcggaaatgtgagccgccacttctacatcatgccccaggtgttccactacttccccaagaacttcagcctgcacggcggcagcctgctgaccatcgagggcaccggcctgcggggccagaacaccacctctgtgtacatcgaccagcagacctgcctgactgtgaacatcggggctgagctgatccgctgcatcgtgcccactggaaatggatctgtggccctggagattgaggtggatggcctgtggtaccacatcggggtcatcggctacaacaaggccttcaccccagagctgatcagcatcagccagagtgatgacatcctgacctttgctgtggcccagatcagcggggccgccaacatcgacatcttcatcggcatgagcccctgtgtgggcgtgtctggcaaccacacagtgctgcagtgtgtggtgcccagcctgcctgctggggagtaccacgtgcggggctatgactgcatccggggctgggccagcagcgccctggtgttcaccagcagggtcatcatcacagctgtgacagaaaattttggctgcctgggcggccgcctggtgcacgtgtttggagctggcttcagccctggaaatgtgtctgctgctgtgtgtggggccccctgccgggtgctggccaatgccaccgtgtctgccttcagctgcctggtgctgcccctggatgtgtccctggccttcctgtgtggcctgaagcgggaggaggacagctgtgaggccgcccggcacacctacgtgcagtgtgacctgactgtggccatggccacagagcagctgctggagagctggccctacctgtacatctgtgaggagagcagccagtgcctgtttgtgcctgaccactgggccgagagcatgttccccagcttcagcggcctcttcatcagccccaagctggagagagatgaggtgctgatctacaacagcagctgcaacatcaccatggagacagaggccgagatggagtgtgagacccccaaccagcccatcaccgtgaagatcacagagatcaggaagcgctggggccagaacacccagggcaacttcagcctgcagttctgccgccgctggagcaggacccacagctggttccctgagcggctgccccaggatggagacaacgtgacagtggagaatggccagctgctgctgctggacaccaacaccagcatcctgaacctgctgcacatcaagggcggcaagctgatcttcatggcccctggccccatcgagctgcgggcccacgccatcctggtgtctgatggaggagagctgcgcatcggcagcgaggacaagcccttccagggccgggcccagatcaccctgtatggcagcagctacagcacccccttcttcccctatggagtgaagttcctggccgtgagaaatggcaccctgagcctgcacggcagcctgcctgaggtgattgtgacctgcctgcgggccacagcccacgccctggacacagtgctggccctggaggatgctgtggactggaaccctggagatgaggtggtgatcatcagcggcaccggggtgaagggggccaagcccatggaggagatcgtgacagtggagaccgtgcaggacacagacctgtacctgaagagccccctgcgctacagccacaacttcacagagaactgggtggccggggagcaccacatcctgaaggccaccgtggccctgctgagccgcagcatcaccatccagggcaacctgaccaatgaaagagagaagctgctggtgtcctgccaggaggccaatgcccctgagggcaacctgcagcactgcctgtacagcatgtctgagaagatgctgggcagccgggacatgggcgcccgggtcatcgtgcagagcttccctgaggagcccagccaggtgcagctgaagggcgtgcagttccaggtgctgggccaggccttccacaagcacctgagcagcctgaccctggtgggcgccatgagggagagcttcatccagggctgcaccgtgagaaattccttcagccggggcctgtccatgtgtggcaccctgggcctgaaggtggacagcaatgtgttctacaacatcctgggccacgccctgctggtgggcacctgcacagagatgagatacatctcctgggaggccatccacggcaggaaggatgactggagcggccacggcaacatcatccggaacaacgtcatcatccaggtgtctggagctgagggcctgagcaaccctgagatgctgacccccagcggcatctacatctgcagccccaccaacgtgattgagggcaacagagtgtgtggggccggctacggctacttcttccacctgatgaccaaccagaccagccaggcccccctgctgtccttcacccagaacatcgcccacagctgcaccaggtatggcctgtttgtgtaccccaagttccagcccccctgggacaacgtgacaggcaccaccctcttccagagcttcaccgtgtgggagagcgctggaggagcccagatcttccgcagcagcaacctgcggctgaagaacttcaaggtgtacagctgccgggactttggaattgatgtgctggagagtgatgccaacacctctgtgacagacagcctgctgctgggccactttgcccacaagggcagcctgtgcatgagcagcggcatcaagacccccaagcgctgggagctgatggtgagcaacaccacctttgtgaactttgacctgatcaactgtgtggccatccgcacctgcagcgactgcagccagggccagggcggcttcaccgtgaagaccagccagctgaagttcaccaacagcagcaacctggtggccttccccttcccccatgctgccatcctggaggacctggatggcagcctgagcggcaagaacagaagccacatcctggcctccatggagaccctgagcgccagctgcctggtgaacagcagctttggccgggtggtgcacggcagcgcctgtggcggcggcgtgctcttccacaggatgagcatcggcctggccaacaccccagaggtgtcctatgacctgaccatgacagacagcaggaacaagaccaccaccgtgaactacgtgcgggacaccctgagcaacccccggggctggatggccctgctgctggaccaggagacctacagcctgcagagcgagaacctgtggatcaacagaagcctgcagtacagcgccacctttgacaactttgcccctggcaactacctgctgctggtgcacacagacctgcccccctacccagacatcctgctgcgctgtggcagccgggtgggcctgtccttccccttcctgcccagccctggccagaaccagggctgtgactggttcttcaacagccagctgcggcagctgacctacctggtgtctggagagggccaggtgcaggtgatcctgcgggtgaaggagggcatgccacccaccatcagcgccagcaccagcgcccctgagagcgccctgaagtggagcctgcctgagacctggcagggcgtggaggagggctggggcggctacaacaacaccatccctggccctggagatgatgtgctgatcctgcccaacagaacagtgctggtggacacagacctgcccttcttcaagggcctgtatgtgatgggcaccctggacttccctgtggacaggagcaatgtgctgtctgtggcctgcatggtgattgctggaggagagctgaaggtgggcaccctggagaaccccctggagaaggagcagaagctgctgatcctgctgcgggccagcgagggcgtcttctgtgacaggatgaatggcatccacatcgaccccggcaccatcggcgtgtatggcaaggtgcacctgtacagcgcctaccccaagaacagctggacccacctgggcgctgacatcgccagcggaaatgaaagaatcatcgtggaggatgctgtggactggaggcctcatgacaagatcgtgctgagcagcagcagctatgagccccatgaggccgaggtgctgactgtgaaggaggtgaagggccaccacgtgcgcatctatgaaaggctgaagcaccgccacatcggctctgtgcacgtgacagaagatggccgccacatccggctggccgctgaggtgggcctgctgaccaggaacatccagatccagccagatgtgtcctgccggggccgcctgtttgtgggcagcttcaggaagagcagccgggaggagttctctggagtgctgcagctgctgaatgtggagatccagaactttggcagccccctgtacagctctgtggagttcagcaatgtgtctgctggctcctggatcatcagcagcaccctgcaccagagctgtggcggcggcatccacgccgccgccagccacggcgtgctgctgaatgacaacatcgtgtttggaacagctggccatggaattgacctggagggccaggcctacacagtgaccaacaacctggtggtgctgatgacccagcctgcctggagcaccatctgggtggccggcatcaaggtgaaccaggtgaaggacatcaacctgcacggcaatgtggtggccggcagcgagcggctgggcttccacatccggggccacaagtgcagcagctgtgagctgctgtggagcgacaacgtggcccacagcagcctgcacggcctgcacctgtacaaggagagcggcctggacaactgcacccgcatcagcggcttcctggccttcaagaactttgattatggagccatgctgcacgtggagaacagcgtggagattgagaacatcaccctggtggacaacaccatcggcctgctggccgtggtgtatgtgttttctgccccccagaacagcgtgaagaaggtgcagatcgtgctgagaaattctgtgattgtggccaccagcagcagctttgactgcatccaggacaaggtgaagccccacagcgccaacctgaccagcacagaccgggcccccagcaacccccggggcggcagaattggcatcctgtggcctgtgttcaccagcgagcccaaccagtggccccaggagccctggcacaaggtgagaaatgaccacagcatcagcggcatcatgaagctgcaggatgtgaccttcagcagctttgtgaagagctgctacagtgatgacctggatgtgtgcatcctgcccaatgcagaaaattctggcatcatgcaccccatcacagctgagaggaccaggatgctgaagatcaaggacaagaacaagttctacttccccagcctgcagcccaggaaggacctgggcaaggtggtgtgcccagagctggactgtgccagccccaggaagtacctgttcaaggacctggatggccgggccctgggcctgcccccacctgtgtctgtgttccccaagacagaggccgagtggacagccagcttcttcaatgctgtgaccacagagcaggccctgaagatcagcgagtag

SEQ ID NO: 164587 - DNA, 12225 bp, synthetic construct
  misc_feature 1..12225: note = Description of Artificial Sequence: Synthetic coding sequence
  source 1..12225: mol_type = other DNA
atgacagcctggctgatcagcctgatgagcattgaggtgctgctgctggccgtgcgccacctgagcctgcacatcgagcctgaggagggcagcctggccggcggcacctggatcaccgtcatctttgatggcctggagctgggcgtgctgtaccccaacaacggcagccagctggagatccacctggtgaatgtgaacatggtggtgcctgccctgcggtctgtgccctgtgatgtgtttcctgtgttcctggacctgcctgtggtgacctgcaggaccaggtctgtgctgtctgaggcccacgagggcctgtacttcctggaggcctactttggaggccagctggtgagcagccccaaccctggcccccgggacagctgcaccttcaagttcagcaaggcccagacccccatcgtgcaccaggtgtacccacccagcggcgtgcctgggaagctgatccacgtgtatggctggatcatcaccggccgcctggagacctttgattttgatgctgagtacatcgacagccctgtgatcctggaggcccagggcgacaagtgggtgaccccctgcagcctcatcaaccggcagatgggcagctgctaccccatccaggaggaccacggcctgggcaccctgcagtgccacgtggagggggactacatcggcagccagaatgtgtccttcagcgtcttcaacaagggcaagtccatggtgcacaagaaggcctggctgatcagcgccaagcaggacctcttcctgtaccagacccacagcgagatcctgtctgtgtttcctgagaccggcagcctgggcggccgcaccaacatcaccatcaccggggacttctttgacaacagcgcccaggtgaccatcgccggcatcccctgtgacatcagacatgtgagccccaggaagattgagtgcaccacccgggcccctgggaaggatgtgcggctgaccaccccccagcccggcaacagaggcctgctgtttgaggtgggagatgctgtggagggcctggagctgacagaggccaccccaggctaccgctggcagatcgtgcccaatgccagcagccccttcggcttctggagccaggagggccagcccttccgggcccggctgagcggcttctttgtggcccctgagaccaacaactacaccttctggatccaggccgacagccaggccagcctgcacttctcctggagcgaggagcccaggaccaaggtgaaggtggccagcatctctgtgggcacagctgactggtttgacagctgggagcagaacagagatgagggcacctggcagcagaagacccccaagctggagctgctgggcggggccatgtactacctggaggccgagcaccacggcatcgcccccagccggggcatgagaattggagtgcagatccacaacacctggctgaacccagatgtggtgaccacctacctgcgggagaagcaccagatccgggtgcgggcccagaggctgcctgaggtgcaggtgctgaatgtgtctggccggggcaacttcttcctgacctgggacaacgtgagcagccagcccatcccagccaatgccacagcccacctgatccagaccaccatcgaggagctgctggccgtgaagtgcaagctggagcccctgtggagcaacatcctgctgcggctgggctttgagcggggccctgaggtgagcaacagtgatggagacctgaccagcggcacagagcccttctgtggccgcttcagcctgcggcagcccaggcacctggtgctgaccccacctgctgcccagaagggctaccgcctggaccagtacacccacctgtgcctggcctacaagggccacatgaacaagatcctgaagatgattgtgtccttcaccatcggcttccagaacatggtgaagaacaccacctgtgactggagcctgaccaggaccagccctgagagctggcagtttgactgcacagacctgtgggagacctgtgtgcgctgctttggagacctgcagcccccaccagccaacagccctgtgctggtgcaccagatcaacctgctgcccctggcccaggagaccggcctcttctacgtggatgagatcatcatcgctgacaccaacgtgacagtgtcccaggccgacagcggcacagcccggcctgggggcaacctggtggagagcgtgtctgtggtgggcagcccccctgtgtacagcgtgacctcctggctggccggctgcggcacagagctgcccctcatcacagcccggtctgtgcccacagagggcacagaggagggcagcggcctggtgctggtgaccacccagaggcggcagaggaccagcccccccctgggcggccacttccgcatccagctgcccaacacagtcatcagtgatgtgcctgtgcagatcagcgcccaccacctgcaccagctgctgcagaacaatgctgatgacttcaccagccgctacctgaatgccagtgacttcaccgtgaaggaggacctgtacacctgctatgagcacgtgtggaccctgtcctggagcacccagatcggggacctgcccaacttcatccgggtgtctgatgagaacctgactggagtgaacccagctgctgccaccagggtggtgtatgatggcggcgtcttcctgggccccatctttggagacatgctggccacagccaaccagcacacccaggtggtggtgcgggtgaatgatgtgcctgcccactgccccggcagctgcagcttccagtacctgcagggcagcaccccctgtgtgcacagcgtgtggtacagcattgatggagacatcaacctgatgatctacatcactggaacaggcttcagcggggacagccagttcctgcaggtgacagtgaacaagaccagctgcaaggtgatcttcagcaaccagaccaacgtggtgtgccagacagacctgctgcctgtgggcatgcaccgcatcctgatgctggtgcggcccagcggcctggccatcagcgccactggagaagatctcttcctgaatgtgaagccccggctggacatggtggagcccagcagagctgctgacatcggcggcctgtgggccaccatccggggcagcagcctggagggcgtgtccctcatcctgtttggcagctacagctgtgccatcaacgtggccaccagcaacagcagccgcatccagtgcaaggtgcccccccggggcaaggatggccgcatcgtgaatgtgaccgtcatccggggggactacagcgctgtgctgccccgggccttcacctacgtgagcagcctgaaccctgtgattgtgaccctgagcaggaacatcagcaacattgctggaggagagaccctggtgattggagtggcccggctgatgaactacacagacctggatgtggaggtgcacgtgcaggatgccctggcccctgtgcacacccagagcgcctggggcctggaggtggccctgccccccctgcctgctggcctgcaccgcatctctgtgtccatcaatggagtgtccatccacagccagggcgtggacctgcacatccagtacctgacagaggtgttcagcattgagccctgctgcggcagcctgctgggcggcaccatcctgagcatctctggaattggcttcagccgggaccctgccctggtgtgggtgctggtgggcaacagaagctgtgacatcgtgaacctgacagaggccagcatctggtgtgagaccctgcctgccccccagatcccagatgctggggcccccaccgtgcctgctgctgtggaggtgtgggccggcaaccgcttctttgcccggggccccagccccagcctggtgggcaagggcttcaccttcatgtatgaagctgctgccacccctgtggtgacagccatgcagggcgagatcaccaacagcagcctgagcctgcacgtgggcggcagcaacctgagcaacagcgtcatcctgctgggcaacctgaactgtgatgtggagacccagagcttccagggcaatgtgtccctgagcggctgcagcatccccctgcacagcctggaggccggcatctaccccctgcaggtgcggcagaagcagatgggctttgccaacatgtctgtggtgctgcagcagtttgctgtgatgccccgcatcatggccatcttccccagccagggcagcgcctgtggcggcaccatcctgactgtgcggggcctgctgctgaacagcagaagaagatctgtgcgggtggacctgagcggccccttcacctgtgtgatcctgagcctgggggaccacaccatcctgtgccaggtgtccctggagggggaccccctgcccggggccagcttcagcctgaatgtgacagtgctggtgaatggcctgaccagcgagtgccagggcaactgcaccctcttcatccgggaggaggccagccctgtgatggatgccctgagcaccaacaccagcggcagcctgaccaccgtgctgatccggggccagaggctggccaccacagcagatgagcccatggtgtttgtggatgaccagctgccctgcaatgtgaccttcttcaatgccagccacgtggtgtgccagacccgggacctggcccctggcccccactacctgtctgtgttctacaccagaaatggctacgcctgcagcggaaatgtgagccgccacttctacatcatgccccaggtgttccactacttccccaagaacttcagcctgcacggcggcagcctgctgaccatcgagggcaccggcctgcggggccagaacaccacctctgtgtacatcgaccagcagacctgcctgactgtgaacatcggggctgagctgatccgctgcatcgtgcccactggaaatggatctgtggccctggagattgaggtggatggcctgtggtaccacatcggggtcatcggctacaacaaggccttcaccccagagctgatcagcatcagccagagtgatgacatcctgacctttgctgtggcccagatcagcggggccgccaacatcgacatcttcatcggcatgagcccctgtgtgggcgtgtctggcaaccacacagtgctgcagtgtgtggtgcccagcctgcctgctggggagtaccacgtgcggggctatgactgcatccggggctgggccagcagcgccctggtgttcaccagcagggtcatcatcacagctgtgacagaaaattttggctgcctgggcggccgcctggtgcacgtgtttggagctggcttcagccctggaaatgtgtctgctgctgtgtgtggggccccctgccgggtgctggccaatgccaccgtgtctgccttcagctgcctggtgctgcccctggatgtgtccctggccttcctgtgtggcctgaagcgggaggaggacagctgtgaggccgcccggcacacctacgtgcagtgtgacctgactgtggccatggccacagagcagctgctggagagctggccctacctgtacatctgtgaggagagcagccagtgcctgtttgtgcctgaccactgggccgagagcatgttccccagcttcagcggcctcttcatcagccccaagctggagagagatgaggtgctgatctacaacagcagctgcaacatcaccatggagacagaggccgagatggagtgtgagacccccaaccagcccatcaccgtgaagatcacagagatcaggaagcgctggggccagaacacccagggcaacttcagcctgcagttctgccgccgctggagcaggacccacagctggttccctgagcggctgccccaggatggagacaacgtgacagtggagaatggccagctgctgctgctggacaccaacaccagcatcctgaacctgctgcacatcaagggcggcaagctgatcttcatggcccctggccccatcgagctgcgggcccacgccatcctggtgtctgatggaggagagctgcgcatcggcagcgaggacaagcccttccagggccgggcccagatcaccctgtatggcagcagctacagcacccccttcttcccctatggagtgaagttcctggccgtgagaaatggcaccctgagcctgcacggcagcctgcctgaggtgattgtgacctgcctgcgggccacagcccacgccctggacacagtgctggccctggaggatgctgtggactggaaccctggagatgaggtggtgatcatcagcggcaccggggtgaagggggccaagcccatggaggagatcgtgacagtggagaccgtgcaggacacagacctgtacctgaagagccccctgcgctacagccacaacttcacagagaactgggtggccggggagcaccacatcctgaaggccaccgtggccctgctgagccgcagcatcaccatccagggcaacctgaccaatgaaagagagaagctgctggtgtcctgccaggaggccaatgcccctgagggcaacctgcagcactgcctgtacagcatgtctgagaagatgctgggcagccgggacatgggcgcccgggtcatcgtgcagagcttccctgaggagcccagccaggtgcagctgaagggcgtgcagttccaggtgctgggccaggccttccacaagcacctgagcagcctgaccctggtgggcgccatgagggagagcttcatccagggctgcaccgtgagaaattccttcagccggggcctgtccatgtgtggcaccctgggcctgaaggtggacagcaatgtgttctacaacatcctgggccacgccctgctggtgggcacctgcacagagatgagatacatctcctgggaggccatccacggcaggaaggatgactggagcggccacggcaacatcatccggaacaacgtcatcatccaggtgtctggagctgagggcctgagcaaccctgagatgctgacccccagcggcatctacatctgcagccccaccaacgtgattgagggcaacagagtgtgtggggccggctacggctacttcttccacctgatgaccaaccagaccagccaggcccccctgctgtccttcacccagaacatcgcccacagctgcaccaggtatggcctgtttgtgtaccccaagttccagcccccctgggacaacgtgacaggcaccaccctcttccagagcttcaccgtgtgggagagcgctggaggagcccagatcttccgcagcagcaacctgcggctgaagaacttcaaggtgtacagctgccgggactttggaattgatgtgctggagagtgatgccaacacctctgtgacagacagcctgctgctgggccactttgcccacaagggcagcctgtgcatgagcagcggcatcaagacccccaagcgctgggagctgatggtgagcaacaccacctttgtgaactttgacctgatcaactgtgtggccatccgcacctgcagcgactgcagccagggccagggcggcttcaccgtgaagaccagccagctgaagttcaccaacagcagcaacctggtggccttccccttcccccatgctgccatcctggaggacctggatggcagcctgagcggcaagaacagaagccacatcctggcctccatggagaccctgagcgccagctgcctggtgaacagcagctttggccgggtggtgcacggcagcgcctgtggcggcggcgtgctcttccacaggatgagcatcggcctggccaacaccccagaggtgtcctatgacctgaccatgacagacagcaggaacaagaccaccaccgtgaactacgtgcgggacaccctgagcaacccccggggctggatggccctgctgctggaccaggagacctacagcctgcagagcgagaacctgtggatcaacagaagcctgcagtacagcgccacctttgacaactttgcccctggcaactacctgctgctggtgcacacagacctgcccccctacccagacatcctgctgcgctgtggcagccgggtgggcctgtccttccccttcctgcccagccctggccagaaccagggctgtgactggttcttcaacagccagctgcggcagctgacctacctggtgtctggagagggccaggtgcaggtgatcctgcgggtgaaggagggcatgccacccaccatcagcgccagcaccagcgcccctgagagcgccctgaagtggagcctgcctgagacctggcagggcgtggaggagggctggggcggctacaacaacaccatccctggccctggagatgatgtgctgatcctgcccaacagaacagtgctggtggacacagacctgcccttcttcaagggcctgtatgtgatgggcaccctggacttccctgtggacaggagcaatgtgctgtctgtggcctgcatggtgattgctggaggagagctgaaggtgggcaccctggagaaccccctggagaaggagcagaagctgctgatcctgctgcgggccagcgagggcgtcttctgtgacaggatgaatggcatccacatcgaccccggcaccatcggcgtgtatggcaaggtgcacctgtacagcgcctaccccaagaacagctggacccacctgggcgctgacatcgccagcggaaatgaaagaatcatcgtggaggatgctgtggactggaggcctcatgacaagatcgtgctgagcagcagcagctatgagccccatgaggccgaggtgctgactgtgaaggaggtgaagggccaccacgtgcgcatctatgaaaggctgaagcaccgccacatcggctctgtgcacgtgacagaagatggccgccacatccggctggccgctgaggtgggcctgctgaccaggaacatccagatccagccagatgtgtcctgccggggccgcctgtttgtgggcagcttcaggaagagcagccgggaggagttctctggagtgctgcagctgctgaatgtggagatccagaactttggcagccccctgtacagctctgtggagttcagcaatgtgtctgctggctcctggatcatcagcagcaccctgcaccagagctgtggcggcggcatccacgccgccgccagccacggcgtgctgctgaatgacaacatcgtgtttggaacagctggccatggaattgacctggagggccaggcctacacagtgaccaacaacctggtggtgctgatgacccagcctgcctggagcaccatctgggtggccggcatcaaggtgaaccaggtgaaggacatcaacctgcacggcaatgtggtggccggcagcgagcggctgggcttccacatccggggccacaagtgcagcagctgtgagctgctgtggagcgacaacgtggcccacagcagcctgcacggcctgcacctgtacaaggagagcggcctggacaactgcacccgcatcagcggcttcctggccttcaagaactttgattatggagccatgctgcacgtggagaacagcgtggagattgagaacatcaccctggtggacaacaccatcggcctgctggccgtggtgtatgtgttttctgccccccagaacagcgtgaagaaggtgcagatcgtgctgagaaattctgtgattgtggccaccagcagcagctttgactgcatccaggacaaggtgaagccccacagcgccaacctgaccagcacagaccgggcccccagcaacccccggggcggcagaattggcatcctgtggcctgtgttcaccagcgagcccaaccagtggccccaggagccctggcacaaggtgagaaatgaccacagcatcagcggcatcatgaagctgcaggatgtgaccttcagcagctttgtgaagagctgctacagtgatgacctggatgtgtgcatcctgcccaatgcagaaaattctggcatcatgcaccccatcacagctgagaggaccaggatgctgaagatcaaggacaagaacaagttctacttccccagcctgcagcccaggaaggacctgggcaaggtggtgtgcccagagctggactgtgccagccccaggaagtacctgttcaaggacctggatggccgggccctgggcctgcccccacctgtgtctgtgttccccaagacagaggccgagtggacagccagcttcttcaatgccggcaccttccgggaggagcagaagtgcacctaccagttcctgatgcagggcttcatctgcaagcagacagaccaggtggtgctgatcctggacagcgcagatgccatctgggccatccagaagctgtaccctgtggtgtctgtgaccagcggctttgtggatgtgttcagctctgtgaatgccaacatcccctgcagcaccagcggctctgtgtccaccttctacagcatcctgcccatccggcagatcaccaaggtgtgcttcatggaccagaccccccaggtgctgcgcttcttcctgctgggcaacaagagcaccagcaagctgctgctggccgtgttctaccacgagctgcagagcccccacgtgttcctgggggagagcttcatcccccccaccctggtgcagagcgccagcctgctgctgaatgaaagcattggagccaactacttcaacatcatggacaacctgctgtatgtggtgctgcagggcgaggagcccatcgagatccgctctggagtgtccatccacctggccctgactgtgatggtgtctgtgctggagaagggctgggagatcgtcatcctggagcggctgaccaacttcctgcagatcggccagaaccagatccgcttcatccacgagatgcctggccacgaggagaccctgaaggccatcgctgacagccgggccaagaggaagaggaactgccccaccgtgacctgcaccagccactaccgccgggtgggccagaggcggcccctgatgatggagatgaacagccaccgggccagcccccccatgacagtggagaccatcagcaaggtgattgtcatcgagatcggggacagccccaccgtgcgcagcacaggcatgatcagcagcctgagcagcaacaagctgcagaacctggcccacagggtcatcacagcccagcagacaggagtgctggagaatgtgctgaacatgaccatcggggccctgctggtgacccagagcaaaggagtcatcggctacggcaacaccagcagcttcaagacaggcaacctgatctacatccggccctatgccctgagcatcctggtgcagcccagtgatggagaggtgggcaatgagctgcctgtgcagccccagctggtgttcctggatgagcagaacagaagagtggagagcctgggccccccatctgagccctggaccatcagcgccagcctggagggcgccagtgacagcgtgctgaagggctgcacccaggccgagacccaggacggctacgtgtccttctacaacctggccgtgctgatcagcggcagcaactggcacttcatcttcaccgtgaccagccccccaggagtgaacttcaccgcccggagcaagccctttgctgtgctgcctgtgaccaggaaggagaagagcaccatcatcctggccgccagcctgagctctgtggcctcctggctggccctgagctgcctggtgtgctgctggctgaagaggagcaagagcaggaagaccaagccagaggagatccctgagagccagaccaacaaccagaacatccacatccacatcagcagcaagagaagagagagccagggccccaagaaggaggacacagtggtgggggaggacatgaggatgaaggtgatgctgggcaaggtgaaccagtgcccccaccagctgatgaatggagtgtccaggaggaaggtgagccgccacatcgtgcgggaggaggaggccgctgtgcctgcccctggcaccaccggcatcaccagccacggccacatctgtgcccctggggccccagcccagcaggtgtacctgcaggagaccggcaactggaaggagggccaggagcagctgctgcgctaccagctggccggccagaaccagctgctgctgctgtgcccagacttccggcaggagcggcagcagctgcccggccagagccggctgagcaagcagagcggcagcctgggcctgagccaggagaagaaggccagctgtggggccacagaggccttctgcctgcacagcgtgcaccctgagaccatccaggagcagctgtag

SEQ ID NO: 164588 - DNA, 10191 bp, synthetic construct
  misc_feature 1..10191: note = Description of Artificial Sequence: Synthetic coding sequence
  source 1..10191: mol_type = other DNA
atgacagcctggctgatcagcctgatgagcattgaggtgctgctgctggccgtgcgccacctgagcctgcacatcgagcctgaggagggcagcctggccggcggcacctggatcaccgtcatctttgatggcctggagctgggcgtgctgtaccccaacaacggcagccagctggagatccacctggtgaatgtgaacatggtggtgcctgccctgcggtctgtgccctgtgatgtgtttcctgtgttcctggacctgcctgtggtgacctgcaggaccaggtctgtgctgtctgaggcccacgagggcctgtacttcctggaggcctactttggaggccagctggtgagcagccccaaccctggcccccgggacagctgcaccttcaagttcagcaaggcccagacccccatcgtgcaccaggtgtacccacccagcggcgtgcctgggaagctgatccacgtgtatggctggatcatcaccggccgcctggagacctttgattttgatgctgagtacatcgacagccctgtgatcctggaggcccagggcgacaagtgggtgaccccctgcagcctcatcaaccggcagatgggcagctgctaccccatccaggaggaccacggcctgggcaccctgcagtgccacgtggagggggactacatcggcagccagaatgtgtccttcagcgtcttcaacaagggcaagtccatggtgcacaagaaggcctggctgatcagcgccaagcaggacctcttcctgtaccagacccacagcgagatcctgtctgtgtttcctgagaccggcagcctgggcggccgcaccaacatcaccatcaccggggacttctttgacaacagcgcccaggtgaccatcgccggcatcccctgtgacatcagacatgtgagccccaggaagattgagtgcaccacccgggcccctgggaaggatgtgcggctgaccaccccccagcccggcaacagaggcctgctgtttgaggtgggagatgctgtggagggcctggagctgacagaggccaccccaggctaccgctggcagatcgtgcccaatgccagcagccccttcggcttctggagccaggagggccagcccttccgggcccggctgagcggcttctttgtggcccctgagaccaacaactacaccttctggatccaggccgacagccaggccagcctgcacttctcctggagcgaggagcccaggaccaaggtgaaggtggccagcatctctgtgggcacagctgactggtttgacagctgggagcagaacagagatgagggcacctggcagcagaagacccccaagctggagctgctgggcggggccatgtactacctggaggccgagcaccacggcatcgcccccagccggggcatgagaattggagtgcagatccacaacacctggctgaacccagatgtggtgaccacctacctgcgggagaagcaccagatccgggtgcgggcccagaggctgcctgaggtgcaggtgctgaatgtgtctggccggggcaacttcttcctgacctgggacaacgtgagcagccagcccatcccagccaatgccacagcccacctgatccagaccaccatcgaggagctgctggccgtgaagtgcaagctggagcccctgtggagcaacatcctgctgcggctgggctttgagcggggccctgaggtgagcaacagtgatggagacctgaccagcggcacagagcccttctgtggccgcttcagcctgcggcagcccaggcacctggtgctgaccccacctgctgcccagaagggctaccgcctggaccagtacacccacctgtgcctggcctacaagggccacatgaacaagatcctgaagatgattgtgtccttcaccatcggcttccagaacatggtgaagaacaccacctgtgactggagcctgaccaggaccagccctgagagctggcagtttgactgcacagacctgtgggagacctgtgtgcgctgctttggagacctgcagcccccaccagccaacagccctgtgctggtgcaccagatcaacctgctgcccctggcccaggagaccggcctcttctacgtggatgagatcatcatcgctgacaccaacgtgacagtgtcccaggccgacagcggcacagcccggcctgggggcaacctggtggagagcgtgtctgtggtgggcagcccccctgtgtacagcgtgacctcctggctggccggctgcggcacagagctgcccctcatcacagcccggtctgtgcccacagagggcacagaggagggcagcggcctggtgctggtgaccacccagaggcggcagaggaccagcccccccctgggcggccacttccgcatccagctgcccaacacagtcatcagtgatgtgcctgtgcagatcagcgcccaccacctgcaccagctgctgcagaacaatgctgatgacttcaccagccgctacctgaatgccagtgacttcaccgtgaaggaggacctgtacacctgctatgagcacgtgtggaccctgtcctggagcacccagatcggggacctgcccaacttcatccgggtgtctgatgagaacctgactggagtgaacccagctgctgccaccagggtggtgtatgatggcggcgtcttcctgggccccatctttggagacatgctggccacagccaaccagcacacccaggtggtggtgcgggtgaatgatgtgcctgcccactgccccggcagctgcagcttccagtacctgcagggcagcaccccctgtgtgcacagcgtgtggtacagcattgatggagacatcaacctgatgatctacatcactggaacaggcttcagcggggacagccagttcctgcaggtgacagtgaacaagaccagctgcaaggtgatcttcagcaaccagaccaacgtggtgtgccagacagacctgctgcctgtgggcatgcaccgcatcctgatgctggtgcggcccagcggcctggccatcagcgccactggagaagatctcttcctgaatgtgaagccccggctggacatggtggagcccagcagagctgctgacatcggcggcctgtgggccaccatccggggcagcagcctggagggcgtgtccctcatcctgtttggcagctacagctgtgccatcaacgtggccaccagcaacagcagccgcatccagtgcaaggtgcccccccggggcaaggatggccgcatcgtgaatgtgaccgtcatccggggggactacagcgctgtgctgccccgggccttcacctacgtgagcagcctgaaccctgtgattgtgaccctgagcaggaacatcagcaacattgctggaggagagaccctggtgattggagtggcccggctgatgaactacacagacctggatgtggaggtgcacgtgcaggatgccctggcccctgtgcacacccagagcgcctggggcctggaggtggccctgccccccctgcctgctggcctgcaccgcatctctgtgtccatcaatggagtgtccatccacagccagggcgtggacctgcacatccagtacctgacagaggtgttcagcattgagccctgctgcggcagcctgctgggcggcaccatcctgagcatctctggaattggcttcagccgggaccctgccctggtgtgggtgctggtgggcaacagaagctgtgacatcgtgaacctgacagaggccagcatctggtgtgagaccctgcctgccccccagatcccagatgctggggcccccaccgtgcctgctgctgtggaggtgtgggccggcaaccgcttctttgcccggggccccagccccagcctggtgggcaagggcttcaccttcatgtatgaagctgctgccacccctgtggtgacagccatgcagggcgagatcaccaacagcagcctgagcctgcacgtgggcggcagcaacctgagcaacagcgtcatcctgctgggcaacctgaactgtgatgtggagacccagagcttccagggcaatgtgtccctgagcggctgcagcatccccctgcacagcctggaggccggcatctaccccctgcaggtgcggcagaagcagatgggctttgccaacatgtctgtggtgctgcagcagtttgctgtgatgccccgcatcatggccatcttccccagccagggcagcgcctgtggcggcaccatcctgactgtgcggggcctgctgctgaacagcagaagaagatctgtgcgggtggacctgagcggccccttcacctgtgtgatcctgagcctgggggaccacaccatcctgtgccaggtgtccctggagggggaccccctgcccggggccagcttcagcctgaatgtgacagtgctggtgaatggcctgaccagcgagtgccagggcaactgcaccctcttcatccgggaggaggccagccctgtgatggatgccctgagcaccaacaccagcggcagcctgaccaccgtgctgatccggggccagaggctggccaccacagcagatgagcccatggtgtttgtggatgaccagctgccctgcaatgtgaccttcttcaatgccagccacgtggtgtgccagacccgggacctggcccctggcccccactacctgtctgtgttctacaccagaaatggctacgcctgcagcggaaatgtgagccgccacttctacatcatgccccaggtgttccactacttccccaagaacttcagcctgcacggcggcagcctgctgaccatcgagggcaccggcctgcggggccagaacaccacctctgtgtacatcgaccagcagacctgcctgactgtgaacatcggggctgagctgatccgctgcatcgtgcccactggaaatggatctgtggccctggagattgaggtggatggcctgtggtaccacatcggggtcatcggctacaacaaggccttcaccccagagctgatcagcatcagccagagtgatgacatcctgacctttgctgtggcccagatcagcggggccgccaacatcgacatcttcatcggcatgagcccctgtgtgggcgtgtctggcaaccacacagtgctgcagtgtgtggtgcccagcctgcctgctggggagtaccacgtgcggggctatgactgcatccggggctgggccagcagcgccctggtgttcaccagcagggtcatcatcacagctgtgacagaaaattttggctgcctgggcggccgcctggtgcacgtgtttggagctggcttcagccctggaaatgtgtctgctgctgtgtgtggggccccctgccgggtgctggccaatgccaccgtgtctgccttcagctgcctggtgctgcccctggatgtgtccctggccttcctgtgtggcctgaagcgggaggaggacagctgtgaggccgcccggcacacctacgtgcagtgtgacctgactgtggccatggccacagagcagctgctggagagctggccctacctgtacatctgtgaggagagcagccagtgcctgtttgtgcctgaccactgggccgagagcatgttccccagcttcagcggcctcttcatcagccccaagctggagagagatgaggtgctgatctacaacagcagctgcaacatcaccatggagacagaggccgagatggagtgtgagacccccaaccagcccatcaccgtgaagatcacagagatcaggaagcgctggggccagaacacccagggcaacttcagcctgcagttctgccgccgctggagcaggacccacagctggttccctgagcggctgccccaggatggagacaacgtgacagtggagaatggccagctgctgctgctggacaccaacaccagcatcctgaacctgctgcacatcaagggcggcaagctgatcttcatggcccctggccccatcgagctgcgggcccacgccatcctggtgtctgatggaggagagctgcgcatcggcagcgaggacaagcccttccagggccgggcccagatcaccctgtatggcagcagctacagcacccccttcttcccctatggagtgaagttcctggccgtgagaaatggcaccctgagcctgcacggcagcctgcctgaggtgattgtgacctgcctgcgggccacagcccacgccctggacacagtgctggccctggaggatgctgtggactggaaccctggagatgaggtggtgatcatcagcggcaccggggtgaagggggccaagcccatggaggagatcgtgacagtggagaccgtgcaggacacagacctgtacctgaagagccccctgcgctacagccacaacttcacagagaactgggtggccggggagcaccacatcctgaaggccaccgtggccctgctgagccgcagcatcaccatccagggcaacctgaccaatgaaagagagaagctgctggtgtcctgccaggaggccaatgcccctgagggcaacctgcagcactgcctgtacagcatgtctgagaagatgctgggcagccgggacatgggcgcccgggtcatcgtgcagagcttccctgaggagcccagccaggtgcagctgaagggcgtgcagttccaggtgctgggccaggccttccacaagcacctgagcagcctgaccctggtgggcgccatgagggagagcttcatccagggctgcaccgtgagaaattccttcagccggggcctgtccatgtgtggcaccctgggcctgaaggtggacagcaatgtgttctacaacatcctgggccacgccctgctggtgggcacctgcacagagatgagatacatctcctgggaggccatccacggcaggaaggatgactggagcggccacggcaacatcatccggaacaacgtcatcatccaggtgtctggagctgagggcctgagcaaccctgagatgctgacccccagcggcatctacatctgcagccccaccaacgtgattgagggcaacagagtgtgtggggccggctacggctacttcttccacctgatgaccaaccagaccagccaggcccccctgctgtccttcacccagaacatcgcccacagctgcaccaggtatggcctgtttgtgtaccccaagttccagcccccctgggacaacgtgacaggcaccaccctcttccagagcttcaccgtgtgggagagcgctggaggagcccagatcttccgcagcagcaacctgcggctgaagaacttcaaggtgtacagctgccgggactttggaattgatgtgctggagagtgatgccaacacctctgtgacagacagcctgctgctgggccactttgcccacaagggcagcctgtgcatgagcagcggcatcaagacccccaagcgctgggagctgatggtgagcaacaccacctttgtgaactttgacctgatcaactgtgtggccatccgcacctgcagcgactgcagccagggccagggcggcttcaccgtgaagaccagccagctgaagttcaccaacagcagcaacctggtggccttccccttcccccatgctgccatcctggaggacctggatggcagcctgagcggcaagaacagaagccacatcctggcctccatggagaccctgagcgccagctgcctggtgaacagcagctttggccgggtggtgcacggcagcgcctgtggcggcggcgtgctcttccacaggatgagcatcggcctggccaacaccccagaggtgtcctatgacctgaccatgacagacagcaggaacaagaccaccaccgtgaactacgtgcgggacaccctgagcaacccccggggctggatggccctgctgctggaccaggagacctacagcctgcagagcgagaacctgtggatcaacagaagcctgcagtacagcgccacctttgacaactttgcccctggcaactacctgctgctggtgcacacagacctgcccccctacccagacatcctgctgcgctgtggcagccgggtgggcctgtccttccccttcctgcccagccctggccagaaccagggctgtgactggttcttcaacagccagctgcggcagctgacctacctggtgtctggagagggccaggtgcaggtgatcctgcgggtgaaggagggcatgccacccaccatcagcgccagcaccagcgcccctgagagcgccctgaagtggagcctgcctgagacctggcagggcgtggaggagggctggggcggctacaacaacaccatccctggccctggagatgatgtgctgatcctgcccaacagaacagtgctggtggacacagacctgcccttcttcaagggcctgtatgtgatgggcaccctggacttccctgtggacaggagcaatgtgctgtctgtggcctgcatggtgattgctggaggagagctgaaggtgggcaccctggagaaccccctggagaaggagcagaagctgctgatcctgctgcgggccagcgagggcgtcttctgtgacaggatgaatggcatccacatcgaccccggcaccatcggcgtgtatggcaaggtgcacctgtacagcgcctaccccaagaacagctggacccacctgggcgctgacatcgccagcggaaatgaaagaatcatcgtggaggatgctgtggactggaggcctcatgacaagatcgtgctgagcagcagcagctatgagccccatgaggccgaggtgctgactgtgaaggaggtgaagggccaccacgtgcgcatctatgaaaggctgaagcaccgccacatcggctctgtgcacgtgacagaagatggccgccacatccggctggccgctgaggtgggcctgctgaccaggaacatccagatccagccagatgtgtcctgccggggccgcctgtttgtgggcagcttcaggaagagcagccgggaggagttctctggagtgctgcagctgctgaatgtggagatccagaactttggcagccccctgtacagctctgtggagttcagcaatgtgtctgctggctcctggatcatcagcagcaccctgcaccagagctgtggcggcggcatccacgccgccgccagccacggcgtgctgctgaatgacaacatcgtgtttggaacagctggccatggaattgacctggagggccaggcctacacagtgaccaacaacctggtggtgctgatgacccagcctgcctggagcaccatctgggtggccggcatcaaggtgaaccaggtgaaggacatcaacctgcacggcaatgtggtggccggcagcgagcggctgggcttccacatccggggccacaagtgcagcagctgtgagctgctgtggagcgacaacgtggcccacagcagcctgcacggcctgcacctgtacaaggagagcggcctggacaactgcacccgcatcagcggcttcctggccttcaagaactttgattatggagccatgctgcacgtggagaacagcgtggagattgagaacatcaccctggtggacaacaccatcggcctgctggccgtggtgtatgtgttttctgccccccagaacagcgtgaagaaggtgcagatcgtgctgagaaattctgtgattgtggccaccagcagcagctttgactgcatccaggacaaggtgaagccccacagcgccaacctgaccagcacagaccgggcccccagcaacccccggggcggcagaattggcatcctgtggcctgtgttcaccagcgagcccaaccagtggccccaggagccctggcacaaggtgagaaatgaccacagcatcagcggcatcatgaagctgcaggatgtgaccttcagcagctttgtgaagagctgctacagtgatgacctggatgtgtgcatcctgcccaatgcagaaaattctggcatcatgcaccccatcacagctgagaggaccaggatgctgaagatcaaggacaagaacaagttctacttccccagcctgcagcccaggaaggacctgggcaaggtggtgtgcccagagctggactgtgccagccccaggaagtacctgttcaaggacctggatggccgggccctgggcctgcccccacctgtgtctgtgttccccaagacagaggccgagtggacagccagcttcttcaatgccggcaccaaggagcagagcattgagatcaacgtgtag

SEQ ID NO: 164589 - DNA, 12732 bp, synthetic construct
  misc_feature 1..12732: note = Description of Artificial Sequence: Synthetic coding sequence
  source 1..12732: mol_type = other DNA
atgggccacctgtggctgctgggcatctggggcctgtgtggcctgctgctgtgtgccgctgaccccagcacagatggcagccagatcatccccaaggtgacagagatcatccccaagtatggcagcatcaacggggccacccggctgaccatccggggggagggcttcagccaggccaaccagttcaactacggcgtggacaatgctgagctgggcaacagcgtgcagctgatcagcagcttccagagcatcacctgtgatgtggagaaggatgccagccacagcacccagatcacctgctacacccgggccatgccagaagattcctacacagtgcgggtgtctgtggatggagtgcctgtgacagagaacaacacctgcaagggccacatcaacagctgggagtgcaccttcaatgccaagagcttccgcacccccaccatccgcagcatcacccccctgagcggcaccccaggcaccctcatcaccatccagggccgcatcttcacagatgtgtatggcagcaacatcgccctgagcagcaatggcaagaatgtgcgcatcctgcgggtgtacatcggcggcatgccctgtgagctgctgatcccccagagcgacaacctgtatggcctgaagctggaccaccccaatggagacatgggctccatggtgtgcaagaccaccggcaccttcatcggccaccacaacgtgtccttcatcctggacaatgactatggccgctccttcccccagaagatggcctactttgtgagcagcctgaacaagatcgccatgttccagacctacgccgaggtgaccatgatcttccccagccagggcagcatccggggcggcaccaccctgaccatcagcggccgcttctttgaccagacagacttccctgtgcgggtgctggtgggcggggagccctgtgacatcctgaatgtgacagagaacagcatctgctgcaagaccccacccaagccccacatcctgaagacagtgtacccaggcggccggggcctgaagctggaggtgtggaacaacagccggcccatccggctggaggagatcctggagtacaatgagaagaccccaggctacatgggcgcctcctgggtggacagcgccagctacatctggctgatggagcaggacacctttgtggcccgcttcagcggcttcctggtggccccagacagtgatgtgtaccgcttctacatcaagggagatgacagatatgccatctacttcagccagacaggcctgcctgaggacaaggtgcgcatcgcctaccacagcgccaatgccaacagctacttcagcagccccacccagaggagtgatgacatccacctgcagaagggcaaggagtactacatcgagatcctgctgcaggagtaccgcctgagcgcctttgtggatgtgggcctgtaccagtacagaaatgtgtacacagagcagcagacaggagatgctgtgaatgaggagcaggtgatcaagagccagagcaccatcctgcaggaggtgcaggtgatcaccctggagaactgggagaccaccaatgccatcaatgaggtgcagaagatcaaggtgaccagcccctgtgtggaggccaacagctgcagcctgtaccagtaccgcctcatctacaacatggagaagacagtgttcctgcctgcagatgccagcgagttcatcctgcagagcgccctgaatgacctgtggagcatcaagccagacacagtgcaggtgatccgcacccagaacccccagagctatgtgtacatggtgaccttcatcagcaccaggggggactttgacctgctgggctatgaggtggtggagggcaacaacgtgaccctggacatcacagagcagaccaagggcaagcccaacctggagaccttcaccctgaactgggatggcatcgccagcaagcccctgaccctgtggagcagcgaggccgagttccagggcgctgtggaggagatggtgtccaccaagtgccccccccagatcgccaactttgaggagggctttgtggtgaagtacttccgggactatgaaacagacttcaacctggagcacatcaacagaggccagaagacagctgagacagatgcctactgcggccgctacagcctgaagaacccagctgtgctgtttgattctgcagatgtgaagcccaacagaagaccctatggagacatcctgctcttcccctacaaccagctgtgcctggcctacaagggcttcctggccaactacatcggcctgaagttccagtaccaggacaacagcaagatcaccaggagcacagacacccagttcacctacaactttgcctacggcaacaactggacctacacctgcatcgacctgctggacctggtgaggaccaagtacacaggcaccaacgtgtccctgcagaggatcagcctgcacaaggccagcgagagccagagcttctacgtggatgtggtgtacatcggccacaccagcaccatcagcaccctggatgagatgcccaagaggcggctgcctgccctggccaacaagggcatcttcctggagcacttccaggtgaaccagaccaagaccaacggccccaccatgaccaaccagtacagcgtgaccatgaccagctacaactgcagctacaacatccccatgatggctgtgtcctttggccagatcatcacccatgaaacagaaaatgaatttgtgtaccggggcaacaactggccaggagagagcaagatccacatccagaggatccaggccgccagcccccccctgagcggcagctttgacatccaggcctacggccacatcctgaagggcctgcctgctgctgtgtctgctgctgacctgcagtttgccctgcagagcctggagggcatgggccgcatctctgtgacccgggagggcacctgtgccggctacgcctggaacatcaagtggaggagcacctgtgggaagcagaacctgctgcagatcaatgacagcaacatcattggagagaaggccaacatgacagtgacccgcatcaaggagggcggcctcttccggcagcacgtgctgggggacctgctgcggacccccagccagcagccccaggtggaggtgtatgtgaatggcatcccagccaagtgcagcggggactgtggcttcacctgggacagcaacatcacccccctggtgctggccatcagccccagccagggcagctatgaggagggcaccatcctgaccatcgtgggcagcggcttcagccccagcagcgctgtgacagtgtctgtgggccctgtgggctgcagcctgctgtctgtggatgagaaggagctgaagtgccagatcctgaatggatctgctggccacgcccctgtggccgtgtccatggctgatgtgggcctggcccagaatgtgggcggggaggagttctactttgtgtaccagagccagatcagccacatctggccagacagcggcagcattgctgggggcaccctgctgaccctgagcggcttcggcttcaatgaaaacagcaaggtgctggtgggcaatgagacctgcaacgtcatcgagggggacctgaaccgcatcacctgcaggacccccaagaagacagagggcaccgtggacatctctgtgaccaccaacggcttccaggccacagccagagatgccttctcctacaactgcctgcagacccccatcatcacagacttcagccccaaggtgaggaccatcctgggggaggtgaacctgaccatcaagggctacaactttggaaatgagctgacccagaacatggctgtgtatgtgggcggcaagacctgccagatcctgcactggaacttcacagacatccgctgcctgctgcccaagctgagccctgggaagcatgacatctacgtggaggtgaggaactggggctttgccagcacccgggacaagctgaacagcagcatccagtatgtgctggaggtgacctccatgttcccccagaggggcagcctgtttggaggaacagagatcaccatccggggcttcggcttcagcaccatcccagcagaaaatacagtgctgctgggcagcatcccctgcaatgtgaccagcagcagtgaaaatgtcatcaagtgcatcctgcacagcacaggcaacatcttccgcatcaccaacaacgggaaggacagcgtgcacggcctgggctacgcctggagcccccctgtgctgaatgtgtctgtgggggacacagtggcctggcactggcagacccaccccttcctgcggggcatcggctaccgcatcttctctgtgagcagccctggcagcgtcatctatgatggcaagggcttcaccagcggccggcagaagagcaccagcggcagcttctcctaccagttcaccagccctggcatccactactacagcagcggctacgtggatgaggcccacagcatcttcctgcagggcgtcatcaacgtgctgcctgctgagaccaggcacatccccctgcacctgtttgtgggccgctctgaggccacctacgcctatggaggccctgagaacctgcacctgggcagctctgtggccggctgcctggccacagagcccctgtgcagcctgaacaacaccagggtgaagaacagcaagaggctgctgtttgaggtgagcagctgcttcagccccagcatcagcaacatcacccccagcactggaacagtgaatgaactcatcaccatcattggacatggcttcagcaacctgccctgggccaacaaggtgaccatcggcagctacccctgtgtggtggaggagagcagcgaggacagcatcacctgccacatcgacccccagaacagcatggatgtgggcatccgggagaccgtgaccctgactgtgtacaacctgggcacagccatcaacaccctgagcaatgaatttgacagaagatttgtgctgctgcccaacatcgacctggtgctgcccaatgccggcagcaccaccggcatgacctctgtgaccatcaagggcagcggctttgctgtgagcagcgctggggtgaaggtgctgatgggccacttcccctgcaaggtgctgtctgtgaactacacagccattgaatgtgagaccagccctgctgcccagcagctggtggatgtggacctgctgattcatggagtgcctgcccagtgccagggcaactgcaccttctcctacctggagagcatcaccccctacatcaccggggtcttccccaacagcgtcatcggctctgtgaaggtgctgattgaaggagagggcctgggcaccgtgctggaggacattgctgtgttcatcggcaaccagcagttccgggccatcgaggtgaatgaaaacaacatcacagccctggtgacccccctgcctgtgggccaccacagcgtgtctgtggtggtgggcagcaagggcctggccctgggcaacctgactgtgagcagcccccctgtggccagcctgagccccaccagcggcagcattggaggcggcaccaccctggtgatcactggaaatggcttctacccaggcaacaccaccgtgaccatcggagatgagccctgccagatcatcagcatcaaccccaatgaggtgtactgcaggaccccagctggcaccaccggcatggtggatgtgaagatctttgtgaacaccatcgcctacccacccctgctcttcacctacgccctggaggacacccccttcctgcggggcatcatccccagccggggccccccaggcacagaaattgagatcaccggcagcaactttggatttgagatcctggagatctctgtgatgatcaacaacatccagtgcaatgtgaccatggccaatgattctgtggtgcagtgcatcgtgggggaccatgctgggggcaccttccctgtgatgatgcaccacaagaccaagggcagcgccatgagcacagtggtgtttgagtaccccctgaacatccagaacatcaaccccagccagggcagctttggaggcggccagaccatgacagtgacaggcaccggcttcaacccccagaacagcatcatcctggtgtgtggctctgaatgtgccatcgaccggctgcggagtgactacaccaccctgctgtgtgagatccccagcaacaacggcaccggggctgagcaggcctgtgaggtgtctgtggtgaatggcaaggacctgagccagagcatgacccccttcacctatgctgtgtccctgacccccctcatcacagctgtgagccccaagaggggcagcacagctgggggcacccggctgactgtggtgggcagcggcttcagcgagaacatggaggatgtgcacatcaccatcgccgaggccaagtgtgatgtggagtacagcaacaagacccacatcatctgcatgacagatgcccacaccctgagcggctgggcccctgtgtgtgtgcacatccggggcgtgggcatggccaagctggacaatgctgacttcctgtatgtggatgcctggagcagcaacttctcctggggcggcaagagccccccagaggagggcagcctggtggtgatcaccaagggccagaccatcctgctggaccagagcacccccatcctgaagatgctgctgatccagggcggcaccctcatctttgatgaggccgacatcgagctgcaggccgagaacatcctgatcacagatggaggagtgctgcagattggaacagagaccagccccttccagcacaaggccgtcatcaccctgcacggccacctgcggagccctgagctgcctgtgtatggagccaagaccctggccgtgcgggagggcatcctggacctgcatggagtgcctgtgcctgtgacctggacccggctggcccacacagccaaggccggggagcgcatcctgatcctgcaggaggccgtgacctggaagccaggggacaacatcgtgattgccagcacaggccaccgccacagccagggagaaaatgagaagatgaccatcgcctctgtgtctgcagatggcatcaacatcaccctgagcaaccccctgaactacacccacctgggcatcaccgtgaccctgcctgatggcaccctgtttgaggcccgggcagaggtgggcatcctgaccaggaacatcctgatccggggcagtgacaacgtggagtggaacaacaagatcccagcctgcccagatggctttgacacaggagaatttgccacccagacctgcctgcagggcaagtttggagaggagatcggcagtgaccagtttggaggctgtgtgatgttccacgcccctgtgcctggggccaacatggtgactggaagaattgaatatgtggaggtgttccacgccggccaggccttccggctgggccgctaccccatccactggcacctgctgggggacctgcagttcaagagctatgtgcggggctgtgccatccaccaggcctacaacagagctgtgaccatccacaacacccaccacctgctggtggagaggaacatcatctatgacatcaagggcggggccttcttcattgaagatggcatcgagcacggcaacatcctgcagtacaacctggccgtgtttgtgcagcagagcaccagcctgctgaatgatgatgtgaccccagctgccttctgggtgaccaaccccaacaacaccatccgccacaatgctgtggccggcggcacccacttcggcttctggtacaggatgaacaaccacccagatggccccagctatgacaggaacatctgccagaagagggtgcccctgggggagttcttcaacaacacagtgcacagccagggctggtttggcatgtggatctttgaggagtacttccccatgcagacaggcagctgcaccagcacagtgcctgccccagccatcttcaacagcctgaccacctggaactgccagaagggagctgagtgggtgaatggaggagccctgcagttccacaactttgtgatggtgaacaactatgaagctggcatcgagaccaagaggatcctggccccctacgtgggcggctggggcgagaccaacggggccgtcatcaagaatgccaagatcgtgggccacctggatgagctgggcatgggcagcgccttctgcacagccaagggcctggtgctgcccttcagcgagggcctgactgtgtcctctgtgcacttcatgaactttgaccggcccaactgtgtggccctgggcgtgaccagcatcagcggcgtgtgcaatgacagatgtggcggctggagcgccaagtttgtggatgtgcagtacagccacacccccaacaaggccggcttccgctgggagcacgagatggtgatgattgatgtggatggcagcctgaccggccacaagggccacacagtcatcccccacagcagcctgctggaccccagccactgcacccaggaggccgagtggagcatcggcttccctggctctgtgtgtgatgcctctgtgtccttccaccggctggccttcaaccagcccagccctgtgtccctgctggagaaggatgtggtgctgagtgacagctttggcaccagcatcatccccttccagaagaagaggctgacccacatgagcggctggatggccctgatccccaatgccaaccacatcaactggtacttcaagggcgtggaccacatcaccaacatctcctacaccagcaccttctacggcttcaaggaggaggactatgtgatcatcagccacaacttcacccagaacccagacatgttcaacatcatcgacatgagaaatggcagcagcaaccccctgaactggaacaccagcaagaatggagactggcacctggaggccaacaccagcaccctgtactacctggtgtctggaagaaatgacctgcaccagagccagctgatcagcggcaacctggaccctgatgtgaaggatgtggtgatcaacttccaggcctactgctgcatcctgcaggactgcttccctgtgcacccccccagcaggaagcccatccccaagaagaggcctgccacctacaacctgtggagcaatgacagcttctggcagagcagccgggagaacaactacacagtgccccaccctggggccaacgtcatcatccctgagggcacctggatcgtggccgacatcgacatgcccagcatggagcggctcatcatctggggcgtgctggagctggaggacaagtacaacgtgggcgctgctgagagcagctaccgggaggtggtgctgaatgccacctacatcagcctgcagggcggccgcctcatcggcggctgggaggacaaccccttcaagggggacctgaagatcgtgctgcggggcaaccacaccacccaggactgggccctgcctgagggccccaaccagggcgccaaggtgctgggcgtgtttggagagctggacctgcacggcatcccccacagcatctacaagaccaagctgtctgaaacagcctttgctggcagcaaggtgctgagcctgatggatgctgtggactggcaggagggggaggagatcgtcatcaccaccaccagctatgacttccaccagacagagaccaggagcatcgtgaagatcctgcatgaccacaagatcctgatcctgaatgacagcctgagctacacccactttgctgagaagtaccacgtgcccggcaccggggagagctacaccctggccgcagatgtgggcatcctgagcaggaacatcaagatcgtgggggaggactacccaggctggagcgaagattcttttggagcccgggtgctggtgggcagcttcacagagaacatgatgaccttcaagggaaatgcccgcatcagcaatgtggagttctaccacagcggccaggagggcttccgggacagcacagaccccaggtatgctgtgaccttcctgaacctgggccagatccaggagcacggcagcagctacatccggggctgtgccttccaccacggcttcagccctgccatcggcgtgtttggaacagatggcctggacattgatgacaacatcatccacttcaccgtgggggagggcatccgcatctggggcaatgccaacagagtgcggggcaacctgattgccctgtctgtgtggccaggcacctaccagaacaggaaggacctgagcagcaccctgtggcatgctgccatcgagatcaacagaggcaccaacacagtgctgcagaacaacgtggtggccggcttcggccgggccggctacagaattgatggagagccctgccccggccagttcaaccctgtggagaagtggtttgacaatgaggcccatggaggcctgtatggcatctacatgaaccaggacggcctgcccggctgcagcctcatccagggcttcaccatctggacctgctgggactatggcatctacttccagaccacagagagcgtgcacatctacaacgtgaccctggtggacaatggcatggccatcttccccatgatctacatgcctgctgccatcagccacaagatcagcagcaagaatgtgcagatcaagagcagcctgattgtgggcagcagccctggcttcaactgcagtgatgtgctgaccaatgatgaccccaacatcgagctgacagctgcccacaggagccccaggagccccagcggcggccgcagcggcatctgctggcccacctttgccagcgcccacaacatggcccccaggaagccccacgccggcatcatgagctacaatgccatcagcggcctgctggacatcagcggcagcacctttgtgggcttcaagaatgtgtgcagcggggagaccaacgtcatcttcatcaccaaccccctgaatgaagacctgcagcaccccatccacgtgaagaacatcaagctggtggacaccacagagcagagcaagatcttcatccacaggccagacatcagcaaggtgaaccccagcgactgtgtggacatggtgtgtgatgccaagaggaagagcttcctgcgggacattgatggcagcttcctgggcaatgccggcagcgtcatcccccaggccgagtatgagtgggatggcaacagccaggtgggcattggagactaccgcatccccaaggccatgctgaccttcctgaatggcagccgcatccctgtgacagagaaggccccccacaagggcatcatccgggacagcacctgcaagtacctgcctgagtggcagagctaccagtgcttcggcatggagtatgccatgatggtgattgagagcctggaccctgacacagagacccggcggctgagccctgtggccatcatgggaaatggctacgtggacctgatcaatggcccccaggaccacggctggtgtgccggctacacctgccagaggcggctgagcctcttccacagcatcgtggccctgaacaagagctatgaggtgtacttcaccggcaccagcccccagaacctgcggctgatgctgctgaatgtggaccacaacaaggctgtgctggtgggcatcttcttcagcaccctgcagaggctggatgtgtatgtgaacaacctgctggtgtgccccaagaccaccatctggaatgcccagcagaagcactgtgagctgaacaaccacctgtacaaggaccagttcctgcccaacctggacagcacagtgctgggggagaactactttgatggcacctaccagatgctgtacctgctggtgaagggcaccatccctgtggagatccacacagccaccgtcatctttgtgtccttccagctgtctgtggccacagaagatgacttctacaccagccacaacctggtgaagaacctggccctcttcctgaagatccccagcgacaagatccgcatcagcaagatccggggcaagagcctgcggaggaagaggtccatgggcttcatcattgaaattgaaattggagacccccccatccagttcatcagcaatggcaccaccggccagatgcagctgtctgagctgcaggagattgctggcagcctgggccaggccgtcatcctgggcaacatcagcagcatcctgggcttcaacatcagctccatgagcatcaccaaccccctgcccagccccagcgacagcggctggatcaaggtgacagcccagcctgtggagaggtctgccttccctgtgcaccacgtggcctttgtgagcagcctgctggtgatcacccagcctgtggccgcccagcccggccagcccttcccccagcagcccagcgtgaaggccacagacagtgatggcaactgtgtgtctgtgggcatcacagccctgaccctgcgggccatcctgaaggacagcaacaacaaccaggtgaatggcctgagcggcaacaccaccatccccttcagcagctgctgggccaactacacagacctgacccccctgaggacaggcaagaactacaagattgagttcatcctggacaacgtggtgggcgtggagagcaggaccttcagcctgctggccgagagcgtgagcagcagcggcagcagcagcagcagcaacagcaaggccagcacagtgggcacctacgcccagatcatgacagtggtgatcagctgcctggtgggccgcatgtggctgctggagatcttcatggctgctgtgtccaccctgaacatcaccctgcggagctactag

SEQ ID NO: 164590 - DNA, 6762 bp, synthetic construct
  misc_feature 1..6762: note = Description of Artificial Sequence: Synthetic coding sequence
  source 1..6762: mol_type = other DNA
atgaggcctggccctgccctgctgctgctgggcgtgggcctgagcctgtctgtgggccgcctgcccctgccccctgtgcccaggggggcccaggccgctgtgtctggggcccctgggggcctgctgcggggggcccctggcctgggcgtgcggggcggccgggccctgctgagcctgcggcccagcgctgtgcgggccggcggcgctgtgctgagcggccggggcagcctgtgcttcccccatggaggcaccggccgccgctggtactgcctggacctgcgggtgctgctgagcgcccagaggctgccctggccagctgccccagccctggccctggtggacctgcagctgagcgcccggggcggccgcctgagcctgacctggagcgtgcggctgcccaggagccctggccgcctggcctgggccttccggctgcggctgctgggccctggggccgcccggcctgccagccctgctgcccgggtgagccccaggtctgctgcccctggcccccggccccagcagggctttgtggccaggacagagtgccccacagatggccctgcccgggtgatgctgcaggccgtgaacagcagcagccacagagctgtggagagctctgtgtcctgccagatcaatgcctgtgtgatccagagggtgcgcatcaacacagaccagaagggggcccctgtgcggctgtccatgcaggccgaggccaccatcaatgcctctgtgcagctggactgcccagctgcccgggccatcgcccagtactggcaggtgttttctgtgcctgctgtgggccaggccccagactggacccagcccctggacctgccccagctggagatccggaacagccccctcttcatccacatccccaacaacagcctgcagtggggcgtgtatgtgttcaacttcaccgtgtccatcaccactggaaaccccaagatgcctgaggtgaaggacagtgatgctgtgtatgtgtggatcgtgcgcagcagcctgcaggccgtgatgctgggagatgccaacatcacagccaacttcacagagcagctgatcctggatggcagcaccagcagtgaccctgatgctgacagccccctgcagggcctgcagttcttctggtactgcaccacagaccccaggaactacggcggggaccgcatcatcctgggcagcaaggaggtgtgccaccctgagcaggccaacctgaagtggccctgggccagcggccctgtgctgaccctgctgcctgagaccctgaagggggaccacgtgtacttcttcaggatggtgatcaggaaggacagcaggacagccttcagtgacaagagggtgcacgtgctgcagggccccaaggccatcgcccacatcacctgcatcgagaactgtgagaggaacttcatcgtgtctgaccgcttcagcctcttcctgaactgcaccaactgtgccagccgggacttctacaagtggagcatcctgagcagcagtggaggagagatgctgtttgactggatgggagaaacagtgactggaagaaatggagcctacctgagcatcaaggcctttgccttccgccacttcctggaggccgagttcagcatcagcctgtacctggcctgctggagcggcgtgacctctgtgttccgccacagcttcatcatcaaccacggcccccagattggagagtgcaagatcaacccagccaagggcatcgccctgatcaccaagtttgtggtgcagtgcagcaacttccgggacaagcacgtgcccctgacctacaagatcatcgtgtctgacctgcacagcgtgggggagatcagctctgtgaaggagaacaccctgggcaccatcctgtacctgggcccccagagcacagtgccccccagcttcctgcctgtgggcatgctggccagccagtatggcctgaagatctatgcccaggtgtatgacagcctgggcgccttcagccaggtgaccctgcacgccacagcccaggcccccacagacaagaacagcagcaagacagtgctgaaccagctgctgtccttcaccgtgggccccagcagcctgctgagcaccctcatccagaagaaggacttcctgcctgctggctacctgctgtacatcgtggcctctgtgctgaacaacatgaagacagagctgcccctgagagatgacagagtgaacctgaggaagcacctgattgaccagagcttcctgctgcctgtgtccaccctggtggagatcggccaggtggtgatgaccatcaccaagctgacccagaagcccagcgagttcacctgggatgcccagaagagggccaccatgagggtgtggcaggccaaccaggccctgcaggagtaccagcagaaggacaagcgcttccgctctgagcagattgaaattgtgtccacaggcatcctgatgagcctgagcaacatcctgaagatgaccagcccccaccaggtggtgaaggaccccttctacgtgattgagagcctgagtgacaccatcctggccaacaaggtgcccggcaacaagaccacctccatgaggacccccaacttcaacatgtatgtgaagaaggtggagaagtggggcatcaaccagctgttcagaaatgagaagcactgcaggaactgcttctaccccaccctgaatgtgtcctctgtgcccggcctgagcgccaacggccccatcagcaccatgttctgtgacttcaccaatgacctcttcccctggctgaatgaccaggagaacacctctgtggaggtgtctggcttcaggatgactggagtggccgacaatggatctgtgctggagatcaccccagatgtggccgaggtgtacctggtgaggaagaacctgacctttgctgccttcaacctgactgtgggccccaacagcgaggtggatggcagcctgaagaagaccaccggcggcttctccttccaggtggacagcacagtgctgcgggaggtgctggtgcacatcgtgacagaggtgatggtgctcttcaccgtgctggtgtacacaggcagccagatcacccccacagccctggtggccaccttcctggtgccccatgacatccccccatttgccagccagagcgccctgtttgatcctgcctgcaccgtgaagaaggcccgggtggtgtgcctgcctgtgtccctgctgcagctgattgcccagcacagccacagcccccactgcaccgtgtccatcgtgctgcaggcccccaggtttgtgatgaagctgaatgacaagctggtgcgcatcagcatcttctctgtgcagtgcctggacatgtatggcatccagagcgagtggagggagggctactgcatcctgggggagaagacctcctggtatgaggtgcactgcatctgcaagaatgtggtgcgggcccggcggcagctgggcaccatcggcctgaccggcatccacctgcacacccactacgtgatggccaaggtgattgtcatccccaaccctgtggacctgcggctgaacatcatcaagagcctgcaccagaaccctgtgaccctcttcaccgtgctcttcatcatcctgctgtatgtgggcctggccttctgggccctgtacagagatgagatggaccagcacctgcggggccacgtgattgtgctgcctgacaatgacccctatgacaacctgtgctacctggtgaccatcttcaccggcagccgctggggcagcggcacccgggccaacgtgtttgtgcagctgcggggcaccgtgtccaccagtgatgtgcactgcctgagccacccccacttcaccaccctgtaccggggcagcatcaacaccttcctgctgaccaccaagagtgacctgggggacatccacagcatccgggtgtggcacaacaatgaaggccgcagccccagctggtacctgagccgcatcaaggtggagaacctcttcagccgccacatctggctgttcatctgccagaagtggctgtctgtggacaccaccctggacaggaccttccacgtgacccacccagatgagcggctgaccaggaaggacttcttcttcattgatgtgagcagcaacctgaggaagaaccacatgtggttcagcatctttgcctctgtggtggccaagaccttcaaccggctgcagaggctgagctgctgcctggccatgctgctgagcagcctgctgtgcaacatcatgttcttcaacctgaaccggcaggagcagacagagagccgggagaggaagtacatgaggtccatgatgattggaattgaatctgtgctgatcaccatccctgtgcagctgctgatcaccttcctgttcacctgcagccagaggaagccccaggccgacctgaaggaggtgagcccccagaagcaccccctgatgtctgaggccagcgagcactgggaggagtacctgaggaagtggcacgcctatgaaacagccaaggtgcacccccgggaggtggccaagccagccagcaagggcaagccccggctgcccaaggccagccccaaggccaccagcaagcccaagcaccgccacaggaaggcccagatcaagaccccagagaccctgggccccaacaccaacagcaacaacaacattgaagatgaccaggatgtgcacagcgagcagcaccccagccagaaggacctgcagcagctgaagaagaagccccgcatcgtgctgccctggtggtgtgtgtatgtggcctggttcctggtgtttgccaccagcagcatcagcagcttcttcatcgtgttctacggcctgacctacggctatgacaagagcattgagtggctgtttgccagcttctgcagcttctgccagagcgtgctgctggtgcagcccagcaagatcatcctgctgagcggcttccgcaccaacaagcccaagtactgcaagaacctgtcctggagcaccaagtacaagtacacagagatccggctggatggcatgaggatgcaccctgaggagatgcagagaattcatgaccagatcgtgcgcatccggggcaccaggatgtaccagcccctgacagaagatgagatccgcatcttcaagaggaagaagaggatcaagagaagagccctgctcttcctgagctacatcctgacccacttcatcttcctggccctgctgctgatcctgattgtgctgctgcggcacacagactgcttctactacaaccagttcatccgggaccgcttctccatggacctggccaccgtgaccaagctggaggacatctaccgctggctgaacagcgtgctgctgcccctgctgcacaatgacctgaaccccaccttcctgcctgagagcagcagcaagatcctgggcctgcccctgatgaggcaggtgcgggccaagagcagcgagaagatgtgcctgcctgctgagaagtttgtgcagaacagcatccggcgggagatccactgccaccccaagtatggaattgatcctgaggacaccaagaactacagcggcttctggaatgaggtggacaagcaggccattgatgagagcaccaacggcttcacctacaagccccagggcacccagtggctgtactacagctatggcctgctgcacacctacggcagcggcggctacgccctgtacttcttccctgagcagcagcgcttcaacagcaccctgcggctgaaggagctgcaggagagcaactggctggatgagaagacctgggccgtggtgctggagctgaccaccttcaacccagacatcaacctcttctgcagcatcagcgtcatctttgaggtgtcccagctgggcgtggtgaacaccagcatcagcctgcacagcttcagcctggccgactttgacaggaaggccagcgctgagatctacctgtatgtggccatcctgatcttcttcctggcctacgtggtggatgagggctgcatcatcatgcaggagcgggccagctatgtgcgctctgtgtacaacctgctgaactttgccctgaagtgcatcttcaccgtgctgattgtgctcttcctgaggaagcacttcctggccaccggcatcatccgcttctacctgagcaaccctgaggacttcatccccttccacgctgtgtcccaggtggaccacatcatgaggatcatcctgggcttcctgctcttcctgaccatcctgaagaccctgcgctacagccgcttcttctatgatgtgcggctggcccagagggccatccaggccgccctgcccggcatctgccacatggcctttgtggtgtctgtgtacttctttgtgtacatggccttcggctacctggtgtttggccagcacgagtggaactacagcaacctgatccacagcacccagacagtgttctcctactgtgtgtctgccttccagaacacagagttcagcaacaaccgcatcctgggcgtgctcttcctgagcagcttcatgctggtgatgatctgtgtgctgatcaacctcttccaggccgtcatcctgagcgcctatgaggagatgaagcagcctgtgtatgaggagcccagtgatgaggtggaggccatgacctacctgtgcaggaagctgcggaccatgttctccttcctgaccagccagagcaaggccaaggatgagcctgagttcttcatcgacatgctgtatggccagcctgagaagaacagccaccgctacctgggcctgaagaccaggaacatcaacgggaagaagatggtgtacctggtggtgtag

SEQ ID NO: 164591 - DNA, 12912 bp, synthetic construct
  misc_feature 1..12912: note = Description of Artificial Sequence: Synthetic coding sequence
  source 1..12912: mol_type = other DNA
atgcccccagctgccccagcccggctggccctggccctgggcctgggcctgtggctgggcgccctggccggcggccctggccggggctgcggcccctgtgagcccccctgcctgtgtggccctgcccctggagctgcctgccgggtgaactgcagcggccggggcctgcggaccctgggccctgccctgcgcatcccagcagatgccacagccctggatgtgagccacaacctgctgcgggccctggatgtgggcctgctggccaacctgagcgccctggccgagctggacatcagcaacaacaagatcagcaccctggaggagggcatctttgccaacctcttcaacctgtctgagatcaacctgagcggcaacccctttgaatgtgactgtggcctggcctggctgccccgctgggccgaggagcagcaggtgcgggtggtgcagcctgaggccgccacctgtgccggccctggcagcctggccggccagcccctgctgggcatccccctgctggacagcggctgtggggaggagtatgtggcctgcctgcctgacaacagcagcggcaccgtggccgctgtgtccttctctgctgcccacgagggcctgctgcagcctgaggcctgcagcgccttctgcttcagcacaggccagggcctggccgccctgtctgagcagggctggtgcctgtgtggggccgcccagcccagcagcgccagctttgcctgcctgagcctgtgcagcggccccccacctcctccagcccccacctgccggggccccaccctgctgcagcacgtgtttcctgccagccctggggccaccctggtgggcccccacggccccctggccagcggccagctggccgccttccacatcgccgcccccctgcctgtgacagccacccgctgggactttggagatggcagcgctgaggtggatgctgctggccctgctgccagccacagatatgtgctgcccggccgctaccacgtgacagctgtgctggccctgggcgccggcagcgccctgctgggcacagatgtgcaggtggaggccgccccagctgccctggagctggtgtgccccagctctgtgcagagtgatgagagcctggacctgagcatccagaacagaggaggcagcggcctggaggccgcctacagcatcgtggccctgggggaggagcccgcccgggctgtgcaccccctgtgccccagcgacacagagatcttccctggaaatggccactgctaccgcctggtggtggagaaggccgcctggctgcaggcccaggagcagtgccaggcctgggccggggccgccctggccatggtggacagccctgctgtgcagcgcttcctggtgtcccgggtgaccaggagcctggatgtgtggattggcttcagcacagtgcagggcgtggaggtgggccctgccccccagggcgaggccttcagcctggagagctgccagaactggctgcctggagagccccacccagccacagctgagcactgtgtgcggctgggccccaccggctggtgcaacacagacctgtgcagcgccccccacagctatgtgtgtgagctgcagcccggcggccctgtgcaggatgctgagaacctgctggtgggcgcccccagcggggacctgcagggccccctgacccccctggcccagcaggacggcctgagcgcccctcatgagcctgtggaggtgatggtgtttcctggcctgcggctgagccgggaggccttcctgaccacagctgagtttggcacccaggagctgcggcggcctgcccagctgcggctgcaggtgtaccgcctgctgagcacagctggcaccccagaaaatggaagtgagcctgagagccgcagcccagacaacagaacccagctggccccagcctgcatgcctgggggccgctggtgccctggggccaacatctgcctgcccctggatgccagctgccacccccaggcctgtgccaacggctgcaccagcggccctggcctgcccggggccccctatgccctgtggagggagttcctgttctctgtgcctgctggccccccagcccagtacagcgtgaccctgcacggccaggatgtgctgatgctgcccggggacctggtgggcctgcagcatgatgctggccctggggccctgctgcactgcagccctgcccctggccaccctggcccccgggccccctacctgagcgccaatgccagctcctggctgccccacctgcctgcccagctggagggcacctgggcctgcccagcctgtgccctgcggctgctggccgccacagagcagctgactgtgctgctgggcctgcggcccaaccctggcctgcggctgcccggccgctatgaggtgcgggcagaggtgggcaatggagtgagccgccacaacctgagctgcagctttgatgtggtgtcccctgtggccggcctgcgggtcatctacccagcccccagagatggccgcctgtatgtgcccaccaatggaagtgccctggtgctgcaggtggacagcggggccaatgccacagccacagcccgctggccaggcggctctgtgtctgccaggtttgaaaatgtgtgcccagccctggtggccacctttgtgcccggctgcccctgggagaccaatgacaccctcttctctgtggtggccctgccctggctgtctgagggggagcacgtggtggatgtggtggtggagaacagcgccagccgggccaacctgagcctgcgggtgacagctgaggagcccatctgtggcctgcgggccacccccagccctgaggcccgggtgctgcagggcgtgctggtgcgctacagccctgtggtggaggccggcagtgacatggtgttccgctggaccatcaatgacaagcagagcctgaccttccagaatgtggtgttcaacgtcatctaccagagcgctgctgtgttcaagctgagcctgacagccagcaaccacgtgtccaatgtgacagtgaactacaacgtgacagtggagaggatgaacaggatgcagggcctgcaggtgtccacagtgcctgctgtgctgagccccaatgccaccctggccctgacagctggggtgctggtggacagcgctgtggaggtggccttcctgtggacctttggagatggagagcaggccctgcaccagttccagcccccctacaatgaaagcttccctgtgcctgaccccagcgtggcccaggtgctggtggagcacaacgtgatgcacacctacgccgcccctggagagtacctgctgactgtgctggccagcaatgcctttgagaacctgacccagcaggtgcctgtgtctgtgcgggccagcctgcccagcgtggccgtgggcgtgtctgatggagtgctggtggccggccggcctgtgaccttctacccccaccccctgcccagccctgggggcgtgctgtacacctgggactttggagatggcagccctgtgctgacccagagccagcctgctgccaaccacacctacgccagccggggcacctaccacgtgcggctggaggtgaacaacacagtgtctggagctgctgcccaggctgatgtgcgggtgtttgaggagctgcggggcctgtctgtggacatgagcctggccgtggagcagggcgcccctgtggtggtgtctgctgctgtgcagacaggagacaacatcacctggacctttgacatgggagatggcaccgtgctgagcggccctgaggccaccgtggagcacgtgtacctgcgggcccagaactgcaccgtgacagtgggcgccgccagccctgctggccacctggcccggagcctgcacgtgctggtgtttgtgctggaggtgctgcgggtggagcctgctgcctgcatccccacccagccagatgcccggctgacagcctacgtgacaggcaacccagcccactacctgtttgactggacctttggagatggcagcagcaacaccaccgtgcggggctgccccaccgtgacccacaacttcaccaggagcggcaccttccccctggccctggtgctgagcagccgggtgaacagagcccactacttcaccagcatctgtgtggagcctgaggtgggcaatgtgaccctgcagcctgagcggcagtttgtgcagctgggagatgaggcctggctggtggcctgtgcctggccacccttcccctaccgctacacctgggactttggaacagaggaggccgcccccacccgggcccggggccctgaggtgaccttcatctacagagaccccggcagctacctggtgacagtgacagccagcaacaacatctctgctgccaatgattctgccctggtggaggtgcaggagcctgtgctggtgaccagcatcaaggtgaatggcagcctgggcctggagctgcagcagccctacctgttctctgctgtgggccggggccgcccagccagctacctgtgggacctgggagatggcggctggctggagggccctgaggtgacccacgcctacaacagcactggagacttcaccgtgcgggtggccggctggaatgaggtgagccgctctgaggcctggctgaatgtgacagtgaagagaagagtgcggggcctggtggtgaatgccagcaggacagtggtgcccctgaatggatctgtgtccttcagcaccagcctggaggccggcagtgatgtgcgctacagctgggtgctgtgtgaccgctgcacccccatccctgggggccccaccatctcctacaccttccgctctgtgggcaccttcaacatcatcgtgacagcagaaaatgaggtgggcagcgcccaggacagcatctttgtgtatgtgctgcagctgattgagggcctgcaggtggtgggcggcggccgctacttccccaccaaccacacagtgcagctgcaggccgtggtgagagatggcaccaacgtgtcctacagctggacagcctggagggaccggggccctgccctggccggcagcggcaagggcttcagcctgactgtgctggaggccggcacctaccacgtgcagctgcgggccaccaacatgctgggcagcgcctgggccgactgcaccatggactttgtggagcctgtgggctggctgatggtggccgccagccccaacccagctgctgtgaacacctctgtgaccctgtctgctgagctggccggcggcagcggcgtggtgtacacctggagcctggaggagggcctgtcctgggagaccagcgagcccttcaccacccacagcttccccaccccaggcctgcacctggtgaccatgacagctggcaaccccctgggcagcgccaatgccaccgtggaggtggatgtgcaggtgcctgtgtctggcctgagcatccgggccagcgagcccggcggcagctttgtggccgccggcagctctgtgcccttctggggccagctggccaccggcaccaacgtgtcctggtgctgggccgtgcctgggggcagcagcaagaggggcccccacgtgaccatggtgtttcctgatgctggcaccttcagcatccggctgaatgccagcaatgctgtgtcctgggtgtctgccacctacaacctgacagctgaggagcccatcgtgggcctggtgctgtgggccagcagcaaggtggtggcccctggccagctggtgcacttccagatcctgctggccgccggcagcgctgtgaccttccggctgcaggtgggcggggccaaccctgaggtgctgcccggcccccgcttcagccacagcttcccccgggtgggggaccacgtggtgtctgtgcggggcaagaaccacgtgtcctgggcccaggcccaggtgagaattgtggtgctggaggccgtgtctggcctgcaggtgcccaactgctgtgagcccggcatcgccaccggcacagagaggaacttcaccgcccgggtgcagaggggcagccgggtggcctatgcctggtacttcagcctgcagaaggtgcagggcgacagcctggtgatcctgagcggcagagatgtgacctacacccctgtggccgccggcctgctggagatccaggtgcgggccttcaatgccctgggctctgaaaatagaaccctggtgctggaggtgcaggatgctgtgcagtatgtggccctgcagagcggcccctgcttcaccaacagaagtgcccagtttgaagctgccaccagccccagcccccggcgggtggcctaccactgggactttggagatggcagccctggccaggacacagatgagcccagggctgagcacagctacctgcggcctggggactacagagtgcaggtgaatgccagcaacctggtgtccttctttgtggcccaggccaccgtgacagtgcaggtgctggcctgccgggagcctgaggtggatgtggtgctgcccctgcaggtgctgatgaggaggagccagaggaactacctggaggcccacgtggacctgcgggactgtgtgacctaccagacagagtaccgctgggaggtgtacagaacagccagctgccagaggcctggccgcccagcccgggtggccctgcccggggtggatgtgtcccggccccggctggtgctgccccggctggccctgcctgtgggccactactgctttgtgtttgtggtgtcctttggagacacccccctgacccagagcatccaggccaacgtgacagtggcccctgagcggctggtgcccatcatcgagggcggcagctacagagtgtggagcgacacccgggacctggtgctggatggcagcgagagctatgaccccaacctggaggatggagaccagacccccctgtccttccactgggcctgtgtggccagcacccagcgggaggccggcggctgtgccctgaactttggcccccggggcagcagcacagtgaccatcccccgggagcggctggccgccggcgtggagtacaccttcagcctgactgtgtggaaggccggcaggaaggaggaggccaccaaccagacagtgctgatccgcagcggccgggtgcccatcgtgtccctggagtgtgtgtcctgcaaggcccaggccgtgtatgaggtgagccgcagcagctatgtgtacctggagggccgctgcctgaactgcagcagcggcagcaagaggggccgctgggccgcccggaccttcagcaacaagaccctggtgctggatgagaccaccaccagcacaggcagcgctggcatgaggctggtgctgcggcggggcgtgctgagagatggagagggctacaccttcaccctgactgtgctgggccgcagcggggaggaggagggctgtgccagcatccggctgagccccaaccggccccccctgggcggcagctgccgcctcttccccctgggcgctgtgcacgccctgaccaccaaggtgcactttgagtgcaccggctggcatgatgctgaagatgctggggcccccctggtgtatgccctgctgctgcggcgctgccggcagggccactgtgaggagttctgtgtgtacaagggcagcctgagcagctatggagctgtgctgcccccaggcttccggccccactttgaggtgggcctggccgtggtggtgcaggaccagctgggcgctgctgtggtggccctgaacagaagcctggccatcaccctgcctgagcccaacggcagcgccaccggcctgactgtgtggctgcacggcctgacagcctctgtgctgcccggcctgctgcggcaggccgacccccagcacgtgattgagtacagcctggccctggtgacagtgctgaatgaatatgaaagagccctggatgtggccgctgagcccaagcatgagcggcagcaccgggcccagatcaggaagaacatcacagagaccctggtgtccctgcgggtgcacacagtggatgacatccagcagattgctgctgccctggcccagtgcatgggccccagccgggagctggtgtgccgcagctgcctgaagcagaccctgcacaagctggaggccatgatgctgatcctgcaggccgagaccacagctggcaccgtgacccccacagccatcggggacagcatcctgaacatcaccggggacctgatccacctggccagcagtgatgtgcgggccccccagcccagcgagctgggcgctgagagccccagcaggatggtggccagccaggcctacaacctgaccagcgccctgatgaggatcctgatgaggagccgggtgctgaatgaggagcccctgaccctggccggggaggagatcgtggcccagggcaagagaagtgaccccaggagcctgctgtgctacggcggggcccctggccctggctgccacttcagcatccctgaggccttcagcggggccctggccaacctgagtgatgtggtgcagctgatcttcctggtggacagcaaccccttccccttcggctacatcagcaactacacagtgtccaccaaggtggcctccatggccttccagacccaggccggggcccagatccccatcgagcggctggccagcgagcgggccatcaccgtgaaggtgcccaacaacagcgactgggccgcccggggccacaggagcagcgccaacagcgccaacagcgtggtggtgcagccccaggcctctgtgggcgctgtggtgaccctggacagcagcaacccagctgctggcctgcacctgcagctgaactacaccctgctggatggccactacctgtctgaggagcctgagccctacctggccgtgtacctgcacagcgagccccggcccaatgagcacaactgcagcgccagccgccgcatccggcctgagagcctgcagggcgctgaccaccggccctacaccttcttcatcagccctggcagccgggaccctgctggcagctaccacctgaacctgagcagccacttccgctggagcgccctgcaggtgtctgtgggcctgtacaccagcctgtgccagtacttcagcgaggaggacatggtgtggaggacagagggcctgctgcccctggaggagaccagcccccggcaggccgtgtgcctgaccaggcacctgacagcctttggagccagcctgtttgtgccccccagccacgtgcgctttgtgtttcctgagcccacagcagatgtgaactacatcgtgatgctgacctgtgctgtgtgcctggtgacctacatggtgatggccgccatcctgcacaagctggaccagctggatgccagccggggccgggccatccccttctgtggccagaggggccgcttcaagtatgagatcctggtgaagacaggctggggccggggcagcggcaccacagcccacgtgggcatcatgctgtatggagtggacagccgcagcggccaccgccacctggatggagaccgggccttccacaggaacagcctggacatcttccgcatcgccaccccccacagcctgggctctgtgtggaagatccgggtgtggcatgacaacaagggcctgagccctgcctggttcctgcagcacgtgattgtgcgggacctgcagacagcccggagcgccttcttcctggtgaatgactggctgtctgtggagacagaggccaacggcggcctggtggagaaggaggtgctggccgccagtgatgctgccctgctgcgcttccggcggctgctggtggccgagctgcagaggggcttctttgacaagcacatctggctgagcatctgggaccggccccccaggagccgcttcacccgcatccagagggccacctgctgcgtgctgctgatctgcctcttcctgggcgccaatgctgtgtggtatggagctgtgggggacagcgcctacagcactggacatgtgtcccggctgagccccctgtctgtggacacagtggccgtgggcctggtgtcctctgtggtggtgtaccctgtgtacctggccatcctcttcctgttcaggatgagccgcagcaaggtggccggcagccccagccccaccccagctggccagcaggtgctggacatcgacagctgcctggacagctctgtgctggacagcagcttcctgaccttcagcggcctgcacgccgagcaggcctttgtgggccagatgaagagtgacctcttcctggatgacagcaagagcctggtgtgctggcccagcggggagggcaccctgtcctggccagacctgctgagtgaccccagcatcgtgggcagcaacctgcggcagctggcccggggccaggccggccacggcctgggccctgaggaggatggcttcagcctggccagcccctacagccctgccaagagcttcagcgccagtgatgaggacctgatccagcaggtgctggccgagggcgtgagcagccctgcccccacccaggacacccacatggagacagacctgctgagcagcctgagcagcaccccaggagagaagacagagaccctggccctgcagaggctgggggagctgggcccccccagccctggcctgaactgggagcagccccaggccgcccggctgagcaggacaggcctggtggagggcctgaggaagaggctgctgcctgcctggtgtgccagcctggcccacggcctgagcctgctgctggtggccgtggccgtggccgtgtctggctgggtgggcgccagcttccccccaggagtgtctgtggcctggctgctgagcagcagcgccagcttcctggccagcttcctgggctgggagcccctgaaggtgctgctggaggccctgtacttcagcctggtggccaagaggctgcacccagatgaagatgacaccctggtggagagccctgctgtgacccctgtgtctgcccgggtgccccgggtgcggcccccccacggctttgccctcttcctggccaaggaggaggccaggaaggtgaagaggctgcacggcatgctgcggagcctgctggtgtacatgctgttcctgctggtgaccctgctggccagctatggagatgccagctgccacggccacgcctaccgcctgcagagcgccatcaagcaggagctgcacagccgggccttcctggccatcaccaggtctgaggagctgtggccctggatggcccacgtgctgctgccctacgtgcacggcaaccagagcagccctgagctgggccccccccggctgcggcaggtgcggctgcaggaggccctgtacccagaccccccaggcccccgggtgcacacctgcagcgctgctgggggcttcagcaccagtgactatgatgtgggctgggagagcccccacaacggcagcggcacctgggcctacagcgccccagacctgctgggcgcctggagctggggcagctgtgctgtgtatgacagcggcggctacgtgcaggagctgggcctgagcctggaggagagccgggaccggctgcgcttcctgcagctgcacaactggctggacaacagaagcagagctgtgttcctggagctgacccgctacagccctgctgtgggcctgcatgctgctgtgaccctgcggctggagttccctgctgctggccgggccctggccgccctgtctgtgcggccctttgccctgcggcggctgtctgctggcctgagcctgcccctgctgacctctgtgtgcctgctgctgtttgctgtgcactttgctgtggccgaggcccggacctggcaccgggagggccgctggagggtgctgcggctgggcgcctgggcccgctggctgctggtggccctgacagctgccacagccctggtgcggctggcccagctgggcgctgctgaccggcagtggaccaggtttgtgcggggccggccccggcgcttcaccagctttgaccaggtggcccagctgagcagcgctgcccggggcctggccgccagcctgctcttcctgctgctggtgaaggccgcccagcagctgcgctttgtgcggcagtggagcgtgtttgggaagaccctgtgccgggccctgcctgagctgctgggcgtgaccctgggcctggtggtgctgggcgtggcctatgcccagctggccatcctgctggtgagcagctgtgtggacagcctgtggagcgtggcccaggccctgctggtgctgtgccccggcaccggcctgagcaccctgtgcccagctgagagctggcacctgagccccctgctgtgtgtgggcctgtgggccctgcggctgtggggcgccctgcggctgggcgctgtgatcctgcgctggagataccacgccctgcggggggagctgtacagacctgcctgggagccccaggactatgagatggtggagctgttcctgcggcggctgcggctgtggatgggcctgagcaaggtgaaggagttccgccacaaggtgcgctttgagggcatggagcccctgcccagccgcagcagccggggcagcaaggtgtccccagatgtgcccccaccttctgctggcagtgatgccagccaccccagcaccagcagcagccagctggatggcctgtctgtgtccctgggccgcctgggcacccgctgtgagcctgagcccagccggctgcaggccgtgtttgaggccctgctgacccagtttgaccggctgaaccaggccacagaagatgtgtaccagctggagcagcagctgcacagcctgcagggcagaagaagcagccgggccccagctggcagcagccggggccccagccctggcctgcggcctgccctgcccagccggctggcccgggccagccggggcgtggacctggccaccggccccagcaggacccccctgcgggccaagaacaaggtgcaccccagcagcacctag

SEQ ID NO: 164592 - DNA, 10914 bp, synthetic construct
  misc_feature 1..10914: note = Description of Artificial Sequence: Synthetic coding sequence
  source 1..10914: mol_type = other DNA
atgcccccagctgccccagcccggctggccctggccctgggcctgggcctgtggctgggcgccctggccggcggccctggccggggctgcggcccctgtgagcccccctgcctgtgtggccctgcccctggagctgcctgccgggtgaactgcagcggccggggcctgcggaccctgggccctgccctgcgcatcccagcagatgccacagccctgacagccatggccaaggcagatggagatgtgaagaagtatggcagcaagagaggagccctggccctgacccacggccacagcctgctgagagatgtgagccacaacctgctgcgggccctggatgtgggcctgctggccaacctgagcgccctggccgagctggacatcagcaacaacaagatcagcaccctggaggagggcatctttgccaacctcttcaacctgtctgagatcaacctgagcggcaacccctttgaatgtgactgtggcctggcctggctgccccgctgggccgaggagcagcaggtgcgggtggtgcagcctgaggccgccacctgtgccggccctggcagcctggccggccagcccctgctgggcatccccctgctggacagcggctgtggggccaccctggtgggcccccacggccccctggccagcggccagctggccgccttccacatcgccgcccccctgcctgtgacagccacccgctgggactttggagatggcagcgctgaggtggatgctgctggccctgctgccagccaccgctacgtgctgcccggccgctaccacgtgacagctgtgctggccctgggcgccggcagcgccctgctgggcacagatgtgcaggtggaggccgccccagctgccctggagctggtgtgccccagctctgtgcagagtgatgagagcctggacctgagcatccagaacagaggaggcagcggcctggaggccgcctacagcatcgtggccctgggggaggagcccgcccgggctgtgcaccccctgtgccccagcgacacagagatcttccctggaaatggccactgctaccgcctggtggtggagaaggccgcctggctgcaggcccaggagcagtgccaggcctgggccggggccgccctggccatggtggacagccctgctgtgcagcgcttcctggtgtcccgggtgaccaggagcctggatgtgtggattggcttcagcacagtgcagggcgtggaggtgggccctgccccccagggcgaggccttcagcctggagagctgccagaactggctgcccggggagccccacccagccacagctgagcactgtgtgcggctgggccccaccggctggtgcaacacagacctgtgcagcgccccccacagctatgtgtgtgagctgcagcccggcggccctgtgcaggatgctgagaacctgctggtgggcgcccccagcggggacctgcagggccccctgacccccctggcccagcaggacggcctgagcgcccctcatgagcctgtggaggccggcatgggctctgtggagctgcggcggcccccagcccaccaggtgatggtgtttcctggcctgcggctgagccgggaggccttcctgaccacagctgagtttggcacccaggagctgcggcggcctgcccagctgcggctgcaggtgtaccgcctgctgagcacagctggcaccccagaaaatggaagtgagcctgagagccgcagcccagacaacagaacccagctggccccagcctgcatgcctgggggccgctggtgccctggggccaacatctgcctgcccctggatgccagctgccacccccaggcctgtgccaacggctgcacagaaggagagcacgtggtggatgtggtggtggagaacagcgccagccgggccaacctgagcctgcgggtgacagctgaggagcccatctgtggcctgcgggccacccccagccctgaggcccgggtgctgcagggcgtgctggtgcgctacagccctgtggtggaggccggcagtgacatggtgttccgctggaccatcaatgacaagcagagcctgaccttccagaatgtggtgttcaacgtcatctaccagagcgctgctgtgttcaagctgagcctgacagccagcaaccacgtgtccaatgtgacagtgaactacaacgtgacagtggagaggatgaacaggatgcagggcctgcaggtgtccacagtgcctgctgtgctgagccccaatgccaccctggccctgacagctggggtgctggtggacagcgctgtggaggtggccttcctgtggacctttggagatggagagcaggccctgcaccagttccagcccccctacaatgaaagcttccctgtgcctgaccccagcgtggcccaggtgctggtggagcacaacgtgatgcacacctatgctgcccctggagagtacctgctgactgtgctggccagcaatgcctttgagaacctgacccagcaggtgcctgtgtctgtgcgggccagcctgcccagcgtggccgtgggcgtgtctgatggagtgctgagccagcctgctgccaaccacacctacgccagccggggcacctaccacgtgcggctggaggtgaacaacacagtgtctggagctgctgcccaggctgatgtgcgggtgtttgaggagctgcggggcctgtctgtggacatgagcctggccgtggagcagggcgcccctgtggtggtgtctgctgctgtgcagacaggagacaacatcacctggacctttgacatgggagatggcaccgtgctgagcggccctgaggccaccgtggagcacgtgtacctgcgggcccagaactgcaccgtgacagtgggcgccgccagccctgctggccacctggcccggagcctgcacgtgctggtgtttgtgctggaggtgctgcgggtggagcctgctgcctgcatccccacccagccagatgcccggctgacagcctacgtgactggaaatcctgcccactacctgtttgactggacctttggagatggcagcagcaacaccaccgtgcggggctgccccaccgtgacccacaacttcaccaggagcggcaccttccccctggccctggtgctgagcagccgggtgaacagagcccactacttcaccagcatctgtgtggagcctgaggtgggcaatgtgaccctgcagcctgagcggcagtttgtgcagctgggagatgaggcctggctggtggcctgtgcctggccacccttcccctaccgctacacctgggactttggaacagaggaggccgcccccacccgggcccggggccctgaggtgaccttcatctacagagatcctggcagctacctggtgacagtgacagccagcaacaacatctctgctgccaatgacagcgccctggtggaggtgcaggagcctgtgctggtgaccagcatcaaggtgaatggcagcctgggcctggagctgcagcagccctacctgttctctgctgtgggccggggccggcctgccagctacctgtgggacctgggagatggcggctggctggagggccctgaggtgacccacgcctacaacagcactggagacttcaccggccctggccctggccggcagaggcagaggctgctggcccaccgggaggccggcacctaccacgtgcagctgcgggccaccaacatgctgggcagcgcctgggccgactgcaccatggactttgtggagcctgtgggctggctgatggtggccgccagccccaacccagctgctgtgaacacctctgtgaccctgtctgctgagctggccggcggcagcggcgtggtgtacacctggagcctggaggagggcctgtcctgggagaccagcgagcccttcaccacccacagcttccccaccccaggcctgcacctggtgaccatgacagctggcaaccccctgggcagcgccaatgccaccgtggaggtggatgtgcaggtgcctgtgtctggcctgagcatccgggccagcgagcccggcggcagctttgtggccgccggcagctctgtgcccttctggggccagctggccaccggcaccaacgtgtcctggtgctgggccgtgcctgggggcagcagcaagaggggcccccacgtgaccatggtgtttcctgatgctggcaccttcagcatccggctgaatgccagcaatgctgtgtcctgggtgtctgccacctacaacctgacagctgaggagcccatcgtgggcctggtgctgtgggccagcagcaaggtggtggcccctggccagctggtgcacttccagatcctgctggccgccggcagcgctgtgaccttccggctgcaggacacagatgagcccagggctgagcacagctacctgcggcctggggactacagagtgcaggtgaatgccagcaacctggtgtccttctttgtggcccaggccaccgtgacagtgcaggtgctggcctgccgggagcctgaggtggatgtggtgctgcccctgcaggtgctgatgagaagaagccagaggaactacctggaggcccacgtggacctgcgggactgtgtgacctaccagacagagtaccgctgggaggtgtacagaacagccagctgccagaggcctggccggcctgcccgggtggccctgcccggggtggatgtgtcccggccccggctggtgctgccccggctggccctgcctgtgggccactactgctttgtgtttgtggtgtcctttggagacacccccctgacccagagcatccaggccaacgtgacagtggcccctgagcggctggtgcccatcattgaaggaggcagctacagagtgtggagcgacacccgggacctggtgctggatggcagcgagagctatgaccccaacctggaggatggagaccagacccccctgtccttccactgggcctgtgtggccagcacccagcgggaggccggcggctgtgccctgaactttggcccccggggcagcagcacagtgaccatcccccgggagcggctggccgccggcgtggagtacaccttcagcctgactgtgtggaaggccggcaggaaggaggaggccaccaaccagacagtgctgatccgcagcggccgggtgcccatcgtgtccctggagtgtgtgtcctgcaaggcccaggccgtgtatgaggtgagccgcagcagctatgtgtacctggagggccgctgcctgaactgcagcagcggcagcaagaggggccgctgggccgcccggaccttcagcaacaagaccctggtgctggatgagaccaccaccagcactggatctgctggcatgaggctggtgctgcggcggggcgtgctgagagatggagagggctacaccttcaccctgactgtgctgggccgctctggagaggaggagggctgtgccagcatccggctgagccccaacagaccacccctgggcggcagctgccgcctcttccccctgggcgctgtgcacgccctgaccaccaaggtgcactttgaatgtacaggctggcatgatgctgaagatgctggggcccccctggtgtatgccctgctgctgcggcgctgccggcagggccactgtgaggagttctgtgtgtacaagggcagcctgagcagctatggagctgtgctgcccccaggcttccggccccactttgaggtgggcctggccgtggtggtgcaggaccagctgggcgctgctgtggtggccctgaacagaagcctggccatcaccctgcctgagcccaatggaagtgccaccggcctgactgtgtggctgcacggcctgacagcctctgtgctgcccggcctgctgcggcaggccgacccccagcacgtgattgagtacagcctggccctggtgacagtgctgaatgagcaccgggcccagatcaggaagaacatcacagagaccctggtgtccctgcgggtgcacacagtggatgacatccagcagattgctgctgccctggcccagtgcatgggccccagccgggagctggtgtgccgcagctgcctgaagcagaccctgcacaagctggaggccatgatgctgatcctgcaggccgagaccacagctggcaccgtgacccccacagccatcggggacagcatcctgaacatcactggagacctgatccacctggccagcagtgatgtgcgggccccccagcccagcgagctgggcgctgagagccccagcaggatggtggccagccaggcctacaacctgaccagcgccctgatgaggatcctgatgaggagccgggtgctgaatgaggagcccctgaccctggccggggaggagatcgtggcccagggcaagagaagtgaccccaggagcctgctgtgctatggaggagcccctggccctggctgccacttcagcatccctgaggccttcagcggggccctggccaacctgagtgatgtggtgcagctgatcttcctggtggacagcaaccccttccccttcggctacatcagcaactacacagtgtccaccaaggtggcctccatggccttccagacccaggccggggcccagatccccatcgagcggctggccagcgagcgggccatcaccgtgaaggtgcccaacaacagcgactgggccgcccggggccacaggagcagcgccaacagcgccaacagcgtggtggtgcagccccaggcctctgtgggcgctgtggtgaccctggacagcagcaacccagctgctggcctgcacctgcagctgaactacaccctgctggatggccactacctgtctgaggagcctgagccctacctggccgtgtacctgcacagcgagccccggcccaatgagcacaactgcagcgccagccgccgcatccggcctgagagcctgcagggcgctgaccaccggccctacaccttcttcatcagccctggcagccgggaccctgctggcagctaccacctgaacctgagcagccacttccgctggagcgccctgcaggtgtctgtgggcctgtacaccagcctgtgccagtacttcagcgaggaggacatggtgtggaggacagagggcctgctgcccctggaggagaccagcccccggcaggccgtgtgcctgaccaggcacctgacagccttcggggccagcctgtttgtgccccccagccacgtgcgctttgtgtttcctgagcccacagcagatgtgaactacatcgtgatgctgacctgtgctgtgtgcctggtgacctacatggtgatggccgccatcctgcacaagctggaccagctggatgccagccggggccgggccatccccttctgtggccagaggggccgcttcaagtatgagatcctggtgaagacaggctggggccggggcagcggcaccacagcccacgtgggcatcatgctgtatggagtggacagccgcagcggccaccgccacctggatggagaccgggccttccacaggaacagcctggacatcttcagaattgccaccccccacagcctgggctctgtgtggaagatccgggtgtggcatgacaacaagggcctgagccctgcctggttcctgcagcacgtgattgtgcgggacctgcagacagcccggagcgccttcttcctggtgaatgactggctgtctgtggagacagaggccaatggaggcctggtggagaaggaggtgctggccgccagtgatgctgccctgctgcgcttccggcggctgctggtggccgagctgcagaggggcttctttgacaagcacatctggctgagcatctgggacaggcctcccaggagccgcttcacccgcatccagagggccacctgctgcgtgctgctgatctgcctcttcctgggcgccaatgctgtgtggtacggggctgtgggggacagcgcctacagcacaggccacgtgtcccggctgagccccctgtctgtggacacagtggccgtgggcctggtgtcctctgtggtggtgtaccctgtgtacctggccatcctcttcctgttcaggatgagccgcagcaaggtggccggcagccccagccccaccccagctggccagcaggtgctggacatcgacagctgcctggacagctctgtgctggacagcagcttcctgaccttcagcggcctgcatgctgaggcctttgtgggccagatgaagagtgacctcttcctggatgacagcaagagcctggtgtgctggcccagcggggagggcaccctgtcctggccagacctgctgagtgaccccagcatcgtgggcagcaacctgcggcagctggcccggggccaggccggccacggcctgggccctgaggaggatggcttcagcctggccagcccctacagccctgccaagagcttcagcgccagtgatgaggacctgatccagcaggtgctggccgagggcgtgagcagccctgcccccacccaggacacccacatggagacagacctgctgagcagcctgagcagcaccccaggagagaagacagagaccctggccctgcagaggctgggggagctgggcccccccagccctggcctgaactgggagcagccccaggccgcccggctgagcaggacaggcctggtggagggcctgaggaagaggctgctgcctgcctggtgtgccagcctggcccacggcctgagcctgctgctggtggccgtggccgtggccgtgtctggctgggtgggcgccagcttccccccaggagtgtctgtggcctggctgctgagcagcagcgccagcttcctggccagcttcctgggctgggagcccctgaaggtgctgctggaggccctgtacttcagcctggtggccaagaggctgcacccagatgaagatgacaccctggtggagagccctgctgtgacccctgtgtctgcccgggtgccccgggtgcggcccccccacggctttgccctcttcctggccaaggaggaggccaggaaggtgaagaggctgcacggcatgctgcggagcctgctggtgtacatgctgttcctgctggtgaccctgctggccagctatggagatgccagctgccacggccacgcctaccgcctgcagagcgccatcaagcaggagctgcacagccgggccttcctggccatcaccaggtctgaggagctgtggccctggatggcccacgtgctgctgccctacgtgcacggcaaccagagcagccctgagctgggccccccccggctgcggcaggtgcggctgcaggaggccctgtacccagaccccccaggcccccgggtgcacacctgcagcgctgctgggggcttcagcaccagtgactatgatgtgggctgggagagcccccacaacggcagcggcacctgggcctacagcgccccagacctgctgggcgcctggagctggggcagctgtgctgtgtatgacagcggcggctacgtgcaggagctgggcctgagcctggaggagagccgggaccggctgcgcttcctgcagctgcacaactggctggacaacagaagcagagctgtgttcctggagctgacccgctacagccctgctgtgggcctgcatgctgctgtgaccctgcggctggagttccctgctgctggccgggccctggccgccctgtctgtgcggccctttgccctgcggcggctgtctgctggcctgagcctgcccctgctgacctctgtgtgcctgctgctgtttgctgtgcactttgctgtggccgaggcccggacctggcaccgggagggccgctggagggtgctgcggctgggcgcctgggcccgctggctgctggtggccctgacagctgccacagccctggtgcggctggcccagctgggcgctgctgaccggcagtggaccaggtttgtgcggggccggccccggcgcttcaccagctttgaccaggtggcccagctgagcagcgctgcccggggcctggccgccagcctgctcttcctgctgctggtgaaggccgcccagcagctgcgctttgtgcggcagtggagcgtgtttgggaagaccctgtgccgggccctgcctgagctgctgggcgtgaccctgggcctggtggtgctgggcgtggcctatgcccagctggccatcctgctggtgagcagctgtgtggacagcctgtggagcgtggcccaggccctgctggtgctgtgccccggcaccggcctgagcaccctgtgcccagctgagagctggcacctgagccccctgctgtgtgtgggcctgtgggccctgcggctgtggggcgccctgcggctgggcgctgtgatcctgcgctggagataccacgccctgcggggggagctgtacagacctgcctgggagccccaggactatgagatggtggagctgttcctgcggcggctgcggctgtggatgggcctgagcaaggtgaaggagttccgccacaaggtgcgctttgagggcatggagcccctgcccagccgcagcagccggggcagcaaggtgtccccagatgtgcccccaccttctgctggcagtgatgccagccaccccagcaccagcagcagccagctggatggcctgtctgtgtccctgggccgcctgggcacccgctgtgagcctgagcccagccggctgcaggccgtgtttgaggccctgctgacccagtttgaccggctgaaccaggccacagaagatgtgtaccagctggagcagcagctgcacagcctgcagggcagaagaagcagccgggccccagctggcagcagccggggccccagccctggcctgcggcctgccctgcccagccggctggcccgggccagccggggcgtggacctggccaccggccccagcaggacccccctgcgggccaagaacaaggtgcaccccagcagcacctag

SEQ ID NO: 164593 - DNA, 3693 bp, synthetic construct
  misc_feature 1..3693: note = Description of Artificial Sequence: Synthetic coding sequence
  source 1..3693: mol_type = other DNA
atggtggccgccagccccaacccagctgctgtgaacacctctgtgaccctgtctgctgagctggccggcggcagcggcgtggtgtacacctggagcctggaggagggcctgtcctgggagaccagcgagcccttcaccacccacagcttccccaccccaggcctgcacctggtgaccatgacagctggcaaccccctgggcagcgccaatgccaccgtggaggtggatgtgcaggtgcctgtgtctggcctgagcatccgggccagcgagcccggcggcagctttgtggccgccggcagctctgtgcccttctggggccagctggccaccggcaccaacgtgtcctggtgctgggccgtgcctgggggcagcagcaagaggggcccccacgtgaccatggtgtttcctgatgctggcaccttcagcatccggctgaatgccagcaatgctgtgtcctgggtgtctgccacctacaacctgacagctgaggagcccatcgtgggcctggtgctgtgggccagcagcaaggtggtggcccctggccagctggtgcacttccagatcctgctggccgccggcagcgctgtgaccttccggctgcaggtgggcggggccaaccctgaggtgctgcccggcccccgcttcagccacagcttcccccgggtgggggaccacgtggtgtctgtgcggggcaagaaccacgtgtcctgggcccaggcccaggtgcgcatcgtggtgctggaggccgtgtctggcctgcaggtgcccaactgctgtgagcccggcatcgccactggaacagaaagaaacttcaccgcccgggtgcagaggggcagccgggtggcctatgcctggtacttcagcctgcagaaggtgcagggcgacagcctggtgatcctgagcggcagagatgtgacctacacccctgtggccgccggcctgctggagatccaggtgcgggccttcaatgccctgggcagcgagaacagaaccctggtgctggaggtgcaggatgctgtgcagtatgtggccctgcagagcggcccctgcttcaccaacagaagtgcccagtttgaggccgccaccagccccagccccaggagagtggcctaccactgggactttggagatggcagccctggccaggacacagatgagcccagggctgagcacagctacctgcggcctggggactacagagtgcaggtgaatgccagcaacctggtgtccttctttgtggcccaggccaccgtgacagtgcaggtgctggcctgccgggagcctgaggtggatgtggtgctgcccctgcaggtgctgatgagaagaagccagaggaactacctggaggcccacgtggacctgcgggactgtgtgacctaccagacagagtaccgctgggaggtgtacagaacagccagctgccagaggcctggccggcctgcccgggtggccctgcccggggtggatgtgtcccggccccggctggtgctgccccggctggccctgcctgtgggccactactgctttgtgtttgtggtgtcctttggagacacccccctgacccagagcatccaggccaacgtgacagtggcccctgagcggctggtgcccatcattgaaggaggcagctacagagtgtggagcgacacccgggacctggtgctggatggcagcgagagctatgaccccaacctggaggatggagaccagacccccctgtccttccactgggcctgtgtggccagcacccagcgggaggccggcggctgtgccctgaactttggcccccggggcagcagcacagtgaccatcccccgggagcggctggccgccggcgtggagtacaccttcagcctgactgtgtggaaggccggcaggaaggaggaggccaccaaccagacagtgctgatccgcagcggccgggtgcccatcgtgtccctggagtgtgtgtcctgcaaggcccaggccgtgtatgaggtgagccgcagcagctatgtgtacctggagggccgctgcctgaactgcagcagcggcagcaagaggggccgctgggccgcccggaccttcagcaacaagaccctggtgctggatgagaccaccaccagcactggatctgctggcatgaggctggtgctgcggcggggcgtgctgagagatggagagggctacaccttcaccctgactgtgctgggccgctctggagaggaggagggctgtgccagcatccggctgagccccaacagaccacccctgggcggcagctgccgcctcttccccctgggcgctgtgcacgccctgaccaccaaggtgcactttgaatgtacaggctggcatgatgctgaagatgctggggcccccctggtgtatgccctgctgctgcggcgctgccggcagggccactgtgaggagttctgtgtgtacaagggcagcctgagcagctatggagctgtgctgcccccaggcttccggccccactttgaggtgggcctggccgtggtggtgcaggaccagctgggcgctgctgtggtggccctgaacagaagcctggccatcaccctgcctgagcccaatggaagtgccaccggcctgactgtgtggctgcacggcctgacagcctctgtgctgcccggcctgctgcggcaggccgacccccagcacgtgattgagtacagcctggccctggtgacagtgctgaatgaatatgagcgggccctggatgtggccgctgagcccaagcatgagcggcagcaccgggcccagatcaggaagaacatcacagagaccctggtgtccctgcgggtgcacacagtggatgacatccagcagattgctgctgccctggcccagtgcatgggccccagccgggagctggtgtgccgcagctgcctgaagcagaccctgcacaagctggaggccatgatgctgatcctgcaggccgagaccacagctggcaccgtgacccccacagccatcggggacagcatcctgaacatcactggagacctgatccacctggccagcagtgatgtgcgggccccccagcccagcgagctgggcgctgagagccccagcaggatggtggccagccaggcctacaacctgaccagcgccctgatgaggatcctgatgaggagccgggtgctgaatgaggagcccctgaccctggccggggaggagatcgtggcccagggcaagagaagtgaccccaggagcctgctgtgctatggaggagcccctggccctggctgccacttcagcatccctgaggccttcagcggggccctggccaacctgagtgatgtggtgcagctgatcttcctggtggacagcaaccccttccccttcggctacatcagcaactacacagtgtccaccaaggccccacccaccccacccacccccctgtggagcagccccaggcctccttctgtgctgtggagcccctggacagctgccaccctgcggcccggctgcatctgcagcagcaccatccgctgctggacagccaccacctgcctgaggaacctgagccccacctggcagagcacctacaccaggagccctggccccatgagcaccacagcccggctggccggcggcagcgcccagagccacagccgggtgctgaccaccggccccacccccagcagcttccccagaggagctgagacccagaggggcgtgaccatctag

SEQ ID NO: 164594 - DNA, 12909 bp, synthetic construct
  misc_feature 1..12909: note = Description of Artificial Sequence: Synthetic coding sequence
  source 1..12909: mol_type = other DNA
atgcccccagctgccccagcccggctggccctggccctgggcctgggcctgtggctgggcgccctggccggcggccctggccggggctgcggcccctgtgagcccccctgcctgtgtggccctgcccctggagctgcctgccgggtgaactgcagcggccggggcctgcggaccctgggccctgccctgcgcatcccagcagatgccacagccctggatgtgagccacaacctgctgcgggccctggatgtgggcctgctggccaacctgagcgccctggccgagctggacatcagcaacaacaagatcagcaccctggaggagggcatctttgccaacctcttcaacctgtctgagatcaacctgagcggcaacccctttgaatgtgactgtggcctggcctggctgccccgctgggccgaggagcagcaggtgcgggtggtgcagcctgaggccgccacctgtgccggccctggcagcctggccggccagcccctgctgggcatccccctgctggacagcggctgtggggaggagtatgtggcctgcctgcctgacaacagcagcggcaccgtggccgctgtgtccttctctgctgcccacgagggcctgctgcagcctgaggcctgcagcgccttctgcttcagcacaggccagggcctggccgccctgtctgagcagggctggtgcctgtgtggggccgcccagcccagcagcgccagctttgcctgcctgagcctgtgcagcggccccccacctcctccagcccccacctgccggggccccaccctgctgcagcacgtgtttcctgccagccctggggccaccctggtgggcccccacggccccctggccagcggccagctggccgccttccacatcgccgcccccctgcctgtgacagccacccgctgggactttggagatggcagcgctgaggtggatgctgctggccctgctgccagccacagatatgtgctgcccggccgctaccacgtgacagctgtgctggccctgggcgccggcagcgccctgctgggcacagatgtgcaggtggaggccgccccagctgccctggagctggtgtgccccagctctgtgcagagtgatgagagcctggacctgagcatccagaacagaggaggcagcggcctggaggccgcctacagcatcgtggccctgggggaggagcccgcccgggctgtgcaccccctgtgccccagcgacacagagatcttccctggaaatggccactgctaccgcctggtggtggagaaggccgcctggctgcaggcccaggagcagtgccaggcctgggccggggccgccctggccatggtggacagccctgctgtgcagcgcttcctggtgtcccgggtgaccaggagcctggatgtgtggattggcttcagcacagtgcagggcgtggaggtgggccctgccccccagggcgaggccttcagcctggagagctgccagaactggctgcctggagagccccacccagccacagctgagcactgtgtgcggctgggccccaccggctggtgcaacacagacctgtgcagcgccccccacagctatgtgtgtgagctgcagcccggcggccctgtgcaggatgctgagaacctgctggtgggcgcccccagcggggacctgcagggccccctgacccccctggcccagcaggacggcctgagcgcccctcatgagcctgtggaggtgatggtgtttcctggcctgcggctgagccgggaggccttcctgaccacagctgagtttggcacccaggagctgcggcggcctgcccagctgcggctgcaggtgtaccgcctgctgagcacagctggcaccccagaaaatggaagtgagcctgagagccgcagcccagacaacagaacccagctggccccagcctgcatgcctgggggccgctggtgccctggggccaacatctgcctgcccctggatgccagctgccacccccaggcctgtgccaacggctgcaccagcggccctggcctgcccggggccccctatgccctgtggagggagttcctgttctctgtgcctgctggccccccagcccagtacagcgtgaccctgcacggccaggatgtgctgatgctgcccggggacctggtgggcctgcagcatgatgctggccctggggccctgctgcactgcagccctgcccctggccaccctggcccccgggccccctacctgagcgccaatgccagctcctggctgccccacctgcctgcccagctggagggcacctgggcctgcccagcctgtgccctgcggctgctggccgccacagagcagctgactgtgctgctgggcctgcggcccaaccctggcctgcggctgcccggccgctatgaggtgcgggcagaggtgggcaatggagtgagccgccacaacctgagctgcagctttgatgtggtgtcccctgtggccggcctgcgggtcatctacccagcccccagagatggccgcctgtatgtgcccaccaatggaagtgccctggtgctgcaggtggacagcggggccaatgccacagccacagcccgctggccaggcggctctgtgtctgccaggtttgaaaatgtgtgcccagccctggtggccacctttgtgcccggctgcccctgggagaccaatgacaccctcttctctgtggtggccctgccctggctgtctgagggggagcacgtggtggatgtggtggtggagaacagcgccagccgggccaacctgagcctgcgggtgacagctgaggagcccatctgtggcctgcgggccacccccagccctgaggcccgggtgctgcagggcgtgctggtgcgctacagccctgtggtggaggccggcagtgacatggtgttccgctggaccatcaatgacaagcagagcctgaccttccagaatgtggtgttcaacgtcatctaccagagcgctgctgtgttcaagctgagcctgacagccagcaaccacgtgtccaatgtgacagtgaactacaacgtgacagtggagaggatgaacaggatgcagggcctgcaggtgtccacagtgcctgctgtgctgagccccaatgccaccctggccctgacagctggggtgctggtggacagcgctgtggaggtggccttcctgtggacctttggagatggagagcaggccctgcaccagttccagcccccctacaatgaaagcttccctgtgcctgaccccagcgtggcccaggtgctggtggagcacaacgtgatgcacacctacgccgcccctggagagtacctgctgactgtgctggccagcaatgcctttgagaacctgacccagcaggtgcctgtgtctgtgcgggccagcctgcccagcgtggccgtgggcgtgtctgatggagtgctggtggccggccggcctgtgaccttctacccccaccccctgcccagccctgggggcgtgctgtacacctgggactttggagatggcagccctgtgctgacccagagccagcctgctgccaaccacacctacgccagccggggcacctaccacgtgcggctggaggtgaacaacacagtgtctggagctgctgcccaggctgatgtgcgggtgtttgaggagctgcggggcctgtctgtggacatgagcctggccgtggagcagggcgcccctgtggtggtgtctgctgctgtgcagacaggagacaacatcacctggacctttgacatgggagatggcaccgtgctgagcggccctgaggccaccgtggagcacgtgtacctgcgggcccagaactgcaccgtgacagtgggcgccgccagccctgctggccacctggcccggagcctgcacgtgctggtgtttgtgctggaggtgctgcgggtggagcctgctgcctgcatccccacccagccagatgcccggctgacagcctacgtgacaggcaacccagcccactacctgtttgactggacctttggagatggcagcagcaacaccaccgtgcggggctgccccaccgtgacccacaacttcaccaggagcggcaccttccccctggccctggtgctgagcagccgggtgaacagagcccactacttcaccagcatctgtgtggagcctgaggtgggcaatgtgaccctgcagcctgagcggcagtttgtgcagctgggagatgaggcctggctggtggcctgtgcctggccacccttcccctaccgctacacctgggactttggaacagaggaggccgcccccacccgggcccggggccctgaggtgaccttcatctacagagaccccggcagctacctggtgacagtgacagccagcaacaacatctctgctgccaatgattctgccctggtggaggtgcaggagcctgtgctggtgaccagcatcaaggtgaatggcagcctgggcctggagctgcagcagccctacctgttctctgctgtgggccggggccgcccagccagctacctgtgggacctgggagatggcggctggctggagggccctgaggtgacccacgcctacaacagcactggagacttcaccgtgcgggtggccggctggaatgaggtgagccgctctgaggcctggctgaatgtgacagtgaagagaagagtgcggggcctggtggtgaatgccagcaggacagtggtgcccctgaatggatctgtgtccttcagcaccagcctggaggccggcagtgatgtgcgctacagctgggtgctgtgtgaccgctgcacccccatccctgggggccccaccatctcctacaccttccgctctgtgggcaccttcaacatcatcgtgacagcagaaaatgaggtgggcagcgcccaggacagcatctttgtgtatgtgctgcagctgattgagggcctgcaggtggtgggcggcggccgctacttccccaccaaccacacagtgcagctgcaggccgtggtgagagatggcaccaacgtgtcctacagctggacagcctggagggaccggggccctgccctggccggcagcggcaagggcttcagcctgactgtgctggaggccggcacctaccacgtgcagctgcgggccaccaacatgctgggcagcgcctgggccgactgcaccatggactttgtggagcctgtgggctggctgatggtggccgccagccccaacccagctgctgtgaacacctctgtgaccctgtctgctgagctggccggcggcagcggcgtggtgtacacctggagcctggaggagggcctgtcctgggagaccagcgagcccttcaccacccacagcttccccaccccaggcctgcacctggtgaccatgacagctggcaaccccctgggcagcgccaatgccaccgtggaggtggatgtgcaggtgcctgtgtctggcctgagcatccgggccagcgagcccggcggcagctttgtggccgccggcagctctgtgcccttctggggccagctggccaccggcaccaacgtgtcctggtgctgggccgtgcctgggggcagcagcaagaggggcccccacgtgaccatggtgtttcctgatgctggcaccttcagcatccggctgaatgccagcaatgctgtgtcctgggtgtctgccacctacaacctgacagctgaggagcccatcgtgggcctggtgctgtgggccagcagcaaggtggtggcccctggccagctggtgcacttccagatcctgctggccgccggcagcgctgtgaccttccggctgcaggtgggcggggccaaccctgaggtgctgcccggcccccgcttcagccacagcttcccccgggtgggggaccacgtggtgtctgtgcggggcaagaaccacgtgtcctgggcccaggcccaggtgagaattgtggtgctggaggccgtgtctggcctgcaggtgcccaactgctgtgagcccggcatcgccaccggcacagagaggaacttcaccgcccgggtgcagaggggcagccgggtggcctatgcctggtacttcagcctgcagaaggtgcagggcgacagcctggtgatcctgagcggcagagatgtgacctacacccctgtggccgccggcctgctggagatccaggtgcgggccttcaatgccctgggctctgaaaatagaaccctggtgctggaggtgcaggatgctgtgcagtatgtggccctgcagagcggcccctgcttcaccaacagaagtgcccagtttgaagctgccaccagccccagcccccggcgggtggcctaccactgggactttggagatggcagccctggccaggacacagatgagcccagggctgagcacagctacctgcggcctggggactacagagtgcaggtgaatgccagcaacctggtgtccttctttgtggcccaggccaccgtgacagtgcaggtgctggcctgccgggagcctgaggtggatgtggtgctgcccctgcaggtgctgatgaggaggagccagaggaactacctggaggcccacgtggacctgcgggactgtgtgacctaccagacagagtaccgctgggaggtgtacagaacagccagctgccagaggcctggccgcccagcccgggtggccctgcccggggtggatgtgtcccggccccggctggtgctgccccggctggccctgcctgtgggccactactgctttgtgtttgtggtgtcctttggagacacccccctgacccagagcatccaggccaacgtgacagtggcccctgagcggctggtgcccatcatcgagggcggcagctacagagtgtggagcgacacccgggacctggtgctggatggcagcgagagctatgaccccaacctggaggatggagaccagacccccctgtccttccactgggcctgtgtggccagcacccagcgggaggccggcggctgtgccctgaactttggcccccggggcagcagcacagtgaccatcccccgggagcggctggccgccggcgtggagtacaccttcagcctgactgtgtggaaggccggcaggaaggaggaggccaccaaccagacagtgctgatccgcagcggccgggtgcccatcgtgtccctggagtgtgtgtcctgcaaggcccaggccgtgtatgaggtgagccgcagcagctatgtgtacctggagggccgctgcctgaactgcagcagcggcagcaagaggggccgctgggccgcccggaccttcagcaacaagaccctggtgctggatgagaccaccaccagcacaggcagcgctggcatgaggctggtgctgcggcggggcgtgctgagagatggagagggctacaccttcaccctgactgtgctgggccgcagcggggaggaggagggctgtgccagcatccggctgagccccaaccggccccccctgggcggcagctgccgcctcttccccctgggcgctgtgcacgccctgaccaccaaggtgcactttgagtgcaccggctggcatgatgctgaagatgctggggcccccctggtgtatgccctgctgctgcggcgctgccggcagggccactgtgaggagttctgtgtgtacaagggcagcctgagcagctatggagctgtgctgcccccaggcttccggccccactttgaggtgggcctggccgtggtggtgcaggaccagctgggcgctgctgtggtggccctgaacagaagcctggccatcaccctgcctgagcccaacggcagcgccaccggcctgactgtgtggctgcacggcctgacagcctctgtgctgcccggcctgctgcggcaggccgacccccagcacgtgattgagtacagcctggccctggtgacagtgctgaatgaatatgaaagagccctggatgtggccgctgagcccaagcatgagcggcagcaccgggcccagatcaggaagaacatcacagagaccctggtgtccctgcgggtgcacacagtggatgacatccagcagattgctgctgccctggcccagtgcatgggccccagccgggagctggtgtgccgcagctgcctgaagcagaccctgcacaagctggaggccatgatgctgatcctgcaggccgagaccacagctggcaccgtgacccccacagccatcggggacagcatcctgaacatcaccggggacctgatccacctggccagcagtgatgtgcgggccccccagcccagcgagctgggcgctgagagccccagcaggatggtggccagccaggcctacaacctgaccagcgccctgatgaggatcctgatgaggagccgggtgctgaatgaggagcccctgaccctggccggggaggagatcgtggcccagggcaagagaagtgaccccaggagcctgctgtgctacggcggggcccctggccctggctgccacttcagcatccctgaggccttcagcggggccctggccaacctgagtgatgtggtgcagctgatcttcctggtggacagcaaccccttccccttcggctacatcagcaactacacagtgtccaccaaggtggcctccatggccttccagacccaggccggggcccagatccccatcgagcggctggccagcgagcgggccatcaccgtgaaggtgcccaacaacagcgactgggccgcccggggccacaggagcagcgccaacagcgccaacagcgtggtggtgcagccccaggcctctgtgggcgctgtggtgaccctggacagcagcaacccagctgctggcctgcacctgcagctgaactacaccctgctggatggccactacctgtctgaggagcctgagccctacctggccgtgtacctgcacagcgagccccggcccaatgagcacaactgcagcgccagccgccgcatccggcctgagagcctgcagggcgctgaccaccggccctacaccttcttcatcagccctggcagccgggaccctgctggcagctaccacctgaacctgagcagccacttccgctggagcgccctgcaggtgtctgtgggcctgtacaccagcctgtgccagtacttcagcgaggaggacatggtgtggaggacagagggcctgctgcccctggaggagaccagcccccggcaggccgtgtgcctgaccaggcacctgacagcctttggagccagcctgtttgtgccccccagccacgtgcgctttgtgtttcctgagcccacagcagatgtgaactacatcgtgatgctgacctgtgctgtgtgcctggtgacctacatggtgatggccgccatcctgcacaagctggaccagctggatgccagccggggccgggccatccccttctgtggccagaggggccgcttcaagtatgagatcctggtgaagacaggctggggccggggcagcggcaccacagcccacgtgggcatcatgctgtatggagtggacagccgcagcggccaccgccacctggatggagaccgggccttccacaggaacagcctggacatcttccgcatcgccaccccccacagcctgggctctgtgtggaagatccgggtgtggcatgacaacaagggcctgagccctgcctggttcctgcagcacgtgattgtgcgggacctgcagacagcccggagcgccttcttcctggtgaatgactggctgtctgtggagacagaggccaacggcggcctggtggagaaggaggtgctggccgccagtgatgctgccctgctgcgcttccggcggctgctggtggccgagctgcagaggggcttctttgacaagcacatctggctgagcatctgggaccggccccccaggagccgcttcacccgcatccagagggccacctgctgcgtgctgctgatctgcctcttcctgggcgccaatgctgtgtggtatggagctgtgggggacagcgcctacagcactggacatgtgtcccggctgagccccctgtctgtggacacagtggccgtgggcctggtgtcctctgtggtggtgtaccctgtgtacctggccatcctcttcctgttcaggatgagccgcagcaaggtggccggcagccccagccccaccccagctggccagcaggtgctggacatcgacagctgcctggacagctctgtgctggacagcagcttcctgaccttcagcggcctgcacgccgaggcctttgtgggccagatgaagagtgacctcttcctggatgacagcaagagcctggtgtgctggcccagcggggagggcaccctgtcctggccagacctgctgagtgaccccagcatcgtgggcagcaacctgcggcagctggcccggggccaggccggccacggcctgggcccagaagaagatggcttcagcctggccagcccctacagccctgccaagagcttcagcgccagtgatgaagatctcatccagcaggtgctggccgagggcgtgagcagccctgcccccacccaggacacccacatggagacagacctgctgagcagcctgagcagcaccccaggagagaagacagagaccctggccctgcagaggctgggggagctgggcccccccagccctggcctgaactgggagcagccccaggccgcccggctgagcaggacaggcctggtggagggcctgaggaagaggctgctgcctgcctggtgtgccagcctggcccacggcctgagcctgctgctggtggccgtggccgtggccgtgtctggctgggtgggcgccagcttccccccaggagtgtctgtggcctggctgctgagcagcagcgccagcttcctggccagcttcctgggctgggagcccctgaaggtgctgctggaggccctgtacttcagcctggtggccaagaggctgcacccagatgaagatgacaccctggtggagagccctgctgtgacccctgtgtctgcccgggtgccccgggtgcggccccctcatggctttgccctcttcctggccaaggaggaggccaggaaggtgaagaggctgcacggcatgctgcggagcctgctggtgtacatgctgttcctgctggtgaccctgctggccagctatggagatgccagctgccacggccacgcctaccgcctgcagagcgccatcaagcaggagctgcacagccgggccttcctggccatcaccaggtctgaggagctgtggccctggatggcccacgtgctgctgccctacgtgcacggcaaccagagcagccctgagctgggccccccccggctgcggcaggtgcggctgcaggaggccctgtacccagaccccccaggcccccgggtgcacacctgcagcgctgctgggggcttcagcaccagtgactatgatgtgggctgggagagcccccacaatggaagtggcacctgggcctacagcgccccagacctgctgggcgcctggagctggggcagctgtgctgtgtatgattctgggggctacgtgcaggagctgggcctgagcctggaggagagccgggaccggctgcgcttcctgcagctgcacaactggctggacaacagaagcagagctgtgttcctggagctgacccgctacagccctgctgtgggcctgcacgccgctgtgaccctgcggctggagttccctgctgctggccgggccctggccgccctgtctgtgcggccctttgccctgcggcggctgtctgctggcctgagcctgcccctgctgacctctgtgtgcctgctgctgtttgctgtgcactttgctgtggccgaggcccggacctggcaccgggagggccgctggagggtgctgcggctgggcgcctgggcccgctggctgctggtggccctgacagctgccacagccctggtgcggctggcccagctgggcgctgctgaccggcagtggaccaggtttgtgcggggccggccccggcgcttcaccagctttgaccaggtggcccagctgagcagcgctgcccggggcctggccgccagcctgctcttcctgctgctggtgaaggccgcccagcagctgcgctttgtgcggcagtggagcgtgtttgggaagaccctgtgccgggccctgcctgagctgctgggcgtgaccctgggcctggtggtgctgggcgtggcctatgcccagctggccatcctgctggtgagcagctgtgtggacagcctgtggagcgtggcccaggccctgctggtgctgtgccccggcaccggcctgagcaccctgtgcccagctgagagctggcacctgagccccctgctgtgtgtgggcctgtgggccctgcggctgtggggcgccctgcggctgggcgccgtcatcctgcgctggagataccacgccctgcggggggagctgtacagacctgcctgggagccccaggactatgagatggtggagctgttcctgcggcggctgcggctgtggatgggcctgagcaaggtgaaggagttccgccacaaggtgcgctttgagggcatggagcccctgcccagccgcagcagccggggcagcaaggtgtccccagatgtgcccccacccagcgctggcagtgatgccagccaccccagcaccagcagcagccagctggatggcctgtctgtgtccctgggccgcctgggcacccgctgtgagcctgagcccagccggctgcaggccgtgtttgaggccctgctgacccagtttgaccggctgaaccaggccacagaagatgtgtaccagctggagcagcagctgcacagcctgcagggccgccgcagcagccgggccccagctggcagcagccggggccccagccctggcctgcggcctgccctgcccagccggctggcccgggccagcagaggagtggacctggccaccggccccagcaggacccccctgcgggccaagaacaaggtgcaccccagcagcacctag

SEQ ID NO: 164595 - DNA, 8550 bp, synthetic construct
  misc_feature 1..8550: note = Description of Artificial Sequence: Synthetic coding sequence
  source 1..8550: mol_type = other DNA
atggccgaggaggccgcccagaacatcagtgatgaccaggagcgctgcctgcaggccgcctgctgcctgagctttggaggagagctgtctgtgtccacagacaagtcctggggcctgcacctgtgcagctgcagccccccaggcggcggcctgtgggtggaggtgtatgccaaccacgtgctgctgatgtctgatggaaaatgtggctgcccctggtgtgccctgaatggcaaggccgaggaccgggagagccagagccccagcagcagcgccagccggcagaagaacatctggaagaccaccagcgaggccgccctgtctgtggtgaatgagaagacccaggccgtggtgaatgagaagacccaggcccccctggactgtgacaacagcgctgaccgcatcccccacaagcccttcatcatcatcgcccgggcctggagcagcggcggcccccgcttccaccaccggcggctgtgtgccactggaacagctgacagcaccttcagcgccctgctgcagctgcagggcaccaccagcgctgctgccccctgcagcctgaagatggaggccagctgctgcgtgctgcggctgctgtgctgtgccgaggatgtggccaccggcctgctgcccggcaccgtgaccatggagacccccaccaaggtggcccggcccacccagaccagcagccagagggtgcccctgtggcccatcagccacttccccaccagccccaggagcagccacggcctgcccccaggcatccccaggacccccagcttcaccgccagccagagcggcagcgagatcctgtacccacccacccagcacccccctgtggccatcctggccaggaacagcgacaacttcatgaaccctgtgctgaactgcagcctggaggtggaggcccgggccccacccaacctgggcttccgggtgcacatggccagcggggaggccctgtgcctgatgatggactttggagacagcagcggcgtggagatgaggctgcacaacatgtctgaggccatggctgtgacagcctaccaccagtacagcaagggcatcttcttccacctgctgcacttccagctggacatgagcacctacaaggaggccgagacccagaacaccaccctgaatgtgtacctgtgccagagcgagaacagctgcctggaggacagcgaccccagcaacctgggctatgagctgatcagcgcctttgtgaccaagggcgtgtacatgctgaaggctgtgatctacaatgagttccacggcacagaggtggagctgggcccctactacgtggagattggacatgaagctgtgtctgccttcatgaacagcagctctgtgcatgaagatgaggtgctggtgtttgctgacagccaggtgaaccagaagagcacagtggtgatccaccacttccccagcatccccagctacaacgtgtccttcatcagccagacccaggtgggggacagccaggcctggcacagcatgacagtgtggtacaagatgcagagcgtgtctgtgtacaccaacggcaccgtgtttgccacagacacagacatcaccttcaccgctgtgaccaaggagaccatccccctggagtttgagtggtactttggagaggacccccctgtgaggaccaccagccgcagcatcaagaagaggctgagcatcccccagtggtacagagtgatggtgaaggccagcaacaggatgagctctgtggtgtctgagccccacgtgatccgggtgcagaagaagatcgtggccaaccggctgaccagccccagcagcgccctggtgaatgcctctgtggcctttgagtgctggatcaactttggaacagatgtggcctacctgtgggactttggagatggcaccgtgtccctgggcagcagcagcagcagccacgtgtacagccgggagggggagttcaccgtggaggtgctggccttcaacaacgtgtctgccagcaccctgcggcagcagctgttcatcgtgtgtgagccctgccagccccccctggtgaagaacatgggccctgggaaggtgcagatctggaggagccagcctgtgcggctgggcgtgacctttgaagctgctgtgttctgtgacatcagccagggcctgagctacacctggaacctgatggacagcgagggcctgcctgtgtccctgcctgctgctgtggacacccaccggcagaccctcatcctgcccagccacaccctggagtatggcaactacacagccctggccaaggtgcagatcgagggctctgtggtgtacagcaactactgtgtgggcctggaggtgcgggcccaggcccctgtgtctgtcatcagcgagggcacccacctgttcttcagcaggaccaccagcagccccatcgtgctgcggggcacccagagctttgatcctgatgatcctggggccaccctgcgctaccactgggagtgtgccacagctggcagccctgcccacccctgctttgacagcagcacagcccaccagctggatgctgctgcccccaccgtgtcctttgaggcccagtggctgagtgacagctatgaccagttcctggtgatgctgcgggtgtcctctgggggcaggaacagcagcgagaccagggtcttcctgagcccctacccagattctgccttccgctttgtgcacatctcctgggtgtccttcaaggacacctttgtgaactggaatgatgagctgagcctgcaggccatgtgtgaggactgcagcgagatccccaacctgagctacagctgggacctcttcctggtgaatgccacagagaagaaccgcatcgaggtgcccttctgccgggtggtgggcctgctgggcagcctgggcctgggcgccatcagcgagagcagccagctgaacctgctgcccacagagcccggcacagctgaccctgatgccaccaccacccccttcagccgggagcccagccctgtgaccctgggccagcctgccaccagcgccccccggggcacccccacagagcccatgactggagtgtactggatccccccagctggggacagcgctgtgctgggggaggcccctgaggagggcagcctggacctggagcccggcccccagagcaagggcagcctgatgacaggccgctctgagaggagccagcccacccacagcccagacccccacctgagtgactttgaggcctactacagcgacatccaggaggccatccccagcggcggccggcagcctgccaaggacaccagcttccctggcagcggccccagcctgtctgctgaggagagccctggagatggagacaacctggtggaccccagcctgtctgctggccgggcagagcctgtgctgatgattgactggcccaaggccctgctgggccgggctgtgttccagggctacagcagcagcggcatcacagagcagacagtgaccatcaagccctacagcctgagcagtggagagacctacgtgctgcaggtgtctgtggccagcaagcacggcctgctgggcaaggcccagctgtacctgactgtgaacccagccccccgggacatggcctgccaggtgcagccccaccacggcctggaggcccacacagtgttttctgtgttctgcatgtctgggaagccagacttccactatgagttctcctaccagatcggcaacaccagcaagcacaccctgtaccacggccgggacacccagtactactttgtgctgcctgctggggagcacctggacaactacaaggtgatggtgtccacagagatcacagatggcaagggcagcaaggtgcagccctgcaccgtggtggtgacagtgctgccccgctaccacggcaatgactgcctgggagaagatctctacaacagcagcctgaagaacctgagcaccctgcagctgatgggcagctacacagagatccggaactacatcaccgtcatcacccgcatcctgagccggctgagcaaggaggacaagacagccagctgcaaccagtggagccgcatccaggatgccctgatcagctctgtgtgccgcctggcctttgtggaccaggaggagatgattggctctgtgctgatgctgcgggacctggtgtccttcagcaacaagctgggcttcatgtctgctgtgctgatcctgaagtacacccgggccctgctggcccagggccagttcagcggcccctttgtgattgacaagggcgtgcggctggagctgattggcctcatcagccgggtgtgggaggtgtctgagcaggagaacagcaaggaggaggtgtacagacatgaggagggcatcaccgtcatcagtgacctgctgctgggctgcctgagcctgaaccacgtgtccacaggccagatggagttccgcaccctgctgcactacaacctgcagagctctgtgcagagcctgggctctgtgcaggtgcacctgcccggggacctggccggccacagccctgctggagctgagacccagagcccctgctacatcagccagctgatcctcttcaagaagaacccctacccaggcagccaggcccctggccagattggaggagtggtgggcctgaacctgtacacctgcagcagcagaagacccatcaaccggcagtggctgaggaagcctgtgatggtggagtttggagaggaggatggcctggacaacagaagaaacaagaccacctttgtgctgctgcgggacaaggtgaacctgcaccagttcacagagctgtctgagaacccccaggagagcctgcagattgaaattgagttcagcaagcctgtgacccgggccttccctgtgatgctgctggtgcgcttcagcgagaagcccacccccagcgacttcctggtgaagcagatctacttctgggatgagagcatcgtgcagatctacatcccagctgccagccagaaggatgcctctgtgggctacctgagcctgctggatgctgactatgacaggaagccacccaaccgctacctggccaaggctgtgaactacacagtgcacttccagtggatccgctgcctcttctgggacaagcgggagtggaagtctgagcgcttcagcccccagcccggcaccagccctgagaaggtgaactgcagctaccaccggctggccgcctttgccctgctgcggaggaagctgaaggccagctttgaggtgtctgacatcagcaagctgcagagccaccctgagaacctgctgcccagcatcttcatcatgggcagcgtcatcctgtatggcttcctggtggccaagagccggcaggtggaccaccacgagaagaagaaggccggctacatcttcctgcaggaggccagcctgcccggccaccagctgtatgctgtggtgattgacaccggcttccgggccccagcccggctgaccagcaaggtgtacatcgtgctgtgtggggacaatggcctgtctgagaccaaggagctgagctgcccagagaagcccctgtttgagaggaacagccgccacaccttcatcctgagcgccccagcccagctgggcctgctgaggaagatccggctgtggcatgacagccggggccccagccctggctggttcatcagccacgtgatggtgaaggagctgcacacaggccagggctggttcttccctgcccagtgctggctgtctgctggaagacatgatggccgggtggagcgggagctgacctgcctgcagggcggcctgggcttcaggaagctgttctactgcaagttcacagagtacctggaggacttccacgtgtggctgtctgtgtacagccggcccagcagcagccgctacctgcacaccccccggctgactgtgtccttcagcctgctgtgtgtgtatgcctgcctgacagccctggtggccgccggcggccaggagcagccccacctggatgtgagccccaccctgggcagcttccgggtgggcctgctgtgcaccctgctggccagccctggggcccagctgctgagcctgctcttccggctgagcaaggaggcccctggcagcgcccgggtggagccccacagccccctgcggggcggggcccagacagaggccccccacggccccaacagctggggccgcatcccagatgcccaggagcccaggaagcagcctgccagcgccatcctgagcggcagcggccgggcccagaggaaggccgccagtgacaatggaacagcctgcccagcccccaagctgcaggtgcatggagctgaccacagcaggaccagcctgatgggcaagagccactgctgccccccccacacccaggcccccagcagcggcctggagggcctgatgccccagtggagccgggccctgcagccctggtggagcagcgctgtgtgggccatctgtggcacagccagcctggcctgcagcctgggcaccggcttcctggcctacagatttggccaggagcagtgtgtgcagtggctgcacctgctgagcctgtctgtggtgtgctgcatcttcatcacccagcccctgatggtgtgcctgatggccctgggctttgcctggaagagaagagctgacaaccacttcttcacagagagcctgtgtgaggccacccgggacctggacagcgagctggccgagaggtcctggacccggctgcccttcagcagcagctgcagcatcccagactgtgccggggaggtggagaaggtgctggccgcccggcagcaggcccggcacctgcgctgggcccacccccccagcaaggcccagctgcggggcacccggcagaggatgagaagagagagcaggacccgggccgccctgcgggacatctccatggacatcctgatgctgctgctgctgctgtgtgtgatctacggccgcttcagccaggatgagtacagcctgaaccaggccatcaggaaggagttcaccagaaatgccaggaactgcctgggcggcctgaggaacattgctgactggtgggactggagcctgaccaccctgctggatggcctgtacccaggcggcacccccagcgcccgggtgcctggggcccagcccggggccctgggcggcaagtgctacctgattggcagcagcgtcatccggcagctgaaggtgttccccaggcacctgtgcaagccaccccggcccttcagcgccctgattgaagattccatccccacctgcagccctgaggtgggcggccctgagaacccctacctgattgatcctgagaaccagaatgtgaccctgaatggacctgggggctgcggcacccgggaggactgtgtgctgagcctgggccgcaccaggacagaggcccacacagccctgagccggctgcgggcctccatgtggattgacaggagcaccagggctgtgtctgtgcacttcaccctgtacaacccccccacccagctgttcacctctgtgtccctgcgggtggagatcctgcccaccggcagcctggtgcccagcagcctggtggagagcttcagcatcttcagaagtgacagcgccctgcagtaccacctgatgctgccccagctggtgttcctggccctgagcctcatccacctgtgtgtgcagctgtacaggatgatggacaagggcgtgctgagctactggaggaagcccaggaactggctggagctgtctgtggtgggcgtgtccctgacctactatgctgtgtctggccacctggtgaccctggccggagatgtgaccaaccagttccaccggggcctgtgccgggccttcatggacctgaccctgatggcctcctggaaccagagggcccgctggctgcggggcatcctgctcttcctgttcaccctgaagtgtgtgtacctgcccggcatccagaacaccatggccagctgcagctccatgatgaggcacagcctgcccagcatctttgtggccggcctggtgggcgccctgatgctggccgccctgagccacctgcaccgcttcctgctgtccatgtgggtgctgcccccaggcaccttcacagatgccttccctggcctgctcttccacttccccaggaggagccagaaggactgcctgctgggcctgagcaagagtgaccagagggccatggcctgctacttcggcatcctgctgattgtgtctgccaccctgtgcttcggcatgctgcggggcttcctgatgaccctgccccagaagaggaagagcttccagagcaagagctttgtgcggctgaaggatgtgacagcctacatgtgggagaaggtgctgaccttcctgcggctggagacccccaagctggaggaggccgagatggtggagaaccacaactactacctggatgaatttgccaacctgctggatgagctgctgatgaagatcaatggcctgagtgacagcctgcagctgcccctgctggagaagaccagcaacaacacaggagaggccaggacagaggagagccccctggtggacatcagcagctaccaggccgctgagcctgctgacatcaaggacttctag

SEQ ID NO: 164596 - DNA, 495 bp, synthetic construct
  misc_feature 1..495: note = Description of Artificial Sequence: Synthetic coding sequence
  source 1..495: mol_type = other DNA
tgagtgggcggccctgagaacccctacctgattgatcctgagaaccagaatgtgaccctgaatggacctgggggctgcggcacccgggaggactgtgtgctgagcctgggccgcaccaggacagaggcccacacagccctgagccggctgcgggcctccatgtggattgacaggagcaccagggctgtgtctgtgcacttcaccctgtacaacccccccacccagctgttcacctctgtgtccctgcgggtggagatcctgcccaccggcagcctggtgcccagcagcctggtggagagcttcagcatcttcagaagtgacagcgccctgcagtaccacctgatgctgccccagctggtgttcctggccctgagcctcatccacctgtgtgtgcagctgtacaggatgatggacaagggcgtgctgagctactggaggaagcccaggaactggctggaggtggccagcctggtgtccttctcctttgagaagtag

SEQ ID NO: 164597 - DNA, 2907 bp, synthetic construct
  misc_feature 1..2907: note = Description of Artificial Sequence: Synthetic coding sequence
  source 1..2907: mol_type = other DNA
atggtgaacagcagccgggtgcagccccagcagcctggagatgccaagaggcccccagccccccgggccccagaccccggccgcctgatggccggctgtgccgctgtgggcgccagcctggccgcccctgggggcctgtgtgagcagaggggcctggagattgagatgcagaggatccggcaggccgccgcccgggaccccccagctggagctgctgccagccccagcccccccctgagcagctgcagccggcaggcctggagccgggacaaccctggctttgaggccgaggaggaggaggaggaggtggagggggaggagggcggcatggtggtggagatggatgtggagtggaggcctggcagcagaagatctgctgccagcagcgctgtgtcctctgtgggcgcccggagccggggcctgggcggctaccatggagctggccaccccagcggcagaagaagaagaagagaggaccagggccccccctgccccagccctgtgggcggcggggaccccctgcaccgccacctgcccctggagggccagcccccccgggtggcctgggccgagcggctggtgcggggcctgcggggcctgtggggcacccggctgatggaggagagcagcaccaaccgggagaagtacctgaagtctgtgctgcgggagctggtgacctacctgctcttcctgattgtgctgtgcatcctgacctacggcatgatgagcagcaatgtgtactactacaccaggatgatgagccagctgttcctggacacccctgtgtccaagacagagaagaccaacttcaagaccctgagctccatggaggacttctggaagttcacagagggcagcctgctggatggcctgtactggaagatgcagcccagcaaccagacagaagctgacaacagaagcttcatcttctatgagaacctgctgctgggcgtgccccgcatccggcagctgcgggtgagaaatggcagctgcagcatcccccaggacctgagagatgagatcaaggaatgttatgatgtgtacagcgtgtccagtgaagatcgggcccccttcggccccagaaatggaacagcctggatctacaccagcgagaaggacctgaatggcagcagccactggggcatcatcgccacctacagcggggccggctactacctggacctgagcaggacccgggaggagacagctgcccaggtggccagcctgaagaagaatgtgtggctggaccggggcacccgggccaccttcatcgacttctctgtgtacaatgccaacatcaacctcttctgtgtggtgcggctgctggtggagttccctgccaccggcggcgtcatccccagctggcagttccagcccctgaagctgatccgctacgtgaccacctttgacttcttcctggccgcctgtgagatcatcttctgcttcttcatcttctactacgtggtggaggagatcctggagatccgcatccacaagctgcactacttccgctccttctggaactgcctggatgtggtgattgtggtgctgtctgtggtggccatcggcatcaacatctaccgcaccagcaatgtggaggtgctgctgcagttcctggaggaccagaacaccttccccaactttgagcacctggcctactggcagatccagttcaacaacattgctgctgtgacagtgttctttgtgtggatcaagctgttcaagttcatcaacttcaacagaaccatgagccagctgagcaccaccatgagccgctgtgccaaggacctgtttggatttgccatcatgttcttcatcatcttcctggcctatgcccagctggcctacctggtgtttggcacccaggtggatgacttcagcaccttccaggagtgcatcttcacccagttccgcatcatcctgggggacatcaactttgctgagattgaggaggccaacagagtgctgggccccatctacttcaccacctttgtgttcttcatgttcttcatcctgctgaacatgttcctggccatcatcaatgacacctacagcgaggtgaagagtgacctggcccagcagaaggccgagatggagctgagtgacctgatcaggaagggctaccacaaggccctggtgaagctgaagctgaagaagaacacagtggatgacatcagcgagagcctgcggcagggcggcggcaagctgaactttgatgagctgcggcaggacctgaagggcaagggccacacagatgctgagattgaggccatcttcaccaagtatgaccaggatggagaccaggagctgacagaacatgagcaccagcagatgagagatgacctggagaaggagcgggaggacctggacctggaccacagcagcctgccccggcccatgagcagccgctccttccccaggagcctggatgacagcgaggaggatgatgatgaggacagcggccacagcagcagaagaagaggcagcatcagcagcggcgtgtcctatgaggagttccaggtgctggtgcggcgggtggacaggatggagcacagcatcggcagcatcgtgtccaagattgatgctgtgattgtgaagctggagatcatggagcgggccaagctgaagagaagagaggtgctgggccgcctgctggatggagtggccgaggatgagcggctgggccgggacagcgagatccaccgggagcagatggagcggctggtgcgggaggagctggagcgctgggagagtgatgatgctgccagccagatcagccacggcctgggcacccctgtgggcctgaatggccagccccggcccaggagcagccggcccagcagcagccagagcacagagggcatggagggcgctggaggaaatggcagcagcaatgtgcacgtgtag

SEQ ID NO: 164598 - DNA, 1161 bp, synthetic construct
  misc_feature 1..1161: note = Description of Artificial Sequence: Synthetic coding sequence
  source 1..1161: mol_type = other DNA
atgagccagctgagcaccaccatgagccgctgtgccaaggacctgtttggatttgccatcatgttcttcatcatcttcctggcctatgcccagctggcctacctggtgtttggcacccaggtggatgacttcagcaccttccaggagtgcatcttcacccagttccgcatcatcctgggggacatcaactttgctgagattgaggaggccaacagagtgctgggccccatctacttcaccacctttgtgttcttcatgttcttcatcctgctgaacatgttcctggccatcatcaatgacacctacagcgaggtgaagagtgacctggcccagcagaaggccgagatggagctgagtgacctgatcaggaagggctaccacaaggccctggtgaagctgaagctgaagaagaacacagtggatgacatcagcgagagcctgcggcagggcggcggcaagctgaactttgatgagctgcggcaggacctgaagggcaagggccacacagatgctgagattgaggccatcttcaccaagtatgaccaggatggagaccaggagctgacagaacatgagcaccagcagatgagagatgacctggagaaggagcgggaggacctggacctggaccacagcagcctgccccggcccatgagcagccgctccttccccaggagcctggatgacagcgaggaggatgatgatgaggacagcggccacagcagcagaagaagaggcagcatcagcagcggcgtgtcctatgaggagttccaggtgctggtgcggcgggtggacaggatggagcacagcatcggcagcatcgtgtccaagattgatgctgtgattgtgaagctggagatcatggagcgggccaagctgaagagaagagaggtgctgggccgcctgctggatggagtggccgaggatgagcggctgggccgggacagcgagatccaccgggagcagatggagcggctggtgcgggaggagctggagcgctgggagagtgatgatgctgccagccagatcagccacggcctgggcacccctgtgggcctgaatggccagccccggcccaggagcagccggcccagcagcagccagagcacagagggcatggagggcgctggaggaaatggcagcagcaatgtgcacgtgtag

SEQ ID NO: 164599 - DNA, 1161 bp, synthetic construct; identical to SEQ ID NO: 164598
  misc_feature 1..1161: note = Description of Artificial Sequence: Synthetic coding sequence
  source 1..1161: mol_type = other DNA

SEQ ID NO: 164600 - DNA, 2418 bp, synthetic construct
  misc_feature 1..2418: note = Description of Artificial Sequence: Synthetic coding sequence
  source 1..2418: mol_type = other DNA
atgaatgctgtgggcagccctgagggccaggagctgcagaagctgggcagcggggcctgggacaacccagcctacagcggcccccccagcccccacggcaccctgcgggtgtgcaccatcagcagcacaggccccctgcagccccagcccaagaagccagaagatgagccccaggagacagcctaccgcacccaggtgagcagctgctgcctgcacatctgccagggcatccggggcctgtggggcaccaccctgacagaaaatacagcagaaaatcgggagctgtacatcaagaccaccctgcgggagctgctggtgtacatcgtgttcctggtggacatctgcctgctgacctacggcatgaccagcagcagcgcctactactacaccaaggtgatgtctgagctgttcctgcacacccccagcgacaccggggtgtccttccaggccatcagctccatggctgacttctgggactttgcccagggccccctgctggacagcctgtactggaccaagtggtacaacaaccagagcctgggccacggcagccacagcttcatctactatgagaacatgctgctgggcgtgccccggctgcggcagctgaaggtgagaaatgacagctgtgtggtgcatgaggacttccgggaggacatcctgagctgctatgatgtgtacagcccagacaaggaggagcagctgcccttcggccccttcaatggaacagcctggacctaccacagccaggatgagctgggcggcttcagccactggggccgcctgaccagctacagcggcggcggctactacctggacctgcccggcagccggcagggcagcgctgaggccctgcgggccctgcaggagggcctgtggctggaccggggcaccagggtggtgttcatcgacttctctgtgtacaatgccaacatcaacctcttctgtgtgctgcggctggtggtggagttccctgccactggaggagccatccccagctggcagatcagaacagtgaagctgatccgctacgtgagcaactgggacttcttcatcgtgggctgtgaggtgatcttctgtgtgttcatcttctactacgtggtggaggagatcctggagctgcacatccaccggctgcgctacctgagcagcatctggaacatcctggacctggtggtgatcctgctgagcatcgtggccgtgggcttccacatcttccgcaccctggaggtgaaccggctgatgggcaagctgctgcagcagcccaacacctacgccgactttgagttcctggccttctggcagacccagtacaacaacatgaatgctgtgaacctcttctttgcctggatcaagatcttcaagtacatctccttcaacaagaccatgacccagctgagcagcaccctggcccgctgtgccaaggacatcctgggctttgctgtgatgttcttcatcgtgttctttgcctatgcccagctgggctacctgctgtttggcacccaggtggagaacttcagcaccttcatcaagtgcatcttcacccagttccgcatcatcctgggggactttgactacaatgccatcgacaatgccaaccgcatcctgggccctgcctactttgtgacctacgtgttctttgtgttctttgtgctgctgaacatgttcctggccatcatcaatgacacctacagcgaggtgaaggaggagctggccggccagaaggatgagctgcagctgagtgacctgctgaagcagggctacaacaagaccctgctgcggctgcggctgaggaaggagcgggtgtctgatgtgcagaaggtgctgcagggcggggagcaggagatccagtttgaggacttcaccaacaccctgcgggagctgggccatgctgagcacgagatcacagagctgacagccaccttcaccaagtttgacagagatggcaaccgcatcctggatgagaaggagcaggagaagatgaggcaggacctggaggaggagcgggtggccctgaacacagaaattgagaagctgggccgcagcatcgtgagcagcccccagggcaagagcggccctgaggccgcccgggccggcggctgggtgtctggagaggagttctacatgctgacccggcgggtgctgcagctggagaccgtgctggagggcgtggtgtcccagattgatgctgtgggcagcaagctgaagatgctggagaggaagggctggctggcccccagccctggggtgaaggagcaggccatctggaagcacccccagcctgccccagctgtgaccccagacccctggggcgtgcagggcggccaggagagcgaggtgccctacaagcgggaggaggaggccctggaggagcggcggctgagcagaggagagatccccaccctgcagaggagctag

SEQ ID NO: 164601 - DNA, 2193 bp, synthetic construct
  misc_feature 1..2193: note = Description of Artificial Sequence: Synthetic coding sequence
  source 1..2193: mol_type = other DNA
atgaatgctgtgggcagccctgagggccaggagctgcagaagctgggcagcggggcctgggacaacccagcctacagcggcccccccagcccccacggcaccctgcgggtgtgcaccatcagcagcacaggccccctgcagccccagcccaagaagccagaagatgagccccaggagacagcctaccgcacccaggtgagcagctgctgcctgcacatctgccagggcatccggggcctgtggggcaccaccctgacagaaaatacagcagaaaatcgggagctgtacatcaagaccaccctgcgggagctgctggtgtacatcgtgttcctggtggacatctgcctgctgacctacggcatgaccagcagcagcgcctactactacaccaaggtgatgtctgagctgttcctgcacacccccagcgacaccggggtgtccttccaggccatcagctccatggctgacttctgggactttgcccagggccccctgctggacagcctgtactggaccaagtggtacaacaaccagagcctgggccacggcagccacagcttcatctactatgagaacatgctgctgggcgtgccccggctgcggcagctgaaggtgagaaatgacagctgtgtggtgcatgaggacttccgggaggacatcctgagctgctatgatgtgtacagcccagacaaggaggagcagctgcccttcggccccttcaatggaacagccctggtggtggagttccctgccaccggcggggccatccccagctggcagatcagaacagtgaagctgatccgctacgtgagcaactgggacttcttcatcgtgggctgtgaggtgatcttctgtgtgttcatcttctactacgtggtggaggagatcctggagctgcacatccaccggctgcgctacctgagcagcatctggaacatcctggacctggtggtgatcctgctgagcatcgtggccgtgggcttccacatcttccgcaccctggaggtgaaccggctgatgggcaagctgctgcagcagcccaacacctatgctgactttgagttcctggccttctggcagacccagtacaacaacatgaatgctgtgaacctcttctttgcctggatcaagatcttcaagtacatctccttcaacaagaccatgacccagctgagcagcaccctggcccgctgtgccaaggacatcctgggctttgctgtgatgttcttcatcgtgttctttgcctatgcccagctgggctacctgctgtttggcacccaggtggagaacttcagcaccttcatcaagtgcatcttcacccagttccgcatcatcctgggggactttgactacaatgccatcgacaatgccaaccgcatcctgggccctgcctactttgtgacctacgtgttctttgtgttctttgtgctgctgaacatgttcctggccatcatcaatgacacctacagcgaggtgaaggaggagctggccggccagaaggatgagctgcagctgagtgacctgctgaagcagggctacaacaagaccctgctgcggctgcggctgaggaaggagcgggtgtctgatgtgcagaaggtgctgcagggcggggagcaggagatccagtttgaggacttcaccaacaccctgcgggagctgggccacgccgagcacgagatcacagagctgacagccaccttcaccaagtttgacagagatggcaaccgcatcctggatgagaaggagcaggagaagatgaggcaggacctggaggaggagcgggtggccctgaacacagaaattgagaagctgggccgcagcatcgtgagcagcccccagggcaagagcggccctgaggccgcccgggccggcggctgggtgtctggagaggagttctacatgctgaccaggagagtgctgcagctggagaccgtgctggagggcgtggtgtcccagattgatgctgtgggcagcaagctgaagatgctggagaggaagggctggctggcccccagccctggggtgaaggagcaggccatctggaagcacccccagcctgccccagctgtgaccccagacccctggggcgtgcagggcggccaggagagcgaggtgccctacaagcgggaggaggaggccctggaggagcggcggctgagcagaggagagatccccaccctgcagaggagctag

SEQ ID NO: 164602 - DNA, 2328 bp, synthetic construct
  misc_feature 1..2328: note = Description of Artificial Sequence: Synthetic coding sequence
  source 1..2328: mol_type = other DNA
atgaatgctgtgggcagccctgagggccaggagctgcagaagctgggcagcggggcctgggacaacccagcctacagcggcccccccagcccccacggcaccctgcgggtgtgcaccatcagcagcacaggccccctgcagccccagcccaagaagccagaagatgagccccaggagacagcctaccgcacccaggtgagcagctgctgcctgcacatctgccagggcatccggggcctgtggggcaccaccctgacagaaaatacagcagaaaatcgggagctgtacatcaagaccaccctgcgggagctgctggtgtacatcgtgttcctggtggacatctgcctgctgacctacggcatgaccagcagcagcgcctactactacaccaaggtgatgtctgagctgttcctgcacacccccagcgacaccggggtgtccttccaggccatcagctccatggctgacttctgggactttgcccagggccccctgctggacagcctgtactggaccaagtggtacaacaaccagagcctgggccacggcagccacagcttcatctactatgagaacatgctgctgggcgtgccccggctgcggcagctgaaggtgagaaatgacagctgtgtggtgcatgaggacttccgggaggacatcctgagctgctatgatgtgtacagcccagacaaggaggagcagctgcccttcggccccttcaatggaacagcctggacctaccacagccaggatgagctgggcggcttcagccactggggccgcctgaccagctacagcggcggcggctactacctggacctgcccggcagccggcagggcagcgctgaggccctgcgggccctgcaggagggcctgtggctggaccggggcaccagggtggtgttcatcgacttctctgtgtacaatgccaacatcaacctcttctgtgtgctgcggctggtggtggagttccctgcccggcgctgccaccccatcctggccaacccccacagccaggccgaccccctgtgccagcagctgttcttcatcgtgggctgtgaggtgatcttctgtgtgttcatcttctactacgtggtggaggagatcctggagctgcacatccaccggctgcgctacctgagcagcatctggaacatcctggacctggtggtgatcctgctgagcatcgtggccgtgggcttccacatcttccgcaccctggaggtgaaccggctgatgggcaagctgctgcagcagcccaacacctacgccgactttgagttcctggccttctggcagacccagtacaacaacatgaatgctgtgaacctcttctttgcctggatcaagatcttcaagtacatctccttcaacaagaccatgacccagctgagcagcaccctggcccgctgtgccaaggacatcctgggctttgctgtgatgttcttcatcgtgttctttgcctatgcccagctgggctacctgctgtttggcacccaggtggagaacttcagcaccttcatcaagtgcatcttcacccagttccgcatcatcctgggggactttgactacaatgccatcgacaatgccaaccgcatcctgggccctgcctactttgtgacctacgtgttctttgtgttctttgtgctgctgaacatgttcctggccatcatcaatgacacctacagcgaggtgaaggaggagctggccggccagaaggatgagctgcagctgagtgacctgctgaagcagggctacaacaagaccctgctgcggctgcggctgaggaaggagcgggtgtctgatgtgcagaaggtgctgcagggcggggagcaggagatccagtttgaggacttcaccaacaccctgcgggagctgggccatgctgagcacgagatcacagagctgacagccaccttcaccaagtttgacagagatggcaaccgcatcctggatgagaaggagcaggagaagatgaggcaggacctggaggaggagcgggtggccctgaacacagaaattgagaagctgggccgcagcatcgtgagcagcccccagggcaagagcggccctgaggccgcccgggccggcggctgggtgtctggagaggagttctacatgctgacccggcgggtgctgcagctggagaccgtgctggagggcgtggtgtcccagattgatgctgtgggcagcaagctgaagatgctggagaggaagggctggctggcccccagccctggggtgaaggagcaggccatctggaagcacccccagcctgccccagctgtgaccccagacccctggggccctggctgggccggggagtag

SEQ ID NO: 164603 - DNA, 2283 bp, synthetic construct
  misc_feature 1..2283: note = Description of Artificial Sequence: Synthetic coding sequence
  source 1..2283: mol_type = other DNA
atgaatgctgtgggcagccctgagggccaggagctgcagaagctgggcagcggggcctgggacaacccagcctacagcggcccccccagcccccacggcaccctgcgggtgtgcaccatcagcagcacaggccccctgcagccccagcccaagaagccagaagatgagccccaggagacagcctaccgcacccaggtgagcagctgctgcctgcacatctgccagggcatccggggcctgtggggcaccaccctgacagaaaatacagcagaaaatcgggagctgtacatcaagaccaccctgcgggagctgctggtgtacatcgtgttcctggtggacatctgcctgctgacctacggcatgaccagcagcagcgcctactactacaccaaggtgatgtctgagctgttcctgcacacccccagcgacaccggggtgtccttccaggccatcagctccatggctgacttctgggactttgcccagggccccctgctggacagcctgtactggaccaagtggtacaacaaccagagcctgggccacggcagccacagcttcatctactatgagaacatgctgctgggcgtgccccggctgcggcagctgaaggtgagaaatgacagctgtgtggtgcatgaggacttccgggaggacatcctgagctgctatgatgtgtacagcccagacaaggaggagcagctgcccttcggccccttcaatggaacagcctggacctaccacagccaggatgagctgggcggcttcagccactggggccgcctgaccagctacagcggcggcggctactacctggacctgcccggcagccggcagggcagcgctgaggccctgcgggccctgcaggagggcctgtggctggaccggggcaccagggtggtgttcatcgacttctctgtgtacaatgccaacatcaacctcttctgtgtgctgcggctggtggtggagttccctgccactggaggagccatccccagctggcagatcagaacagtgaagctgatccgctacgtgagcaactgggacttcttcatcgtgggctgtgaggtgatcttctgtgtgttcatcttctactacgtggtggaggagatcctggagctgcacatccaccggctgcgctacctgagcagcatctggaacatcctggacctggtggtgatcctgctgagcatcgtggccgtgggcttccacatcttccgcaccctggaggtgaaccggctgatgggcaagctgctgcagcagcccaacacctacgccgactttgagttcctggccttctggcagacccagtacaacaacatgaatgctgtgaacctcttctttgcctggatcaagatcttcaagtacatctccttcaacaagaccatgacccagctgagcagcaccctggcccgctgtgccaaggacatcctgggctttgctgtgatgttcttcatcgtgttctttgcctatgcccagctgggctacctgctgtttggcacccaggtggagaacttcagcaccttcatcaagtgcatcttcacccagttccgcatcatcctgggggactttgactacaatgccatcgacaatgccaaccgcatcctgggccctgcctactttgtgacctacgtgttctttgtgttctttgtgctgctgaacatgttcctggccatcatcaatgacacctacagcgaggtgaaggaggagctggccggccagaaggatgagctgcagctgagtgacctgctgaagcagggctacaacaagaccctgctgcggctgcggctgaggaaggagcgggtgtctgatgtgcagaaggtgctgcagggcggggagcaggagatccagtttgaggacttcaccaacaccctgcgggagctgggccatgctgagcacgagatcacagagctgacagccaccttcaccaagtttgacagagatggcaaccgcatcctggatgagaaggagcaggagaagatgaggcaggacctggaggaggagcgggtggccctgaacacagaaattgagaagctgggccgcagcatcgtgagcagcccccagggcaagagcggccctgaggccgcccgggccggcggctgggtgtctggagaggagttctacatgctgacccggcgggtgctgcagctggagaccgtgctggagggcgtggtgtcccagattgatgctgtgggcagcaagctgaagatgctggagaggaagggctggctggcccccagccctggggtgcgcttccccatcaaggagaagaggaagccctag

SEQ ID NO: 164604 - DNA, 1842 bp, synthetic construct
  misc_feature 1..1842: note = Description of Artificial Sequence: Synthetic coding sequence
  source 1..1842: mol_type = other DNA
atggccgaggccagccgctggcaccggggcggggccagcaagcacaagctgcactacaggaaggaggtggagatcaccaccaccctgcaggagctgctgctgtacttcatcttcctgatcaacctgtgcatcctgaccttcggcatggtgaacccccacatgtactacctgaacaaggtgatgagcagcctcttcctggacacctctgtgcctggagaggagaggaccaacttcaagagcatccgcagcatcacagacttctggaagttcatggagggccccctgctggagggcctgtactgggacagctggtacaacaaccagcagctgtacaacctgaagaacagcagccgcatctactatgagaacatcctgctgggcgtgccccgggtgcggcagctgaaggtgaggaacaacacctgcaaggtgtacagcagcttccagagcctgatgtctgaatgttatggcaagtacaccagcgccaatgaagacctgagcaactttggcctgcagatcaacacagagtggagatacagcaccagcaacaccaacagcccctggcactggggcttcctgggcgtgtacagaaatggaggctacatcttcaccctgagcaagagcaagtctgagaccaagaacaagttcatcgacctgcggctgaacagctggatcacccggggcaccagggtcatcttcatcgacttcagcctgtacaatgccaacgtgaacctcttctgcatcatccggctggtggccgagttccctgccactggaggcatcctgacctcctggcagttctacagcgtgaagctgctgcgctacgtgtcctactatgactacttcatcgccagctgtgagatcaccttctgcatcttcctgtttgtgttcaccacccaggaggtgaagaagatcaaggagttcaagagcgcctacttcaagagcatctggaactggctggagctgctgctgctgctgctgtgctttgtggccgtgtccttcaacacctactacaacgtgcagatcttcctgctgctgggccagctgctgaagagcacagagaagtacagcgacttctacttcctggcctgctggcacatctactacaacaacatcatcgccatcaccatcttctttgcctggatcaagatcttcaagttcatctccttcaacaagaccatgagccagctgagcagcaccctgagccgctgtgtgaaggacatcgtgggctttgccatcatgttcttcatcatcttctttgcctatgcccagctgggcttcctggtgtttggcagccaggtggatgacttcagcaccttccagaacagcatctttgcccagttcagaattgtgctgggggacttcaactttgctggcatccagcaggccaaccccatcctgggccccatctacttcatcaccttcatcttctttgtgttctttgtgctgctgaacatgttcctggccatcatcaatgacacctacagcgaggtgaaggctgactacagcattggaagaaggctggactttgagctgggcaagatgatcaagcagagctacaagaatgtgctggagaagttccggctgaagaaggcccagaaggatgaggacaagaagaccaagggcagcggggacctggccgagcaggcccggcgggagggctttgatgaaaatgagatccagaatgctgagcagatgaagaagtggaaggagcggctggagaagaagtactacagcatggagatccaggatgactaccagcctgtgacccaggaggagttcagagatggcaccaccaccaagtacaagatgaggttctctgaatgtctgaccaagaggatctag

SEQ ID NO: 164605 - DNA, 1773 bp, synthetic construct
  misc_feature 1..1773: note = Description of Artificial Sequence: Synthetic coding sequence
  source 1..1773: mol_type = other DNA
atggccgaggccagccgctggcaccggggcgtgaccttcggcatggtgaacccccacatgtactacctgaacaaggtgatgagcagcctcttcctggacacctctgtgcctggagaggagaggaccaacttcaagagcatccgcagcatcacagacttctggaagttcatggagggccccctgctggagggcctgtactgggacagctggtacaacaaccagcagctgtacaacctgaagaacagcagccgcatctactatgagaacatcctgctgggcgtgccccgggtgcggcagctgaaggtgaggaacaacacctgcaaggtgtacagcagcttccagagcctgatgtctgaatgttatggcaagtacaccagcgccaatgaagacctgagcaactttggcctgcagatcaacacagagtggagatacagcaccagcaacaccaacagcccctggcactggggcttcctgggcgtgtacagaaatggaggctacatcttcaccctgagcaagagcaagtctgagaccaagaacaagttcatcgacctgcggctgaacagctggatcacccggggcaccagggtcatcttcatcgacttcagcctgtacaatgccaacgtgaacctcttctgcatcatccggctggtggccgagttccctgccactggaggcatcctgacctcctggcagttctacagcgtgaagctgctgcgctacgtgtcctactatgactacttcatcgccagctgtgagatcaccttctgcatcttcctgtttgtgttcaccacccaggaggtgaagaagatcaaggagttcaagagcgcctacttcaagagcatctggaactggctggagctgctgctgctgctgctgtgctttgtggccgtgtccttcaacacctactacaacgtgcagatcttcctgctgctgggccagctgctgaagagcacagagaagtacagcgacttctacttcctggcctgctggcacatctactacaacaacatcatcgccatcaccatcttctttgcctggatcaagatcttcaagttcatctccttcaacaagaccatgagccagctgagcagcaccctgagccgctgtgtgaaggacatcgtgggctttgccatcatgttcttcatcatcttctttgcctatgcccagctgggcttcctggtgtttggcagccaggtggatgacttcagcaccttccagaacagcatctttgcccagttcagaattgtgctgggggacttcaactttgctggcatccagcaggccaaccccatcctgggccccatctacttcatcaccttcatcttctttgtgttctttgtgctgctgaacatgttcctggccatcatcaatgacacctacagcgaggtgaaggctgactacagcattggaagaaggctggactttgagctgggcaagatgatcaagcagagctacaagaatgtgctggagaagttccggctgaagaaggcccagaaggatgaggacaagaagaccaagggcagcggggacctggccgagcaggcccggcgggagggctttgatgaaaatgagatccagaatgctgagcagatgaagaagtggaaggagcggctggagaagaagtactacagcatggagatccaggatgactaccagcctgtgacccaggaggagttccgggagctgttcctgtatgctgtggagctggagaaggagctgcactacatcaacctgaagctgaaccaggtggtgaggaaggtgtctgccctgtag

SEQ ID NO: 164606 - DNA, 1875 bp, synthetic construct
  misc_feature 1..1875: note = Description of Artificial Sequence: Synthetic coding sequence
  source 1..1875: mol_type = other DNA
atggccgaggccagccgctggcaccggggcggggccagcaagcacaagctgcactacaggaaggaggtggagatcaccaccaccctgcaggagctgctgctgtacttcatcttcctgatcaacctgtgcatcctgaccttcggcatggtgaacccccacatgtactacctgaacaaggtgatgagcagcctcttcctggacacctctgtgcctggagaggagaggaccaacttcaagagcatccgcagcatcacagacttctggaagttcatggagggccccctgctggagggcctgtactgggacagctggtacaacaaccagcagctgtacaacctgaagaacagcagccgcatctactatgagaacatcctgctgggcgtgccccgggtgcggcagctgaaggtgaggaacaacacctgcaaggtgtacagcagcttccagagcctgatgtctgaatgttatggcaagtacaccagcgccaatgaagacctgagcaactttggcctgcagatcaacacagagtggagatacagcaccagcaacaccaacagcccctggcactggggcttcctgggcgtgtacagaaatggaggctacatcttcaccctgagcaagagcaagtctgagaccaagaacaagttcatcgacctgcggctgaacagctggatcacccggggcaccagggtcatcttcatcgacttcagcctgtacaatgccaacgtgaacctcttctgcatcatccggctggtggccgagttccctgccactggaggcatcctgacctcctggcagttctacagcgtgaagctgctgcgctacgtgtcctactatgactacttcatcgccagctgtgagatcaccttctgcatcttcctgtttgtgttcaccacccaggaggtgaagaagatcaaggagttcaagagcgcctacttcaagagcatctggaactggctggagctgctgctgctgctgctgtgctttgtggccgtgtccttcaacacctactacaacgtgcagatcttcctgctgctgggccagctgctgaagagcacagagaagtacagcgacttctacttcctggcctgctggcacatctactacaacaacatcatcgccatcaccatcttctttgcctggatcaagatcttcaagttcatctccttcaacaagaccatgagccagctgagcagcaccctgagccgctgtgtgaaggacatcgtgggctttgccatcatgttcttcatcatcttctttgcctatgcccagctgggcttcctggtgtttggcagccaggtggatgacttcagcaccttccagaacagcatctttgcccagttcagaattgtgctgggggacttcaactttgctggcatccagcaggccaaccccatcctgggccccatctacttcatcaccttcatcttctttgtgttctttgtgctgctgaacatgttcctggccatcatcaatgacacctacagcgaggtgaaggctgactacagcattggaagaaggctggactttgagctgggcaagatgatcaagcagagctacaagaatgtgctggagaagttccggctgaagaaggcccagaaggatgaggacaagaagaccaagggcagcggggacctggccgagcaggcccggcgggagggctttgatgaaaatgagatccagaatgctgagcagatgaagaagtggaaggagcggctggagaagaagtactacagcatggagatccaggatgactaccagcctgtgacccaggaggagttccgggagctgttcctgtatgctgtggagctggagaaggagctgcactacatcaacctgaagctgaaccaggtggtgaggaaggtgtctgccctgtag

SEQ ID NO: 164607 - DNA, 1809 bp, synthetic construct
  misc_feature 1..1809: note = Description of Artificial Sequence: Synthetic coding sequence
  source 1..1809: mol_type = other DNA
atggccgaggccagccgctggcaccggggcggggccagcaagcacaagctgcactacaggaaggaggtggagatcaccaccaccctgcaggagctgctgctgtacttcatcttcctgatcaacctgtgcatcctgaccttcggcatggtgaacccccacatgtactacctgaacaaggtgatgagcagcctcttcctggacacctctgtgcctggagaggagaggaccaacttcaagagcatccgcagcatcacagacttctggaagttcatggagggccccctgctggagggcctgtactgggacagctggtacaacaaccagcagctgtacaacctgaagaacagcagccgcatctactatgagaacatcctgctgggcgtgccccgggtgcggcagctgaaggtgaggaacaacacctgcaaggtgtacagcagcttccagagcctgatgtctgaatgttatggcaagtacaccagcgccaatgaagacctgagcaactttggcctgcagatcaacacagagtggagatacagcaccagcaacaccaacagcccctggcactggggcttcctgggcgtgtacagaaatggaggctacatcttcaccctgagcaagagcaagtctgagaccaagaacaagttcatcgacctgcggctgaacagctggatcacccggggcaccagggtcatcttcatcgacttcagcctgtacaatgccaacgtgaacctcttctgcatcatccggctggtggccgagttccctgccactggaggcatcctgacctcctggcagttctacagcgtgaagctgctgcgctacgtgtcctactatgactacttcatcgccagctgtgagatcaccttctgcatcttcctgtttgtgttcaccacccaggaggtgaagaagatcaaggagttcaagagcgcctacttcaagagcatctggaactggctggagctgctgctgctgctgctgctgaagagcacagagaagtacagcgacttctacttcctggcctgctggcacatctactacaacaacatcatcgccatcaccatcttctttgcctggatcaagatcttcaagttcatctccttcaacaagaccatgagccagctgagcagcaccctgagccgctgtgtgaaggacatcgtgggctttgccatcatgttcttcatcatcttctttgcctatgcccagctgggcttcctggtgtttggcagccaggtggatgacttcagcaccttccagaacagcatctttgcccagttcagaattgtgctgggggacttcaactttgctggcatccagcaggccaaccccatcctgggccccatctacttcatcaccttcatcttctttgtgttctttgtgctgctgaacatgttcctggccatcatcaatgacacctacagcgaggtgaaggctgactacagcattggaagaaggctggactttgagctgggcaagatgatcaagcagagctacaagaatgtgctggagaagttccggctgaagaaggcccagaaggatgaggacaagaagaccaagggcagcggggacctggccgagcaggcccggcgggagggctttgatgaaaatgagatccagaatgctgagcagatgaagaagtggaaggagcggctggagaagaagtactacagcatggagatccaggatgactaccagcctgtgacccaggaggagttccgggagctgttcctgtatgctgtggagctggagaaggagctgcactacatcaacctgaagctgaaccaggtggtgaggaaggtgtctgccctgtag

SEQ ID NO: 164608 - DNA, 1572 bp, synthetic construct
  misc_feature 1..1572: note = Description of Artificial Sequence: Synthetic coding sequence
  source 1..1572: mol_type = other DNA
atggccgaggccagccgctggcaccggggcggggccagcaagcacaagctgcactacaggaaggaggtggagatcaccaccaccctgcaggagctgctgctgtacttcatcttcctgatcaacctgtgcatcctgaccttcggcatggtgaacccccacatgtactacctgaacaaggtgatgagcagcctcttcctggacacctctgtgcctggagaggagaggaccaacttcaagagcatccgcagcatcacagacttctggaagttcatggagggccccctgctggagggcctgtactgggacagctggtacaacaaccagcagctgtacaacctgaagaacagcagccgcatctactatgagaacatcctgctgggcgtgccccgggtgcggcagctgaaggtgaggaacaacacctgcaaggtgtacagcagcttccagagcctgatgtctgaatgttatggcaagtacaccagcgccaatgaagacctgagcaactttggcctgcagatcaacacagagtggagatacagcaccagcaacaccaacagcccctggcactggggcttcctgggcgtgtacagaaatggaggctacatcttcaccctgagcaagagcaagtctgagaccaagaacaagttcatcgacctgcggctgaacagctggatcacccggggcaccagggtcatcttcatcgacttcagcctgtacaatgccaacgtgaacctcttctgcatcatccggctggtggccgagttccctgccactggaggcatcctgacctcctggcagttctacagcgtgaagctgctgcgctacgtgtcctactatgactacttcatcgccagctgtgagatcaccttctgcatcttcctgtttgtgttcaccacccaggaggtgaagaagatcaaggagttcaagagcgcctacttcaagagcatctggaactggctggagctgctgctgctgctgctgtgctttgtggccgtgtccttcaacacctactacaacgtgcagatcttcctgctgctgggccagctgctgaagagcacagagaagtacagcgacttctacttcctggcctgctggcacatctactacaacaacatcatcgccatcaccatcttctttgcctggatcaagaacatgttcctggccatcatcaatgacacctacagcgaggtgaaggctgactacagcatcggccggcggctggactttgagctgggcaagatgatcaagcagagctacaagaatgtgctggagaagttccggctgaagaaggcccagaaggatgaggacaagaagaccaagggcagcggggacctggccgagcaggcccggcgggagggctttgatgaaaatgagatccagaatgctgagcagatgaagaagtggaaggagcggctggagaagaagtactacagcatggagatccaggatgactaccagcctgtgacccaggaggagttccgggagctgttcctgtatgctgtggagctggagaaggagctgcactacatcaacctgaagctgaaccaggtggtgaggaaggtgtctgccctgtag

SEQ ID NO: 164609 - DNA, 1836 bp, synthetic construct
  misc_feature 1..1836: note = Description of Artificial Sequence: Synthetic coding sequence
  source 1..1836: mol_type = other DNA
atggaggagctggtggtggaggtgcggggcagcaatggagccttctacaaggcctttgtgaaggatgtgcatgaagattccatcaccgtggcctttgagaacaactggcagcctgaccggcagatccccttccatgatgtgcgcttccccccacctgtgggctacaacaaggacatcaatgaaagtgatgaggtggaggtgtacagccgggccaatgagaaggagccctgctgctggtggctggccaaggtgaggatgatcaagggggagttctacgtgattgaatatgctgcctgtgatgccacctacaatgagatcgtgaccatcgagcggctgcggtctgtgaaccccaacaagccagccaccaaggacaccttccacaagatcaagctggatgtgcctgaggacctgcggcagatgtgtgccaaggaggccgcccacaaggacttcaagaaggctgtgggcgccttctctgtgacctatgaccctgagaactaccagctggtgatcctgagcatcaatgaggtgaccagcaagagggcccacatgctgattgacatgcacttccgcagcctgcggaccaagctgagcctcatcatgagaaatgaggaggccagcaagcagctggagagcagccggcagctggccagccgcttccacgagcagttcatcgtgcgggaggacctgatgggcctggccatcggcacccatggagccaacatccagcaggccaggaaggtgcctggggtgacagccatcgacctggatgaggacacctgcaccttccacatctatggagaggaccaggatgctgtgaagaaggcccgctccttcctggagtttgctgaagatgtgatccaggtgcccaggaacctggtgggcaaggtgattggcaagaatggcaagctgatccaggagatcgtggacaagtctggagtggtgcgggtgcgcatcgaggctgaaaatgagaagaatgtgccccaggaggaggagatcatgccacccaacagcctgcccagcaacaacagccgggtgggccccaatgcccctgaggagaagaagcacctggacatcaaggagaacagcacccacttcagccagcccaacagcaccaaggtgcagaggggcatggtgccctttgtgtttgtgggcaccaaggacagcatcgccaatgccaccgtgctgctggactaccacctgaactacctgaaggaggtggaccagctgcggctggagcggctgcagattgatgagcagctgcggcagattggagccagcagccggcccccacccaacagaacagacaaggagaagagctatgtgacagatgatggccagggcatgggccggggcagccggccctacagaaacagaggccacggccggcggggccctggctacaccagcggcaccaacagcgaggccagcaatgccagcgagacagaaagtgaccacagagatgagctgagtgactggagcctggcccccacagaggaggagcgggagagcttcctgcggagaggagatggaagaagaagaggaggcggcggccggggccagggcggccggggccggggcggcggcttcaagggaaatgatgaccacagcaggacagacaaccggcccaggaacccccgggaggccaagggccgcaccacagatggcagcctgcagatccgggtggactgcaacaatgaaagatctgtgcacaccaagaccctgcagaacaccagcagcgagggcagccggctgaggacaggcaaggacaggaaccagaagaaggagaagccagattctgtggatggccagcagcccctggtgaatggagtgccctag

SEQ ID NO: 164610 - DNA, 513 bp, synthetic construct
  misc_feature 1..513: note = Description of Artificial Sequence: Synthetic coding sequence
  source 1..513: mol_type = other DNA
atgcccctgcctgtggccctgcagacccggctggccaagaggggcatcctgaagcacctggagcctgagcctgaggaggagatcatcgcagaagattatgatgatgatcctgtggactatgaggccacccggctggagggcctgcccccatcctggtacaaggtgtttgaccccagctgtggcctgccctactactggaatgctgacacagacctggtgtcctggctgagcccccatgaccccaacagcgtggtgaccaagagcgccaagaagctgcggagcagcaatgctgctgtgtccaggaaggatgaggagctggaccccatggaccccagcagctacagtgatgccccccggggcacctggagcacaggcctgcccaagagaaatgaggccaagacaggagctgacaccacagctgctggccccctcttccagcagaggccctaccccagccctggagctgtgctgcgggccaatgctgaggccagcaggaccaagcagcaggactag

SEQ ID NO: 164611 - DNA, 204 bp, synthetic construct
  misc_feature 1..204: note = Description of Artificial Sequence: Synthetic coding sequence
  source 1..204: mol_type = other DNA
atgcccctgcctgtggccctgcagacccggctggccaagaggggcatcctgaagcacctggagcctgagcctgaggaggagatcatcgcagaagattatgatgatgatcctgtggactatgaggccacccggctggagggcctgcccccatcctggtacaaggtgtttgaccccagctgccccggctggagcgccatggtgtag

SEQ ID NO: 164612 - DNA, 798 bp, synthetic construct
  misc_feature 1..798: note = Description of Artificial Sequence: Synthetic coding sequence
  source 1..798: mol_type = other DNA
atgcccctgcctgtggccctgcagacccggctggccaagaggggcatcctgaagcacctggagcctgagcctgaggaggagatcatcgcagaagattatgatgatgatcctgtggactatgaggccacccggctggagggcctgcccccatcctggtacaaggtgtttgaccccagctgtggcctgccctactactggaatgctgacacagacctggtgtcctggctgagcccccatgaccccaacagcgtggtgaccaagagcgccaagaagctgcggagcagcaatgctgatgctgaggagaagctggacaggagccatgacaagagtgaccggggccatgacaagagtgacaggagccatgagaagctggaccggggccatgacaagagtgaccggggccatgacaagagtgaccgggaccgggagcggggctatgacaaggtggaccgggagcgggagcgggaccgggagcgggaccgggaccggggctatgacaaggctgaccgggaggagggcaaggagcggcggcaccaccggcgggaggagctggccccctaccccaagagcaagaaggctgtgtccaggaaggatgaggagctggaccccatggaccccagcagctacagtgatgccccccggggcacctggagcacaggcctgcccaagagaaatgaggccaagacaggagctgacaccacagctgctggccccctcttccagcagaggccctaccccagccctggagctgtgctgcgggccaatgctgaggccagcaggaccaagcagcaggactag

SEQ ID NO: 164613 - DNA, 513 bp, synthetic construct; identical to SEQ ID NO: 164610
  misc_feature 1..513: note = Description of Artificial Sequence: Synthetic coding sequence
  source 1..513: mol_type = other DNA

SEQ ID NO: 164614 - DNA, 798 bp, synthetic construct; identical to SEQ ID NO: 164612
  misc_feature 1..798: note = Description of Artificial Sequence: Synthetic coding sequence
  source 1..798: mol_type = other DNA

SEQ ID NO: 164615 - DNA, 642 bp, synthetic construct
  misc_feature 1..642: note = Description of Artificial Sequence: Synthetic coding sequence
  source 1..642: mol_type = other DNA
atgcccctgcctgtggccctgcagacccggctggccaagaggggcatcctgaagcacctggagcctgagcctgaggaggagatcatcgcagaagattatgatgatgatcctgtggactatgaggccacccggctggagggcctgcccccatcctggtacaaggtgtttgaccccagctgtggcctgccctactactggaatgctgacacagacctggtgtcctggctgagcccccatgaccccaacagcgtggtgaccaagagcgccaagaagctgcggagcagcaatgctgatgctgaggagaagctggacaggagccatgacaagagtgaccggggccatgacaagagtgacaggagccatgagaagctggaccggggccatgacaagagtgaccggggccatgacaagagtgaccgggaccgggagcggggctatgacaaggtggaccgggagcgggagcgggaccgggagcgggaccgggaccggggctatgacaaggctgaccgggaggagggcaaggagcggcggcaccaccggcgggaggagctggccccctaccccaagagcaagaaggctgtgtccaggaaggatgaggagctggaccccatggaccccagcagctacagtgatgccccctag

SEQ ID NO: 164616 - DNA, 798 bp, synthetic construct; identical to SEQ ID NO: 164612
  misc_feature 1..798: note = Description of Artificial Sequence: Synthetic coding sequence
  source 1..798: mol_type = other DNA

SEQ ID NO: 164617 - DNA, 453 bp, synthetic construct
  misc_feature 1..453: note = Description of Artificial Sequence: Synthetic coding sequence
  source 1..453: mol_type = other DNA
tgaattgccacctacctgctgcacctgctggtgcagcctgaggaggagatcatcgccgaggactatgatgatgatcctgtggactatgaggccacccggctggagggcctgccccccagctggtacaaggtgtttgaccccagctgtggcctgccctactactggaatgctgacacagacctggtgtcctggctgagcccccatgaccccaacagcgtggtgaccaagagcgccaagaagctgcggagcagcaatgctgctgtgtccaggaaggatgaggagctggaccccatggaccccagcagctacagtgatgccccccggggcacctggagcacaggcctgcccaagagaaatgaggccaagacaggagctgacaccacagctgctggccccctcttccagcagaggccctaccccagccctggagctgtgctgcgggccaatgcctag

SEQ ID NO: 164618 - DNA, 699 bp, synthetic construct
  misc_feature 1..699: note = Description of Artificial Sequence: Synthetic coding sequence
  source 1..699: mol_type = other DNA
atgggctctgtgctgagcacagattctgggaagagcgccccagccagcgccacagcccgggccctggagaggagaagagatcctgagctgcctgtgaccagctttgactgtgctgtgtgcctggaggtgctgcaccagcctgtgaggacccgctgtggccacgtgttctgccgcagctgcatcgccaccagcctgaagaacaacaagtggacctgcccctactgccgggcctacctgcccagcgagggcgtgcctgccacagatgtggccaagaggatgaagtctgagtacaagaactgtgccgagtgtgacaccctggtgtgcctgtctgagatgagggcccacatccgcacctgccagaagtacatcgacaagtatggccccctgcaggagctggaggagacagctgcccgctgtgtgtgccccttctgccagcgggagctgtatgaggacagcctgctggaccactgcatcacccaccacagaagtgaaagaagacctgtgttctgccccctgtgccgcctcatcccagatgagaaccccagcagcttcagcggcagcctcatccgccacctgcaggtgagccacaccctcttctatgatgacttcatcgacttcaacatcatcgaggaggccctgatcagaagagtgctggacaggagcctgctggagtatgtgaaccacagcaacaccacctag

SEQ ID NO: 164619 - DNA, 1986 bp, synthetic construct
  misc_feature 1..1986: note = Description of Artificial Sequence: Synthetic coding sequence
  source 1..1986: mol_type = other DNA
atggagaagctgggcgtggagcctgaggaggagggcggcggagatgatgatgaagaagatgctgaggcctgggccatggagctggctgatgtgggcgccgccgccagcagccagggcgtgcatgaccaggtgctgcccaccccaaatgccagcagccgggtgattgtgcacgtggacctggactgcttctacgcccaggtggagatgatcagcaaccctgagctgaaggacaagcccctgggcgtgcagcagaagtacctggtggtgacctgcaactatgaggccaggaagctgggcgtgaagaagctgatgaatgtgagagatgccaaggagaagtgcccccagctggtgctggtgaatggagaggacctgacccgctaccgggagatgagctacaaggtgacagagctgctggaggagttcagccctgtggtggagcggctgggctttgatgagaactttgtggacctgacagagatggtggagaagaggctgcagcagctgcagagtgatgagctgtctgctgtgacagtgtctggccacgtgtacaacaaccagtgcatcggctacaagacagccaagtgcctggaggccctgggcatcaacagcgtgcgggacctgcagaccttcagccccaagatcctggagaaggagctgggcatctctgtggcccagaggatccagaagctgagctttggagaggacaacagccctgtgatcctgagcggccccccccagagcttctctgaagaagattccttcaagaagtgcagcagcgaggtggaggccaagaacaagattgaggagctgctggccagcctgctgaacagagtgtgccaggacggcaggaagccccacacagtgcggctcatcatccgccgctacagcagcgagaagcactacggccgggagagccggcagtgccccatccccagccacgtgatccagaagctgggcaccggcaactatgatgtgatgacccccatggtggacatcctgatgaagctgttcaggaacatggtgaatgtgaagatgcccttccacctgaccctgctgtctgtgtgcttctgcaacctgaaggccctgaacacagccaagaagggcctgattgactactacctgatgcccagcctgagcaccaccagccgcagcggcaagcacagcttcaagatgaaggacacccacatggaggacttccccaaggacaaggagaccaacagagacttcctgcccagcggcagaattgagagcaccaggacccgggagagccccctggacaccaccaacttcagcaaggagaaggacatcaatgagttccccctgtgcagcctgcctgagggcgtggaccaggaggtgttcaagcagctgcctgtggacatccaggaggagatcctgagcggcaagagccgggagaagttccagggcaagggctctgtgtcctgccccctgcacgccagccggggcgtgctgtccttcttcagcaagaagcagatgcaggacatccccatcaacccccgggaccacctgagcagcagcaagcaggtgtcctctgtgagcccctgtgagcccggcaccagcggcttcaacagcagcagcagcagctacatgagcagccagaaggactacagctactacctggacaaccggctgaaggatgagcgcatcagccagggccccaaggagccccagggcttccacttcaccaacagcaacccagctgtgtctgccttccacagcttccccaacctgcagagcgagcagctgttcagcaggaaccacaccacagacagccacaagcagacagtggccacagacagccatgagggcctgacagagaaccgggagccagacagcgtggatgagaagatcaccttccccagcgacatcgacccccaggtgttctatgagctgcctgaggccgtgcagaaggagctgctggccgagtggaagagagctggcagtgacttccacatcggccacaagtag

SEQ ID NO: 164620 - DNA, 2223 bp, synthetic construct; identical to SEQ ID NO: 161194
  misc_feature 1..2223: note = Description of Artificial Sequence: Synthetic coding sequence
  source 1..2223: mol_type = other DNA

SEQ ID NO: 164621 - DNA, 2613 bp, synthetic construct
  misc_feature 1..2613: note = Description of Artificial Sequence: Synthetic coding sequence
  source 1..2613: mol_type = other DNA
atggacagcaccaaggagaagtgtgacagctacaaggatgacctgctgctgaggatgggcctgaatgacaacaaggccggcatggagggcctggacaaggagaagatcaacaagatcatcatggaggccaccaagggcagccgcttctatggaaatgagctgaagaaggagaagcaggtgaaccagagaattgagaacatgatgcagcagaaggcccagatcaccagccagcagctgaggaaggcccagctgcaggtggacagatttgccatggagctggagcagagcaggaacctgagcaacaccatcgtgcacatcgacatggatgccttctatgctgctgtggagatgagggacaaccctgagctgaaggacaagcccatcgctgtgggctccatgtccatgctgagcaccagcaactaccacgcccggcgcttcggcgtgcgggccgccatgcctggcttcatcgccaagaggctgtgcccccagctgatcatcgtgccccccaactttgacaagtacagagctgtgtccaaggaggtgaaggagatcctggccgactatgaccccaacttcatggccatgagcctggatgaggcctacctgaacatcaccaagcacctggaggagcggcagaactggccagaggacaagaggcgctacttcatcaagatgggcagctctgtggagaatgacaaccctgggaaggaggtgaacaagctgtctgagcacgagaggagcatcagccccctgctgtttgaggagagccccagtgatgtgcagcccccaggggaccccttccaggtgaactttgaggagcagaacaacccccagatcctgcagaacagcgtggtgtttggcaccagcgcccaggaggtggtgaaggagatccgcttcagaattgagcagaagaccaccctgacagccagcgctggcatcgcccccaacaccatgctggccaaggtgtgcagcgacaagaacaagcccaacggccagtaccagatcctgcccaaccggcaggccgtgatggacttcatcaaggacctgcccatcaggaaggtgtctggaattggcaaggtgacagagaagatgctgaaggccctgggcatcatcacctgcacagagctgtaccagcagagggccctgctgagcctgctcttcagcgagacctcctggcactacttcctgcacatcagcctgggcctgggcagcacccacctgaccagagatggagagaggaagtccatgtctgtggagaggaccttcagcgagatcaacaaggccgaggagcagtacagcctgtgccaggagctgtgcagcgagctggcccaggacctgcagaaggagcggctgaagggccgcacagtgaccatcaagctgaagaatgtgaactttgaggtgaagacccgggccagcacagtgtcctctgtggtgtccacagctgaggagatctttgccatcgccaaggagctgctgaagacagaaattgatgctgacttcccccaccccctgcggctgcggctgatgggcgtgcgcatcagcagcttccccaatgaggaggacaggaagcaccagcagaggagcatcatcggcttcctgcaggccggcaaccaggccctgagcgccacagagtgcaccctggagaagacagacaaggacaagtttgtgaagcccctggagatgagccacaagaagagcttctttgacaagaagaggtctgagaggaagtggagccaccaggacaccttcaagtgtgaggccgtgaacaagcagagcttccagaccagccagcccttccaggtgctgaagaagaagatgaatgaaaacctggagatcagcgagaacagtgatgactgccagatcctgacctgccctgtgtgcttccgggcccagggctgcatcagcctggaggccctgaacaagcacgtggatgaatgtctggatggccccagcatcagcgagaacttcaagatgttcagctgcagccacgtgtctgccaccaaggtgaacaagaaggaaaatgtgcctgccagcagcctgtgtgagaagcaggactatgaggcccaccccaagatcaaggagatcagctctgtggactgcatcgccctggtggacaccatcgacaacagcagcaaggccgagagcattgatgccctgagcaacaagcacagcaaggaggagtgcagcagcctgcccagcaagagcttcaacatcgagcactgccaccagaacagcagcagcacagtgtccctggagaatgaagatgtgggcagcttccggcaggagtaccggcagccctacctgtgtgaggtgaagacaggccaggccctggtgtgccctgtgtgcaatgtggagcagaagaccagtgacctgaccctcttcaacgtgcacgtggatgtgtgcctgaacaagagcttcatccaggagctgaggaaggacaagttcaaccctgtgaaccagcccaaggagagcagccgcagcacaggcagcagcagcggcgtgcagaaggctgtgaccaggaccaagaggcctggcctgatgaccaagtacagcaccagcaagaagatcaagcccaacaaccccaagcacaccctggacatcttcttcaagtag

SEQ ID NO: 164622 - DNA, 2019 bp, synthetic construct
  misc_feature 1..2019: note = Description of Artificial Sequence: Synthetic coding sequence
  source 1..2019: mol_type = other DNA
atggacagcaccaaggagaagtgtgacagctacaaggatgacctgctgctgaggatgggcctgaatgacaacaaggccggcatggagggcctggacaaggagaagatcaacaagatcatcatggaggccaccaagggcagccgcttctatggaaatgagctgaagaaggagaagcaggtgaaccagagaattgagaacatgatgcagcagaaggcccagatcaccagccagcagctgaggaaggcccagctgcaggtggacagatttgccatggagctggagcagagcaggaacctgagcaacaccatcgtgcacatcgacatggatgccttctatgctgctgtggagatgagggacaaccctgagctgaaggacaagcccatcgctgtgggctccatgtccatgctgagcaccagcaactaccacgcccggcgcttcggcgtgcgggccgccatgcctggcttcatcgccaagaggctgtgcccccagctgatcatcgtgccccccaactttgacaagtacagagctgtgtccaaggaggtgaaggagatcctggccgactatgaccccaacttcatggccatgagcctggatgaggcctacctgaacatcaccaagcacctggaggagcggcagaactggccagaggacaagaggcgctacttcatcaagatgggcagctctgtggagaatgacaaccctgggaaggaggtgaacaagctgtctgagcacgagaggagcatcagccccctgctgtttgaggagagccccagtgatgtgcagcccccaggggaccccttccaggtgaactttgaggagcagaacaacccccagatcctgcagaacagcgtggtgtttggcaccagcgcccaggaggtggtgaaggagatccgcttcagaattgagcagaagaccaccctgacagccagcgctggggtgcgcatcagcagcttccccaatgaggaggacaggaagcaccagcagaggagcatcatcggcttcctgcaggccggcaaccaggccctgagcgccacagagtgcaccctggagaagacagacaaggacaagtttgtgaagcccctggagatgagccacaagaagagcttctttgacaagaagaggtctgagaggaagtggagccaccaggacaccttcaagtgtgaggccgtgaacaagcagagcttccagaccagccagcccttccaggtgctgaagaagaagatgaatgaaaacctggagatcagcgagaacagtgatgactgccagatcctgacctgccctgtgtgcttccgggcccagggctgcatcagcctggaggccctgaacaagcacgtggatgaatgtctggatggccccagcatcagcgagaacttcaagatgttcagctgcagccacgtgtctgccaccaaggtgaacaagaaggaaaatgtgcctgccagcagcctgtgtgagaagcaggactatgaggcccaccccaagatcaaggagatcagctctgtggactgcatcgccctggtggacaccatcgacaacagcagcaaggccgagagcattgatgccctgagcaacaagcacagcaaggaggagtgcagcagcctgcccagcaagagcttcaacatcgagcactgccaccagaacagcagcagcacagtgtccctggagaatgaagatgtgggcagcttccggcaggagtaccggcagccctacctgtgtgaggtgaagacaggccaggccctggtgtgccctgtgtgcaatgtggagcagaagaccagtgacctgaccctcttcaacgtgcacgtggatgtgtgcctgaacaagagcttcatccaggagctgaggaaggacaagttcaaccctgtgaaccagcccaaggagagcagccgcagcacaggcagcagcagcggcgtgcagaaggctgtgaccaggaccaagaggcctggcctgatgaccaagtacagcaccagcaagaagatcaagcccaacaaccccaagcacaccctggacatcttcttcaagtag

SEQ ID NO: 164623 - DNA, 2343 bp, synthetic construct
  misc_feature 1..2343: note = Description of Artificial Sequence: Synthetic coding sequence
  source 1..2343: mol_type = other DNA
atggagctggagcagagcaggaacctgagcaacaccatcgtgcacatcgacatggatgccttctatgctgctgtggagatgagggacaaccctgagctgaaggacaagcccatcgctgtgggctccatgtccatgctgagcaccagcaactaccacgcccggcgcttcggcgtgcgggccgccatgcctggcttcatcgccaagaggctgtgcccccagctgatcatcgtgccccccaactttgacaagtacagagctgtgtccaaggaggtgaaggagatcctggccgactatgaccccaacttcatggccatgagcctggatgaggcctacctgaacatcaccaagcacctggaggagcggcagaactggccagaggacaagaggcgctacttcatcaagatgggcagctctgtggagaatgacaaccctgggaaggaggtgaacaagctgtctgagcacgagaggagcatcagccccctgctgtttgaggagagccccagtgatgtgcagcccccaggggaccccttccaggtgaactttgaggagcagaacaacccccagatcctgcagaacagcgtggtgtttggcaccagcgcccaggaggtggtgaaggagatccgcttcagaattgagcagaagaccaccctgacagccagcgctggcatcgcccccaacaccatgctggccaaggtgtgcagcgacaagaacaagcccaacggccagtaccagatcctgcccaaccggcaggccgtgatggacttcatcaaggacctgcccatcaggaaggtgtctggaattggcaaggtgacagagaagatgctgaaggccctgggcatcatcacctgcacagagctgtaccagcagagggccctgctgagcctgctcttcagcgagacctcctggcactacttcctgcacatcagcctgggcctgggcagcacccacctgaccagagatggagagaggaagtccatgtctgtggagaggaccttcagcgagatcaacaaggccgaggagcagtacagcctgtgccaggagctgtgcagcgagctggcccaggacctgcagaaggagcggctgaagggccgcacagtgaccatcaagctgaagaatgtgaactttgaggtgaagacccgggccagcacagtgtcctctgtggtgtccacagctgaggagatctttgccatcgccaaggagctgctgaagacagaaattgatgctgacttcccccaccccctgcggctgcggctgatgggcgtgcgcatcagcagcttccccaatgaggaggacaggaagcaccagcagaggagcatcatcggcttcctgcaggccggcaaccaggccctgagcgccacagagtgcaccctggagaagacagacaaggacaagtttgtgaagcccctggagatgagccacaagaagagcttctttgacaagaagaggtctgagaggaagtggagccaccaggacaccttcaagtgtgaggccgtgaacaagcagagcttccagaccagccagcccttccaggtgctgaagaagaagatgaatgaaaacctggagatcagcgagaacagtgatgactgccagatcctgacctgccctgtgtgcttccgggcccagggctgcatcagcctggaggccctgaacaagcacgtggatgaatgtctggatggccccagcatcagcgagaacttcaagatgttcagctgcagccacgtgtctgccaccaaggtgaacaagaaggaaaatgtgcctgccagcagcctgtgtgagaagcaggactatgaggcccaccccaagatcaaggagatcagctctgtggactgcatcgccctggtggacaccatcgacaacagcagcaaggccgagagcattgatgccctgagcaacaagcacagcaaggaggagtgcagcagcctgcccagcaagagcttcaacatcgagcactgccaccagaacagcagcagcacagtgtccctggagaatgaagatgtgggcagcttccggcaggagtaccggcagccctacctgtgtgaggtgaagacaggccaggccctggtgtgccctgtgtgcaatgtggagcagaagaccagtgacctgaccctcttcaacgtgcacgtggatgtgtgcctgaacaagagcttcatccaggagctgaggaaggacaagttcaaccctgtgaaccagcccaaggagagcagccgcagcacaggcagcagcagcggcgtgcagaaggctgtgaccaggaccaagaggcctggcctgatgaccaagtacagcaccagcaagaagatcaagcccaacaaccccaagcacaccctggacatcttcttcaagtag

SEQ ID NO: 164624 - DNA, 1386 bp, synthetic construct
  misc_feature 1..1386: note = Description of Artificial Sequence: Synthetic coding sequence
  source 1..1386: mol_type = other DNA
atggacagcaccaaggagaagtgtgacagctacaaggatgacctgctgctgaggatgggcctgaatgacaacaaggccggcatggagggcctggacaaggagaagatcaacaagatcatcatggaggccaccaagggcagccgcttctatggaaatgagctgaagaaggagaagcaggtgaaccagagaattgagaacatgatgcagcagaaggcccagatcaccagccagcagctgaggaaggcccagctgcaggtggacagatttgccatggagctggagcagagcaggaacctgagcaacaccatcgtgcacatcgacatggatgccttctatgctgctgtggagatgagggacaaccctgagctgaaggacaagcccatcgctgtgggctccatgtccatgctgagcaccagcaactaccacgcccggcgcttcggcgtgcgggccgccatgcctggcttcatcgccaagaggctgtgcccccagctgatcatcgtgccccccaactttgacaagtacagagctgtgtccaaggaggtgaaggagatcctggccgactatgaccccaacttcatggccatgagcctggatgaggcctacctgaacatcaccaagcacctggaggagcggcagaactggccagaggacaagaggcgctacttcatcaagatgggcagctctgtggagaatgacaaccctgggaaggaggtgaacaagctgtctgagcacgagaggagcatcagccccctgctgtttgaggagagccccagtgatgtgcagcccccaggggaccccttccaggtgaactttgaggagcagaacaacccccagatcctgcagaacagcgtggtgtttggcaccagcgcccaggaggtggtgaaggagatccgcttcagaattgagcagaagaccaccctgacagccagcgctggcatcgcccccaacaccatgctggccaaggtgtgcagcgacaagaacaagcccaacggccagtaccagatcctgcccaaccggcaggccgtgatggacttcatcaaggacctgcccatcaggaaggtgtctggaattggcaaggtgacagagaagatgctgaaggccctgggcatcatcacctgcacagagctgtaccagcagagggccctgctgagcctgctcttcagcgagacctcctggcactacttcctgcacatcagcctgggcctgggcagcacccacctgaccagagatggagagaggaagtccatgtctgtggagaggaccttcagcgagatcaacaaggccgaggagcagtacagcctgtgccaggagctgtgcagcgagctggcccaggacctgcagaaggagcggctgaaggtggcccaggtggagtacagaaggctgtag

SEQ ID NO: 164625 - DNA, 2019 bp, synthetic construct; identical to SEQ ID NO: 164622
  misc_feature 1..2019: note = Description of Artificial Sequence: Synthetic coding sequence
  source 1..2019: mol_type = other DNA

SEQ ID NO: 164626 - DNA, 1470 bp, synthetic construct
  misc_feature 1..1470: note = Description of Artificial Sequence: Synthetic coding sequence
  source 1..1470: mol_type = other DNA
atggacagcaccaaggagaagtgtgacagctacaaggatgacctgctgctgaggatgggcctgaatgacaacaaggccggcatggagggcctggacaaggagaagatcaacaagatcatcatggaggccaccaagggcagccgcttctatggaaatgagctgaagaaggagaagcaggtgaaccagagaattgagaacatgatgcagcagaaggcccagatcaccagccagcagctgaggaaggcccagctgcaggtggacagatttgccatggagctggagcagagcaggaacctgagcaacaccatcgtgcacatcgacatggatgccttctatgctgctgtggagatgagggacaaccctgagctgaaggacaagcccatcgctgtgggctccatgtccatgctgagcaccagcaactaccacgcccggcgcttcggcgtgcgggccgccatgcctggcttcatcgccaagaggctgtgcccccagctgatcatcgtgccccccaactttgacaagtacagagctgtgtccaaggaggtgaaggagatcctggccgactatgaccccaacttcatggccatgagcctggatgaggcctacctgaacatcaccaagcacctggaggagcggcagaactggccagaggacaagaggcgctacttcatcaagatgggcagctctgtggagaatgacaaccctgggaaggaggtgaacaagctgtctgagcacgagaggagcatcagccccctgctgtttgaggagagccccagtgatgtgcagcccccaggggaccccttccaggtgaactttgaggagcagaacaacccccagatcctgcagaacagcgtggtgtttggcaccagcgcccaggaggtggtgaaggagatccgcttcagaattgagcagaagaccaccctgacagccagcgctggcatcgcccccaacaccatgctggccaaggtgtgcagcgacaagaacaagcccaacggccagtaccagatcctgcccaaccggcaggccgtgatggacttcatcaaggacctgcccatcaggaaggtgtctggaattggcaaggtgacagagaagatgctgaaggccctgggcatcatcacctgcacagagctgtaccagcagagggccctgctgagcctgctcttcagcgagacctcctggcactacttcctgcacatcagcctgggcctgggcagcacccacctgaccagagatggagagaggaagtccatgtctgtggagaggaccttcagcgagatcaacaaggccgaggagcagtacagcctgtgccaggagctgtgcagcgagctggcccaggacctgcagaaggagcggctgaaggtgtttggctacctggtgttccccatgaagaggacaggcaacaccaacaagggggccctgctggccttctaccgcctggagaccaagccctgccagcccctgtctgtgcactag

SEQ ID NO: 164627 - DNA, 426 bp, synthetic construct
  misc_feature 1..426: note = Description of Artificial Sequence: Synthetic coding sequence
  source 1..426: mol_type = other DNA
atggacagcaccaaggagaagtgtgacagctacaaggatgacctgctgctgaggatgggcctgaatgacaacaaggccggcatggagggcctggacaaggagaagatcaacaagatcatcatggaggccaccaagggcagccgcttctatggaaatgagctgaagaaggagaagcaggtgaaccagagaattgagaacatgatgcagcagaaggcccagatcaccagccagcagctgaggaaggcccagctgcaggtggacagatttgccatggagctggagcagagcaggaacctgagcaacaccatcgtgcacatcgacatggatgccttctatgctgctgtggagatgagggacaaccctgagctgaaggacaagcccatcgctgtgggctccatgtccatgctgagcaccagcaactactag

SEQ ID NO: 164628 - DNA, 1419 bp, synthetic construct
  misc_feature 1..1419: note = Description of Artificial Sequence: Synthetic coding sequence
  source 1..1419: mol_type = other DNA
atggacagcaccaaggagaagtgtgacagctacaaggatgacctgctgctgaggatgggcctgaatgacaacaaggccggcatggagggcctggacaaggagaagatcaacaagatcatcatggaggccaccaagggcagccgcttctatggaaatgagctgaagaaggagaagcaggtgaaccagagaattgagaacatgatgcagcagaaggcccagatcaccagccagcagctgaggaaggcccagctgcaggtggacagatttgccatggagctggagcagagcaggaacctgagcaacaccatcgtgcacatcgacatggatgccttctatgctgctgtggagatgagggacaaccctgagctgaaggacaagcccatcgctgtgggctccatgtccatgctgagcaccagcaactaccacgcccggcgcttcggcgtgcgggccgccatgcctggcttcatcgccaagaggctgtgcccccagctgatcatcgtgccccccaactttgacaagtacagagctgtgtccaaggaggtgaaggagatcctggccgactatgaccccaacttcatggccatgagcctggatgaggcctacctgaacatcaccaagcacctggaggagcggcagaactggccagaggacaagaggcgctacttcatcaagatgggcagctctgtggagaatgacaaccctgggaaggaggtgaacaagctgtctgagcacgagaggagcatcagccccctgctgtttgaggagagccccagtgatgtgcagcccccaggggaccccttccaggtgaactttgaggagcagaacaacccccagatcctgcagaacagcgtggtgtttggcaccagcgcccaggaggtggtgaaggagatccgcttcagaattgagcagaagaccaccctgacagccagcgctggcatcgcccccaacaccatgctggccaaggtgtgcagcgacaagaacaagcccaacggccagtaccagatcctgcccaaccggcaggccgtgatggacttcatcaaggacctgcccatcaggaaggtgtctggaattggcaaggtgacagagaagatgctgaaggccctgggcatcatcacctgcacagagctgtaccagcagagggccctgctgagcctgctcttcagcgagacctcctggcactacttcctgcacatcagcctgggcctgggcagcacccacctgaccagagatggagagaggaagtccatgtctgtggagaggaccttcagcgagatcaacaaggccgaggagcagtacagcctgtgccaggagctgtgcagcgagctggcccaggacctgcagaaggagcggctgaaggtgctgtactttgacatggtgtccctggtgttcaagttcttcaacagcaagatgctgccctag

SEQ ID NO: 164629 - DNA, 1911 bp, synthetic construct
  misc_feature 1..1911: note = Description of Artificial Sequence: Synthetic coding sequence
  source 1..1911: mol_type = other DNA
atgaagtgcaagtgccctgtgatctgcttcaatgccaaggactttgtgcgcatcgtgctgcagttctttggaaatgatggctcctggaagcacgtggccgacttcatcggcctggaccccagaattgctgcctggctgattgaccccagtgatgccacccccagctttgaggacctggtggagaagtactgtgagaagagcatcaccgtgaaggtgaacagcacctacggcaacagcagcagaaatattgtgaaccagaatgtgcgggagaacctgaagaccctgtaccgcctgaccatggacctgtgcagcaagctgaaggactatggcctgtggcagctgttccgcaccctggagctgcccctcatccccatcctggccgtgatggagagccacgccatccaggtgaacaaggaggagatggagaagaccagcgccctgctgggcgcccggctgaaggagctggagcaggaggcccactttgtggccggggagcgcttcctgatcaccagcaacaaccagctgcgggagatcctgtttgggaagctgaagctgcacctgctgagccagaggaacagcctgcccaggacaggcctgcagaagtaccccagcaccagcgaggccgtgctgaatgccctgcgggacctgcaccccctgcccaagatcatcctggagtaccggcaggtgcacaagatcaagagcacctttgtggatggcctgctggcctgcatgaagaagggcagcatcagcagcacctggaaccagacaggcaccgtgacaggccgcctgagcgccaagcaccccaacatccagggcatcagcaagcaccccatccagatcaccacccccaagaacttcaagggcaaggaggacaagatcctgaccatcagcccccgggccatgtttgtgagcagcaagggccacaccttcctggccgctgacttcagccagatcgagctgcgcatcctgacccacctgagcggggaccctgagctgctgaagctgttccaggagagcgagagagatgatgtgttcagcaccctgaccagccagtggaaggatgtgcctgtggagcaggtgacccatgctgaccgggagcagaccaagaaggtggtgtatgctgtggtgtatggagctgggaaggagcggctggccgcctgcctgggcgtgcccatccaggaggccgcccagttcctggagagcttcctgcagaagtacaagaagatcaaggactttgcccgggccgccatcgcccagtgccaccagacaggctgtgtggtgtccatcatgggcagaagaagacccctgccccgcatccacgcccatgaccagcagctgcgggcccaggccgagcggcaggccgtgaactttgtggtgcagggcagcgctgctgacctgtgcaagctggccatgattcatgtgttcaccgctgtggccgccagccacaccctgacagcccggctggtggcccagatccatgatgagctgctgtttgaggtggaggacccccagatcccagaatgtgccgccctggtgcggaggaccatggagagcctggagcaggtgcccctgaaggtgtccctgtctgctggccgctcctggggccacctggtgcccctgcaggaggcctggctgcggcaggcccacgtggccctgagcctgcctgccacagcctggctgcccctgggccccctgcctgcccccagcccccacccctgcatcttccggctgcactttgtgtgcagcccccggcagcagtgggaggagaggacaggcttccagcagagcatcgtgtggcccagccccaggagccctgccctgtatgcccctggccgcatcaaccccctgggcctgggctggccagccatcccctggagcaagtgcctgtgcaaggccctgctgatcctgtag

SEQ ID NO: 164630 - DNA, 936 bp, synthetic construct
  misc_feature 1..936: note = Description of Artificial Sequence: Synthetic coding sequence
  source 1..936: mol_type = other DNA
atggctgtgggcagccaggactatggcctgtggcagctgttccgcaccctggagctgcccctcatccccatcctggccgtgatggagagccacgccatccaggtgaacaaggaggagatggagaagaccagcgccctgctgggcgcccggctgaaggagctggagcaggaggcccactttgtggccggggagcgcttcctgatcaccagcaacaaccagctgcgggagatcctgtttgggaagctgaagctgcacctgctgagccagaggaacagcctgcccaggacaggcctgcagaagtaccccagcaccagcgaggccgtgaacatccagggcatcagcaagcaccccatccagatcaccacccccaagaacttcaagggcaaggaggacaagatcctgaccatcagcccccgggccatgtttgtgagcagcaagggccacaccttcctggccgctgacttcagccagatcgagctgcgcatcctgacccacctgagcggggaccctgagctgctgaagctgttccaggagagcgagagagatgatgtgttcagcaccctgaccagccagtggaaggatgtgcctgtggagcaggtgacccatgctgaccgggagcagaccaagaaggtggtgtatgctgtggtgtatggagctgggaaggagcggctggccgcctgcctgggcgtgcccatccaggaggccgcccagttcctggagagcttcctgcagaagtacaagaagatcaaggactttgcccgggccgccatcgcccagtgccaccagacaggctgtgtggtgtccatcatgggcagaagaagacccctgccccgcatccacgcccatgaccagcagctgcgggcccaggccgagcggcaggccgtgaactttgtggtgcaggcccagagccagcacctgtgtgtggaggtgccctag

SEQ ID NO: 164631 - DNA, 2703 bp, synthetic construct
  misc_feature 1..2703: note = Description of Artificial Sequence: Synthetic coding sequence
  source 1..2703: mol_type = other DNA
atggagaactatgaggccctggtgggctttgacctgtgcaacacccccctgagctctgtggcccagaagatcatgtctgccatgcacagcggggacctggtggacagcaagacctggggcaagagcacagagaccatggaggtgatcaacaagagctctgtgaagtacagcgtgcagctggaggacaggaagacccagagccctgagaagaaggacctgaagagcctgcggagccagaccagccggggcagcgccaagctgagcccccagagcttctctgtgcggctgacagaccagctgtctgctgaccagaagcagaagagcatcagcagcctgaccctgagcagctgcctgatcccccagtacaaccaggaggcctctgtgctgcagaagaagggccacaagaggaagcacttcctgatggagaacatcaacaatgaaaataaaggcagcatcaacctgaagaggaagcacatcacctacaacaacctgtctgagaagaccagcaagcagatggccctggaggaggacacagatgatgctgagggctacctgaacagcggcaacagcggggccctgaagaagcacttctgtgacatccgccacctggatgactgggccaagagccagctgattgagatgctgaagcaggccgccgccctggtgatcaccgtgatgtacacagatggcagcacccagctgggcgctgaccagacccctgtgtcctctgtgcggggcatcgtggtgctggtgaagaggcaggccgagggcggccacggctgcccagatgccccagcctgtggccctgtgctggagggctttgtgtctgatgacccctgcatctacatccagatcgagcacagcgccatctgggaccaggagcaggaggcccaccagcagtttgccagaaatgtgctcttccagaccatgaagtgcaagtgccctgtgatctgcttcaatgccaaggactttgtgagaattgtgctgcagttctttggaaatgatggctcctggaagcacgtggccgacttcatcggcctggaccccagaattgctgcctggctgattgaccccagtgatgccacccccagctttgaggacctggtggagaagtactgtgagaagagcatcaccgtgaaggtgaacagcacctacggcaacagcagcaggaacatcgtgaaccagaatgtgcgggagaacctgaagaccctgtaccgcctgaccatggacctgtgcagcaagctgaaggactatggcctgtggcagctgttccgcaccctggagctgcccctcatccccatcctggccgtgatggagagccacgccatccaggtgaacaaggaggagatggagaagaccagcgccctgctgggcgcccggctgaaggagctggagcaggaggcccactttgtggccggggagcgcttcctgatcaccagcaacaaccagctgcgggagatcctgtttgggaagctgaagctgcacctgctgagccagaggaacagcctgcccaggacaggcctgcagaagtaccccagcaccagcgaggccgtgctgaatgccctgcgggacctgcaccccctgcccaagatcatcctggagtaccggcaggtgcacaagatcaagagcacctttgtggatggcctgctggcctgcatgaagaagggcagcatcagcagcacctggaaccagacaggaacagtgacaggccgcctgagcgccaagcaccccaacatccagggcatcagcaagcaccccatccagatcaccacccccaagaacttcaagggcaaggaggacaagatcctgaccatcagcccccgggccatgtttgtgagcagcaagggccacaccttcctggccgctgacttcagccagatcgagctgcgcatcctgacccacctgagcggggaccctgagctgctgaagctgttccaggagagcgagagagatgatgtgttcagcaccctgaccagccagtggaaggatgtgcctgtggagcaggtgacccacgccgaccgggagcagaccaagaaggtggtgtatgctgtggtgtatggagctgggaaggagcggctggccgcctgcctgggcgtgcccatccaggaggccgcccagttcctggagagcttcctgcagaagtacaagaagatcaaggactttgcccgggccgccatcgcccagtgccaccagacaggctgtgtggtgtccatcatgggcagaagaagacccctgccccgcatccacgcccatgaccagcagctgcgggcccaggccgagcggcaggccgtgaactttgtggtgcagggcagcgctgctgacctgtgcaagctggccatgatccacgtgttcaccgctgtggccgccagccacaccctgacagcccggctggtggcccagatccatgatgagctgctgtttgaggtggaggacccccagatcccagaatgtgccgccctggtgcggaggaccatggagagcctggagcaggtgcaggccctggagctgcagctgcaggtgcccctgaaggtgtccctgtctgctggccgctcctggggccacctggtgcccctgcaggaggcctggggccccccacctggcccctgcaggacagagagccccagcaacagcctggccgcccctggcagccctgccagcacccagcccccacccctgcacttcagccccagcttctgcctgtag

SEQ ID NO: 164632 - DNA, 2703 bp, synthetic construct; identical to SEQ ID NO: 164631
  misc_feature 1..2703: note = Description of Artificial Sequence: Synthetic coding sequence
  source 1..2703: mol_type = other DNA

SEQ ID NO: 164633 - DNA, 3033 bp, synthetic construct
  misc_feature 1..3033: note = Description of Artificial Sequence: Synthetic coding sequence
  source 1..3033: mol_type = other DNA
aggatggatggcaagaggcggcccggccctggccctggggtgccccccaagagggcccggggcggcctgtgggatgatgatgatgccccccggcccagccagtttgaggaggacctggccctgatggaggagatggaggccgagcaccggctgcaggagcaggaggaggaggagctgcagagcgtgctggagggcgtggctgatggccaggtgccccccagcgccatcgacccccgctggctgcggcccaccccaccagccctggacccccagacagagcccctcatcttccagcagctggagattgaccactacgtgggccctgcccagcctgtgcctgggggccccccacccagccggggctctgtgcctgtgctgcgggcctttggagtgacagatgagggcttctctgtgtgctgccacatccacggctttgccccctacttctacaccccagcccctcctggctttggacctgagcacatgggagacctgcagcgggagctgaacctggccatcagccgggacagcagaggaggccgggagctgaccggccctgctgtgctggccgtggagctgtgcagccgggagagcatgtttggctaccacggccacggccccagccccttcctgcgcatcaccgtggccctgccccggctggtggccccagcccggcggctgctggagcagggcatccgggtggccggcctgggcacccccagctttgccccctatgaggccaacgtggactttgagatccgcttcatggtggacacagacatcgtgggctgcaactggctggagctgcctgctgggaagtatgccctgcggctgaaggagaaggccacccagtgccagctggaggctgatgtgctgtggagcgatgtggtgagccaccccccagagggcccctggcagagaattgcccccctgcgggtgctgagctttgatattgaatgtgccggcaggaagggcatcttccctgagcctgagcgggaccccgtcatccagatctgcagcctgggcctgcgctggggcgagcctgagcccttcctgcggctggccctgaccctgcggccctgtgcccccatcctgggcgccaaggtgcagagctatgagaaggaggaggacctgctgcaggcctggagcaccttcatccgcatcatggaccctgatgtgatcaccggctacaacatccagaactttgacctgccctacctgatcagccgggcccagaccctgaaggtgcagaccttccccttcctgggccgggtggccggcctgtgcagcaacatccgggacagcagcttccagagcaagcagacaggccggcgggacaccaaggtggtgtccatggtgggccgggtgcagatggacatgctgcaggtgctgctgcgggagtacaagctgcggagctacaccctgaatgctgtgtccttccacttcctgggggagcagaaggaggatgtgcagcacagcatcatcacagacctgcagaatggaaatgaccagacccggcggcggctggccgtgtactgcctgaaggatgcctacctgcccctgcggctgctggagcggctgatggtgctggtgaatgctgtggagatggcccgggtgactggagtgcccctgagctacctgctgagccggggccagcaggtgaaggtggtgtcccagctgctgcggcaggccatgcatgagggcctgctgatgcctgtggtgaagtctgagggcggggaggactacacaggagccaccgtcatcgagcccctgaagggctactatgatgtgcccatcgccaccctggacttcagcagcctgtaccccagcatcatgatggcccacaacctgtgctacaccaccctgctgcggcctggaacagcccagaagctgggcctgacagaggaccagttcatccgcacccccactggagatgaatttgtgaagacctctgtgaggaagggcctgctgccccagatcctggagaacctgctgagcgccaggaagagggccaaggccgagctggccaaggagacagaccccctgcggcggcaggtgctggatggccggcagctggccctgaaggtgtctgccaacagcgtgtatggcttcaccggggcccaggtgggcaagctgccctgcctggagatcagccagagcgtgacaggcttcggccggcagatgattgagaagaccaagcagctggtggagagcaagtacacagtggagaatggctacagcaccagcgccaaggtggtgtatggagacacagattctgtgatgtgccgcttcggcgtgtcctctgtggccgaggccatggccctgggccgggaggccgctgactgggtgtctggccacttccccagccccatccggctggagtttgagaaggtgtacttcccctacctgctgatcagcaagaagagatatgccggcctgctcttcagcagcaggccagatgcccatgacaggatggactgcaagggcctggaggccgtgcggcgggacaactgccccctggtggccaacctggtgacagccagcctgcggcggctgctgattgaccgggaccctgagggcgctgtggcccacgcccaggatgtgatcagtgacctgctgtgcaacagaattgacatcagccagctggtgatcaccaaggagctgaccagggctgccagtgactatgctgggaagcaggcccacgtggagctggccgagaggacccgctgcagctgctggagcacagcctgccccctgaccaggagcaccacctggagcagctcctggcccagccccagctgtgccagcagcagccccagctgggcccgggctgtgccccggctgtgctactgcggcggcaccaccagggctgcccggcgctgcagccgggcccgctgggccgcctcctggcccagccccaatgctgccacagctgccctggccgccgcccagtgcagcgccacccgggagccctgtgtgtcctctgccagccctggcagcctgagctgcatcagaagacgctaccccatctag

SEQ ID NO: 164634 - DNA, 3324 bp, synthetic construct
  misc_feature 1..3324: note = Description of Artificial Sequence: Synthetic coding sequence
  source 1..3324: mol_type = other DNA
atggatggcaagagaagacctggccctggccctggggtgccccccaagagggcccggggcggcctgtgggatgatgatgatgccccccggcccagccagtttgaggaggacctggccctgatggaggagatggaggccgagcaccggctgcaggagcaggaggaggaggagctgcagagcgtgctggagggcgtggctgatggccaggtgcccccatctgccatcgacccccgctggctgcggcccaccccaccagccctggacccccagacagagcccctcatcttccagcagctggagattgaccactacgtgggccctgcccagcctgtgcctgggggccccccacccagccggggctctgtgcctgtgctgcgggccttcggcgtgacagatgagggcttctctgtgtgctgccacatccacggctttgccccctacttctacaccccagcccctcctggcttcggccctgagcacatgggagacctgcagcgggagctgaacctggccatcagccgggacagccggggcggccgggagctgactggacctgctgtgctggccgtggagctgtgcagccgggagagcatgtttggctaccacggccacggccccagccccttcctgcgcatcaccgtggccctgccccggctggtggccccagcccggcggctgctggagcagggcatccgggtggccggcctgggcacccccagctttgccccctatgaggccaacgtggactttgagatccgcttcatggtggacacagacatcgtgggctgcaactggctggagctgcctgctgggaagtatgccctgcggctgaaggagaaggccacccagtgccagctggaggctgatgtgctgtggagcgatgtggtgagccaccccccagagggcccctggcagagaattgcccccctgcgggtgctgagctttgatattgaatgtgccggcaggaagggcatcttccctgagcctgagcgggaccctgtgatccagatctgcagcctgggcctgcgctggggcgagcctgagcccttcctgcggctggccctgaccctgcggccctgtgcccccatcctgggcgccaaggtgcagagctatgagaaggaggaggacctgctgcaggcctggagcaccttcatccgcatcatggaccctgatgtgatcaccggctacaacatccagaactttgacctgccctacctgatcagccgggcccagaccctgaaggtgcagaccttccccttcctgggccgggtggccggcctgtgcagcaacatccgggacagcagcttccagagcaagcagacaggaagaagagacaccaaggtggtgtccatggtgggccgggtgcagatggacatgctgcaggtgctgctgcgggagtacaagctgcggagctacaccctgaatgctgtgtccttccacttcctgggggagcagaaggaggatgtgcagcacagcatcatcacagacctgcagaatggaaatgaccagacccggcggcggctggccgtgtactgcctgaaggatgcctacctgcccctgcggctgctggagcggctgatggtgctggtgaatgctgtggagatggcccgggtgactggagtgcccctgagctacctgctgagccggggccagcaggtgaaggtggtgtcccagctgctgcggcaggccatgcatgagggcctgctgatgcctgtggtgaagtctgagggcggggaggactacaccggggccaccgtgattgagcccctgaagggctactatgatgtgcccatcgccaccctggacttcagcagcctgtaccccagcatcatgatggcccacaacctgtgctacaccaccctgctgcggcccggcacagcccagaagctgggcctgacagaggaccagttcatccgcacccccactggagatgaatttgtgaagacctctgtgaggaagggcctgctgccccagatcctggagaacctgctgagcgccaggaagagggccaaggccgagctggccaaggagacagaccccctgcggcggcaggtgctggatggccggcagctggccctgaaggtgtctgccaacagcgtgtatggcttcaccggggcccaggtgggcaagctgccctgcctggagatcagccagagcgtgactggatttggccggcagatgattgagaagaccaagcagctggtggagagcaagtacacagtggagaatggctacagcaccagcgccaaggtggtgtatggagacacagacagcgtgatgtgccgctttggagtgtcctctgtggccgaggccatggccctgggccgggaggccgctgactgggtgtctggccacttccccagccccatccggctggagtttgagaaggtgtacttcccctacctgctgatcagcaagaagagatatgccggcctgctcttcagcagcaggccagatgcccatgacaggatggactgcaagggcctggaggccgtgagaagagacaactgccccctggtggccaacctggtgacagccagcctgcggcggctgctgattgaccgggaccctgagggcgctgtggcccacgcccaggacgtcatcagtgacctgctgtgcaacagaattgacatcagccagctggtgatcaccaaggagctgacccgggccgccagtgactatgccggcaagcaggcccacgtggagctggccgagaggatgaggaagagggaccccggcagcgcccccagcctgggggacagagtgccctacgtgatcatctctgctgccaagggcgtggccgcctacatgaagtctgaggaccccctgtttgtgctggagcacagcctgcccatcgacacccagtactacctggagcagcagctggccaagcccctgctgcgcatctttgagcccatcctgggggagggccgggcagaggccgtgctgctgcggggggaccacacccgctgcaagacagtgctgaccgggaaggtgggcggcctgctggcctttgccaagagaagaaactgctgcatcggctgcaggacagtgctgagccaccagggcgctgtgtgtgagttctgccagccccgggagagcgagctgtaccagaaggaggtgagccacctgaatgccctggaggagcgcttcagccggctgtggacccagtgccagcgctgccagggcagcctgcatgaagatgtgatctgcaccagccgggactgccccatcttctacatgaggaagaaggtgaggaaggacctggaggaccaggagcagctgctgcggagatttggacctcctggccctgaggcctggtag

SEQ ID NO: 164635 - DNA, 1410 bp, synthetic construct
  misc_feature 1..1410: note = Description of Artificial Sequence: Synthetic coding sequence
  source 1..1410: mol_type = other DNA
atgttttctgagcaggccgcccagagggcccacaccctgctgagcccccccagcgccaacaatgccacctttgcccgggtgcctgtggccacctacaccaacagcagccagcccttccggctgggggagaggagcttcagccggcagtatgcccacatctatgccaccaggctcatccagatgaggcccttcctggagaacagagcccagcagcactggggcagcggcgtgggcgtgaagaagctgtgtgagctgcagcctgaggagaagtgctgcgtggtgggcaccctcttcaaggccatgcccctgcagcccagcatcctgcgggaggtgtctgaggagcacaacctgctgccccagcccccaagaagcaagtacatccacccagatgatgagctggtgctggaggatgagctgcagaggatcaagctgaagggcaccattgatgtgtccaagctggtgactggaacagtgctggccgtgtttggatctgtgagagatgatggcaagttcctggtggaggactactgctttgctgacctggccccccagaagccagccccacccctggacacagacagatttgtgctgctggtgtctggcctgggcctgggcggcggcggcggggagagcctgctgggcacccagctgctggtggatgtggtgacaggccagctgggagatgaaggagagcagtgcagcgctgcccacgtgtccagggtcatcctggccggcaacctgctgagccacagcacccagagccgggacagcatcaacaaggccaagtacctgaccaagaagacccaggccgcctctgtggaggccgtgaagatgctggatgagatcctgctgcagctgagcgcctctgtgcctgtggatgtgatgcctggagaatttgaccccaccaactacaccctgccccagcagcccctgcacccctgcatgttccccctggccacagcctacagcaccctgcagctggtgaccaacccctaccaggccaccattgatggagtgcgcttcctgggcaccagcggccagaatgtgtctgacatcttccgctacagctccatggaggaccacctggagatcctggagtggaccctgcgggtgcgccacatcagccccacagccccagacaccctgggctgctaccccttctacaagacagaccccttcatcttcccagaatgtccccacgtgtacttctgtggcaacacccccagctttggcagcaagatcatccggggccctgaggaccagacagtgctgctggtgacagtgcctgacttcagcgccacccagacagcctgcctggtgaacctgcggagcctggcctgccagcccatctccttcagcggctttggagcagaagatgatgacctgggcggcctgggcctgggcccctag

SEQ ID NO: 164636 - DNA, 447 bp, synthetic construct
  misc_feature 1..447: note = Description of Artificial Sequence: Synthetic coding sequence
  source 1..447: mol_type = other DNA
atgttttctgagcaggccgcccagagggcccacaccctgctgagcccccccagcgccaacaatgccacctttgcccgggtgcctgtggccacctacaccaacagcagccagcccttccggctgggggagaggagcttcagccggcagtatgcccacatctatgccaccaggctcatccagatgaggcccttcctggagaacagagcccagcagcactggggcagcggcgtgggcgtgaagaagctgtgtgagctgcagcctgaggagaagtgctgcgtggtgggcaccctcttcaaggccatgcccctgcagcccagcatcctgcgggaggtgtctgaggagcacaacctgctgccccagcccccaagaagcaagtacatccacccagatgatgagctggtgctggaggatgagctgcagaggatcaagctgaagggcaccatctag

SEQ ID NO: 164637 - DNA, 663 bp, synthetic construct
  misc_feature 1..663: note = Description of Artificial Sequence: Synthetic coding sequence
  source 1..663: mol_type = other DNA
atgttttctgagcaggccgcccagagggcccacaccctgctgagcccccccagcgccaacaatgccacctttgcccgggtgcctgtggccacctacaccaacagcagccagcccttccggctgggggagaggagcttcagccggcagtatgcccacatctatgccaccaggctcatccagatgaggcccttcctggagaacagagcccagcagcactggggcagcggcgtgggcgtgaagaagctgtgtgagctgcagcctgaggagaagtgctgcgtggtgggcaccctcttcaaggccatgcccctgcagcccagcatcctgcgggaggtgtctgaggagcacaacctgctgccccagcccccaagaagcaagtacatccacccagatgatgagctggtgctggaggatgagctgcagaggatcaagctgaagggcaccattgatgtgtccaagctggtgactggaacagtgctggccgtgtttggatctgtgagagatgatggcaagttcctggtggaggactactgctttgctgacctggccccccagaagccagccccacccctggacacagacagatttgtgctgctggtgtctggcctgggcctgggcggcggcggcggggagagcctgctgggcacccagctgctggtggactag

SEQ ID NO: 164638 - DNA, 1410 bp, synthetic construct; identical to SEQ ID NO: 164635
  misc_feature 1..1410: note = Description of Artificial Sequence: Synthetic coding sequence
  source 1..1410: mol_type = other DNA

SEQ ID NO: 164639 - DNA, 468 bp, synthetic construct
  misc_feature 1..468: note = Description of Artificial Sequence: Synthetic coding sequence
  source 1..468: mol_type = other DNA
atgttttctgagcaggccgcccagagggcccacaccctgctgagcccccccagcgccaacaatgccacctttgcccgggtgcctgtggccacctacaccaacagcagccagcccttccggctgggggagaggagcttcagccggcagtatgcccacatctatgccaccaggctcatccagatgaggcccttcctggagaacagagcccagcagcactggggcagcggcgtgggcgtgaagaagctgtgtgagctgcagcctgaggagaagtgctgcgtggtgggcaccctcttcaaggccatgcccctgcagcccagcatcctgcgggaggtgtctgaggagcacaacctgctgccccagcccccaagaagcaagtacatccacccagatgatgagctggtgctggaggatgagctgcagaggatcaagctgaagggcaccattgatgtgtccaagctggtgacctag

SEQ ID NO: 164640 - DNA, 771 bp, synthetic construct
  misc_feature 1..771: note = Description of Artificial Sequence: Synthetic coding sequence
  source 1..771: mol_type = other DNA
atgtttcctgtgctgcccggcagccacctgctgctgaacaacccagccctggagttcatcaagtatgtgtgcaaggtgctgagcctggacaccaacatcaccaaccaggtgaacaagctgaacagagacctgctgcggctggtggatgtgggggagttcagcgaggaggcccagttccgggacccctgccgctcctatgtgctgcctgaggtgatctgccgcagctgcaacttctgccgggacctggacctgtgcaaggacagcagcttctctgaagatggagctgtgctgccccagtggctgtgcagcaactgccaggccccctatgacagcagcgccatcgagatgaccctggtggaggtgctgcagaagaagctgatggccttcaccctgcaggacctgaaggaggccgacacccccaagtgtgaggagaaggagaggaggaagcgggagctgcacagcagcgccaccggccgcagctgccgcggggccagcgagcagaggctgggagatgcccccagctgccgggtggtggtgcacggcgtgcaggcctgcaggatggagggcgtgtgcctgaagtgccggggcgtgaaggagacctccatgcctgtgtactgcagctgtgccggggactttgccctgaccatccacacccaggtgttcatggagcagatcggcatcttcagaaatattgcccagcactacggcatgagctacctgctggagaccctggagtggctgctgcagaagaacccccagctgggccactag
